United States Patent Application Publication US 2004/0166519 A1 - sequence listing, part 4

SEQ ID NO: 5712 - DNA, 73237 bp, Homo sapiens
agcaagagtttttatcatttatattatgcatgccagttttaaatgcaaaaataagaacacagctcacatgcaaaatcactgaaattacacaaattctattttgtagcctgaacatgcatatatatttcattctttccgtaatggtgaaaacactccacaaaattaagttaactatttttatttcactctcgatacatgcacatccaatcaacacgctctaccttaggcataatactaatgagtaaggaagagctgaaggaagaggaactatgggttgccccatttttccctttctatttatgtcataatacatggttgcctaacacagggacacaacacccctaagaaagcatatgatagggttccccggtcattcatctttcctagaatactattgccttctgttatggattgaatggtgtacctccacaaaagataagttgaagtcttaaccctcagtagctcacaatgtgaccttattaggaaataggttcattgcagatgtcattagttcagatgacatcatattgagtagggtgggcccttagtccaatatgaccggtgtccttgtaagaagacatggcccggcgtggtggctcacgcctgtaattccagcactttgggaggccaaggtgggtagatcacctgaggtcaggagttcaacaccagcctggtcaacatggtgaaaccctgtctctactaaaaatacaaaaattagccaggcatggtggtgcgtgcctgtaatcccagctactggggaggctgaggcaggagaattgcttgaaccctggaggcagtggttgcagtgagccgagattgtgctactgcactccagcctggcaacagagtgagactccatctcaaaaaaaaaaaacaaaaaaagaagaagaaaaagaagactacgtgaagagaaagagaagaagcccgtgtgaagacacaggcagggtctggagtgctgtagctacaagccaaggaagaacaagggactccagttgtaatacctggccacccccaaaaaccaggaagaggaaaaaagaatttttccttagagttttcagagggagtgtggccctactgatgccttgatttgggacttctagtacccagaatcgtgagagaggaaagttctcttgtttcaagccatcccattgttgtactttgttatggcagccccagaaactgataacaccttctttccgtgttccaaagcaagttctagttcaaatagaaagcacagcctctcaggtactccccccaccccatgcccacttgtacacatgatccactgaccttctgctccctttgaatgtcaccaaactccatgcatcgcaggtccactggaattctatgctcatgaggcacgggatatagtacatgcaaacagagaacggaacagcagacacttatcatgtgtctcctctgctccctgcatgcttcactgtcctgaaggacttcatttacaaaacacaggttcaacgataaaattttctatatggatggagctggccctgcgtgagagggaggtttatttttcacttattccttctgtgcctttttaaatttaaaaaagtaatgtggaccagctttatgaatgtcctaggctttgagttctgtttgcaaaatgctgcttttttattcttcctgccttgttctcagacctaatctgccgactcatatctcaagaacttgtagtcaaggatcataaaggatttggcaaatgttctcttgactaagtagagcacacgattaaaaatcatttaaaggcattggattggtttttggttaaagatcaaagtggtaataaggcagatgtcttccgtctgtctctataaactgagccaggcttcatgcttttggtcctgaatggagcagtgccaaccattaacaccatgaggaaacactattcaaagtatatgcctcaacttcccctggacagttgagtatttgaggaatttatatgcttgaccctgtcaggatattcactgcagtatggttacatggaagcaaatattcactgcagtgtggttatatggaagcagaaggctagaaatgtatggacattcccaggctaaatgtccacacatcatgatggatccatactatggaactacgggatgccatgcagttctttgggcactgccataaaacaacaaaacacaaaacagtaaggcacacaaggatgtgtagagtatgctacctttcatgtaaaaggagaaaaaggcatgaatgtctacactggtgaatgcataaatcacttccgaaggaaacataagactctggttatcattggggaggaggagaacaaggcctgggaccagagggagaacgtgtacatttttccatgtttgagagtttgtatcatatgaaaagcaaaaggaaagttcagtgcaaactgggcagttgataatatcacagtgaaaatattagaccaatttgtcctctaaggaagattgaaaagggcagatttttttttttttagggatatataagaaagctgaagataagtagaatgcacttgctctaaatctgttgttcccaacctgtgagcttcagaggttgagggtggagggatggtaactgactcatggtaagcacttaatgaaagtttagtttttgaatggcttaatgaatgcttcttcttgtcttggttgggggtggatgggagaagtgattccagttgcattggtacttcctgctgcccggcacaggaagccttctctgctaagggcacctgtggacagtgactcagcacaaaaccatctgtttattggtgcaatgtatatttactcttcagaaatactgagaaaatgagggactctggagaatgatacacaaaggggtgtggaatgagtatgcttagaatcctactgaaatacccctggagaaaagcccaaagcttctgctttccctcttagttatccaaactcctgataattgatagctgaagtttaggaaaagggcagtacatattagtgaataataaaggcctatcttctttcaatgtacccagcatagaaagactgggaaataaataatactgctatgaaaaacaaaacaaaacaacaatgctgttcattgttgttgaatggaagaaccctctagtacatattgatatgtcatgtgattattttaaagtaacattcactctttttttctggttatgaaataatgcatatttcttgttgaaaatttagaaaatacagaaatattaggaaaaaaggtaaattaaaatttaccataatcctaccactctgattacacagttaatatttttgcatatgtgtgtgtgcatgaatgtagtttaactgggatcgtactctaatctttttttgtttttattcatccccttaaagacagcttattctttctcttgtttttgtttttgttttcagaggcagtgtctcgctctgttgcccaggctggagtgcagtggcacaatcacggctcactgctgcctcaacctttggtgctcaagtgattcttctatttcagctttctgagcagctaagactacaggtgtataccaccacacctggctagtgtgtgtgtgtgtgtgtgtgtgtgtgtgtgtgtgtgtgttggggggcgggggcgggatcttgctatgttgcccaagctggtcttgaactcctggcctcatgcaattctcccacctcagcctgccagtgtgctaggattacaggcatgagccaccgtgcccagcccagtttatcctttttatttaataaattataaacattttctccaattcatcatgcatcctttaaaaaatgcttttaagagacaaataattattaaaccagttccctgttctaatggttcactatgatgaaaaagcatttttgatgaaacacctttgaaataaatctgctttttttaaaagaataaatttctacaggtggaagagttggatcaaataatacagtttaaaatgttttgatttatgttgtctttcagaaagatggtcttaatttatattcccaacaacactgtggattgaccaaaattccttaacaaaaaagtaccccactgtttttttaaaaaaagcttttaatttgcatgctagggagtatgagcattttaaaaataacatctatccatatgaattccttctctgacggcatacctactcatgtcttgcatccatttctgcacgtagggtgttaatgttttacataccgatttatcagaggtctagaaagtagcatcaaccttttgtcacatttgttaaaaatattttctcaaatttgtcgtttgcctttttggcaatgataattgatgtatctagatcctgcatatttattcaaatttgtctactcaccttgcctttggtttcttcccatgtcttagtatctaggccttcccctccgtataattcgtgtatgttttcttcttatcctcttgtgatttgcttgtttgtagttctctgagttcttatatttattttggtgatatttaaacaagtccttagttttacttttttcccccaacctaatttattaaataatttagccgtttatacttgtcccaacaaagtgaaatgccacatttatcatacagtgaatttttaaatatattaaattttcctagactttcagttattccactgatgcttaatccatccattcttgtgtgaacactacactgttttaactatagtgttgcaatatgctttaagatttgataatacaggtctgtccccccagtttttttgttcgtttgtttgttgagacggagtttcactcttgttgcccaagctggagtgcagtggcacgatctcggctcactgcaacctccgcctcccagatgcaagtgactctcctgcctcagcctaccaagtagctgggattacaggcgtgcaccaccacactcggctaattttttgtatttttagtagaaacagggtttcaccatgttagccagtttggtctcaaactcctgacctcaggtgatctgcctgcccttggcctcccaaagtgttgggattacaggcgtgagccaccgcgccccgccatccccccatttttaaaatataaatttcttagcttttctcgcagatattctcccatttgaaggttagaaaacatgttaagtgccccctcctccaatctacccacaaccattaaaattttattaaatagagtaatttgggttaagttggtgtttgtgcctctattccttcaagccttctttattatgtttcaacctttgtaatgtcttcattaagagcctgcacatttattcagtttatttttaggtatcttacacttttaaaatggttcgtttgttttacattaaaactgctcttcaaggtccaattgaagcttatcaaagctgatttaatttttttttcccaggtgtgtctttatgtgcaggaaagcagtcagaaactaaaggctcttcagtcacagttgtttactgagtgttcacttaatacctggtgtagtgattatccctttacacgcattatctcctttaattttcagcaggttggtttaacttttatttccattttacacacgaggctctgagtttgaggaacttgacaaaaatcacccagttggtaagtggatttgattccaaatttgtgaatctccaaaactatcacaaaaatcaatcagccaagaaggatagcccaatgctatgccatcagatgggctgactcaaaaggatgactttccaaaagcaagcaattgaattaaaaagacaatgttttccatccaccggacccggcaaaaaaagactggttttcctccaatgtgaggcgtagttcatattctgcaggagcacaataataccagtgacttaggctcctttagaattagggactcgtgggtgaacaagggtggtttttctgcagctttcactggaattgtccgtttggaaatctacctccccatggcagggcgggtttcaaagaagaggagaacaaacaaaaaacaaaaacaggaaaaaaaaaaaaagagagagagaaagaaaaacaggtggaaccgacgtaaggatggctagagcagtgcgcgcggaaggcagaactttctgggggcgtcctgtccgcacgtttcacgcgtggtgcgcgcaggtggcgccgcggtccctttgctccctgcgcaagccggaggggtgcccagaaggctaccactagcctcagcgaaggtgagagagaagctttccgccgaagcgagggaggagggcgggcaggaagcggagccagagctggcaaagaaaggctccaattcccagccccccgccccgcggggcgcgggggcgccggcagcgcatgcgcgaggcccggcccccaattcccccagcgagggagggaggcccccggcggccgggagcctgcgagccgcggcgggacccgagcgcacgcaggggcgcggcgacggcgggggctagtcgggctgcggaggcggccgtcgggagtgcggagcgcctcggacgagggtccaaccgccggcaggcaccagagggcacggctggctcggcactgggaggggcccggcgctcgcagccccccacgcccagagaggatgcgtgagtttcgccccggctcgagggcaggatgtgggagcaggacaaaggctgggcggcgggggaggagttggggacggcgagcctgtggccgccgccagagccccagcctcgagcgagctagcggagttgacaactttctctgcaacttttgcaaaagggaagataaaaattctgcaagttgttgcacagctccatatcgccccgtgtccggcgagcagaggggagggggcaccgcagccttccgcggaccagaggcgacctccagctcctctgagcggcgcaggagggggcgcccgccggggcccggggccaggggcgagagaggatagggacaccgggggtcggagcccggggtacgctctggccgctgaagttgcccgtgtccacgcagggtgcgccctgagagccgggtagcctcggatagcggcgctgcgtacgcgatgatggatgagccgtggtgggaagggcgcgtcgcctcggacgtccactgcaccctgcgcgagaaggtcagtccctccctgcccttgtcactctcaagactgggtacagtctccttcggtctcgacttcgtgttctcaggtcgcctgcgtgggaactcagaactcccgggtgcctttttttcctcttaccctttaccttctcccggagtgtctgagcggaaytggggggcgggggttagagactggagatgggagagattgaagttggtttttctgataaggagctcagaactctgggccaactagtcagagacagccactgtacctctaaggcagtgtttcctatagtattgccaccctaggttattttaaaccgtacgtgaaggggtctttaaaaaatattgtgtattcattctaatgtgtaatttaagaatgtgtatgtatctagcaagctctgcgtttgcgattttccatttattgtaataatgatgtcgcagtttattttaaaacaaatttaagtaaaagtagtaactctatataaagataagtggtagtacagggaatacatggttatggccaaatacrtgtatctatgtgtatatctagaatgggaccgaatgaaatttaaggaacacctgtataattgaaagaggctacaaaacagggaggctgagggaagaaaacaaaaactcccctgccggtttgcctcctgtggcagaaggtgggtgggagcagctgaaatgtgatccctgcacacccctcccctcaaggagagaagggctgaggggcattgggaaggtggaagagtccaggtgggctggaggcatggcctgtgtgtcttgcctccagtccctgggctgagattggcaaggggtggcttggggaacaggtgtgaagtagtgaatggattggtttcctagggctgccattacaaaggaccacacaaactggagggcttaaagcaacagaaatttatttcagctctggaagctgaagatcccagatcaaggtgttagcagggccatgactctcaaaaggctctagagaaggatctttccttcttccttcttaaatttgctggtgcttggtcatccttggcattcctcggcttgtaggtacatcattccagtctctgcctccactgtcacatggtgctatctgtctgtctgttttctcttcttacaaggatacccgatcattggagtagaacccaccctaatccaatgtgatgtcatcataatttaattacatctgaaaagactccatttccaagtaaggtcacattctgaagttycagattaacatgacatttggggggacactactgcgcccaatacagggaggaaaaggtcttcctagtgcagtacctgagcccccacacaggtttcacagtcagtgcatttgctccgagtgtctggaggagttctgcttaaagggtcaccagctactcagtgtttttacctcattgagtagctgtcttcctgtccaattaatgcctttttcttttctttctgtacctgctgacctgtctttgtcctgcgttgcttggcaaggctgtggctttcatctgttcccttggtcttcttcccagaacagagtggccaacgtgtggcacattctaggcatctggacaagaagaaatccaggtcttgttggttcagttgaaaagcaaggaaagtggtaggggtatggtcctggcccttttctggaggaggtggctgaatggagctagtgaggactgccgtggaaattgggcttccttgtttatcatagactcaagtggttgtcatttctgctcatagcttaggaggaacgacttctacctgatttgcccctttctagagggaaggatttctaagagcaataaatgccatttgtttagttacctgagaatgcccaaccttttatacataagggaggatgtcctaaatgttccttcggctgctcaaagaagcaagaaaggctccatgaactgctatagccatgtcatagtgccgtatgagtttactattgggctgcccacctcggagagacgatgagtttgtcccagttttgcaggttagaaatagaaagctcacccaaggactgatggccaaggtcaaccttgacttaaagctggccttattaggacaaatcccaagttcctttggttataatgtcccacctcctcaaaatactgctattgttctcctttactttatttcctctcccacttcaaagaagaaaatgcttcttcaaaaatttggcttcatggagtttggcaagaagagtgaagaataggggaacttagtagccatactagcctcgcctttcttgaggaatgagggctggcattttgtttttctcagacagggtaattgtttttctcaaatgtctactctgataatatgtttctaacactgtagaacaactttacaagagcgtggcacacagtagacactcttagttgaatgttgcctgatgaatacaaagcatgtttacatatrtgctgtgtaactgtttccatacaaccacaagcagttatcctcacctgaccgacacaggaggcgaagwtgagatcactgagacgttgggagccccastttgtcaaatatgagattccagtctggcatcatactacagggtatcaaaaacttgacaccatggaaacaagtcttggtactgcatgcacgctagtgatggaagtgaaaccctgatctgctcatttaacctctctaaatctggcccctatcatccattcttcccagaatagccagaatttagattgtgtcattctctgcttaaagacctccaatgtcatctcactgcacttaaaattcccagtccttaccactgcgtggaatacccagcatagcctggctctggcctgctctctgaccttgtctcytaccccttccctaccctccatgccattgctcttaagccacactgacctcctttctgttcctggaacaagtcaagcttgttcatgtctcagggtctttgcactggctctttcctctatttggattctgtgtttctcagactctcacatggttgcttgtctcccttaatctattgctgcctctccatgtcactctattaaatcaccttgctttttctttgtagcatttaccaggatctgaagtgtttttctgttttttgtttgtttggttggttggtttctttgagacggagtctcactctgtcgcacaggctagagtgcagtggcactatcagctcagtgcaacctccgcctcccgggttcacaccattctcctgcctcagcctcctgagtagctgggattacaggcatgtgccaccacacccagctaattttygtatttttagtagagacggggtttcacctgttggtcaggctggtctcgaagaacccctgacctcgttatccgtcagcctcggcctcccaaagtcctgggattacaggcgtgagccacygtgcctggcctgaagttatttttcrtttgtttgctgcctttcttcccacactagaatacatgctacacgagaagagrcctgtgtctgtcttcttccttgcgggggcctcagtgccatgaacacagcttcccratgtgtatggaatgacaaggagaatgaataagtcagtcttcgctttcctcttctgtaagctgggagaaacgttttacagcaatgttaagattaagtgagataacttaagaacagtgtgaggtgcatggtgggtacttggcaggcattgcacctctccacttagggttgctgcaagacagtgatggcccgttcacatagtgctgctcagagtaaggcttagggtttgtgaccaccctccaaggggtccacagatgtgatgggtaatccttgtaagaaaggcactgttagccacttggaccattggtcctatgatggtgttgaagtcaggaaagggactagttcaccaaaaatcatgtatctactgagggctgggaaccaggagtgagaccccattggtaagaccctctaagcagcctggcatcccaatgggtgaatgtggggagttgaaccctcctccagcccaaattgctctggagaaatctctccctccccttcctgtaggccacctttatcccatgctcagcccttaaattcctccttggatccttcttcctgtccctgctgcatctgcagaagcccacctaggaccccgctcccttcagctcctctgacctttctgctgggggtgggagtgccagccagtacagggatgtggggtttcttgcctgctacgtgtgccccttgaccctcttccctgaaccaaaaggaggagtagattgtcaccaggctggcgtcaccagtgaggaggctgctagtgatgtttttctggtaaccaagtctgtgccaggtctgtccagattaaaactcggggccatttgtttttttcttgaaagatgcatccacctaagtttaaaattaatagggtgttgaatccaagaactaacagattttggtgagtgctggttacacatgatggaacgagagcattggatggtatgcagcttgagggccacgttccttgtcccttaagcctctcctttgtcatgtgtcctggccccaccctcatccttgcttctttcaccatctttgtcaccctgcatagtgacttgtcctacccactagactgtgagctccttgcaggtatgaggtgtgccttgttaccttggcattcccagaccagtgtctgagtcagagagggacctcagggtgtcccccacctcacctgatgcaggcacaggcattgggagtgcacaaaagagtgagacagccccaaatggactcttctgggaaatgttgaatgaatgcttgtgtgcagggatgcttcctgggaatccttcatctcgtcttcggcatctgccaggacagtctktgtgtgtgtgggcacagcattgactgtggtgcccagcacaggatctggttgatggaggatgccaccccagcttcctacagacctgcatgttctcctgtcaggtaacatggggcaggaagttagaaaagcaattacctgcaagggcagatttactggcctggaccaaagtacagcttaaggatcttaggaaaataactgcaggttgcgcccagataacagaaatgtagataattcctcccagacttctaacaggaggtcctgtttttcttcctgaattttctgagcagcaaagtagatagaacttgcactcgtctccttttgatttatgcccattttacrcatagtcttccctctccaattagaaggaaatagttatgttagtaagcaaagacacacaccactgtgacttaaggcttcatgagtgtgtagaagactttctgaatacagggatttctggagttcttaggggaaaaaaatctccctcccaaagscatgttgataagctctgcttgacatgagctggtaactttatcttcctgggctccagggagccaggggctaggggctccctccttctcgtccactgggtgtttaccttctcccaagacgggagtcatgtgataccttaggggtcttctcatcctgctccagacttgagatctgcagggcaaccagccacctaatgcattttttcccacttcctgaagcttacttcattgcacactcagaggacttcagctctgtgagaccgcttttttttttttttttttttttgagacggagtcttgctctgtcacccaagctggagagcagtggcatgattttggcttactgcaaccactgcctcctgggttcaagtgattcccctgcctcagcctcccgagtagctaggattacaggcgcacaccacacccagctaacttttgtatttttagtagaggcggggtttcaccatgttggccaggctggtctctaactcctgacctcaggtgatccgcccgccttggcctctcagagtgctgggatcacaggcgtgagccactgttcccggccacatttcttaaaccagtggacagataaaagatgtttgatttgtgactgaatctatgcaaagatcttccaaaacatgaacagcaaacatttcgtttagtgwtgataatgttagtagctactgtttattgagcactttctagatttcaggcagtgtgccagcatgctcccatatattatcttatttactcctcactttggccctagtgttaggattaaccccagtttacagacaagaaactgcaaggctcacaggaataagtgtctgagatgaaaccgcggattgtatcaaagcttgaacgtaaattcattttwaaaatatccaatttaacacaaagtggaaatacaaagcaggggaaaattgaggttctgtcatccatgacactataggctcttgtgttttagtttgttttctggcgctctccaacggatgtgctctctctaaaccatcytgagaagccagccgctatggaygtgggccttgctgtgggcattggaaagggctgatgactaggccaaggtcgcctttatttggccctggtgagtggccatgcctggrcctcacctgtgtgtggtgcctctcccctcaaagtgatttggcctctgccattgcctgtccctaacttgccagggaaaaggacacctcagggcccccccgcttgccgaactctgacagctggatagtggtagaaattcatcccagcttcatcctcagcccctgtgtcaaaactgcattatttttttagtgactcctgaagcttgcacgtccttttatttctctctttcaacatcagtatttttttctcactccttcccctaaattcctcaaatttccccacttcaaggctgaacacctgtctccttatagaaatcagtgacctggccaggcgcggtggctcatgcctgtaatcccagcactttgggaggccgagatgagcggttcacgaggtcaagagatcgagaccatcctggccaacaaggtgaagccccgtctctactaaaaatacaaaaaaaatagccgggcgtggtggtgtgcacctgtagtcccagctactcatgaagctgaggcaggagcattgcttgaacctgggaggcggacgttgcagtgagctgagatcacgccattgcattccagcctggtgacagagcgagatttcctctaaaaaaaaaaagaaagaaagtagtgaccaaggtccatactcaacaaagggctcatggatttgggtaggtcatcctccgcttggtttttccattcccttcccctccttttggatttctgcatccctcaagggaaagttccccccaaatcacaagatgcccccagatctaccaaaaagaaagtgttccaaactctggcagtgggatgtgtctgcccggcttagttacaggaatgtgtcattcaggcctttcaagctcaaatgctggctttgacaagctctttcctcctctaatggcagggctatcttatgtttgcagtcttcargtgagacctgaagcagtctgccctcatgaccccctggagatgaaggtgtgggggttcataaaataaggagaaatttcctgcagtctaacctgcagaggtgattcaagctgtcttagaaggtgtatacagaggatggaagatggactgggaagaattgaaaaccgcaaatgaggttgggggacaagatgggctgccactcaagatagtgtctagctttgaaactgactgcagtgcttcacccgtattctcgaggaatctggtgacaaaactgaaccagaacttggcgttgtcacttgagtcttttaggtcttagaataccaaaatgctsagtgtgtgcacgatacccagtcaagacatggtctcagtgcaccttatctgtggcagaagcaaattacctttgaaggcttcctttcctctgcaaaatcacgacagcaatccctgccccacctgccacccaggtgtcccagggagaaaatgggtgtgggtgtaccccatcaatctccagggcctccacatcatgagatgggcaagggacttggctgggcaccctggttggctggggaagcctgtgctgtctaagggagtggaggacatttaagacttggagctggccctgtgcccttgtcattgacttcttctttgtcttcctaaatcacacagtccctcgggtaaagggagtgcagccagcagttctctagtatatctgagcacctggcagaaagaggtgacactgcgactctgctgttctctctttttctttttgagttattacacacacacacacacacacacacacacacacacagacacacagaggatttgtttaagaaatggcaaaaatgaatacaagcaaacagaagaaagtaaaattcccctcacaatcctaccacttggaaacaatctctgttgacatttttggtgtgtgtcctttactgtgygtgtcatcacaatacatttttattttggatttttttttttttttgtaaaaatggaaaataccggccgagtgcagtggcttacgcctgtaatcccagcactttgggaggctgaggcaggtggctcacttgagatcaggagtttgagaccagcctggccaacgtggagaaaccctgtctctactaaaactacaaaaattagctgggtatggtgatgagtgcctgtaatcccagctactgaggaggccgaggcaggagaatcgcttgaacccgggagacggaggttgcagtgagccgagattgcaccattgcgctccagcttgggcaacaagagcaaaactccatctcaaaaaaaataaataaatgaaaaggaaaataccttgtcgtaaaacactttatctatttcccatatacatttttccatatcattcttctccacccaattcctgattattggacactagcaaaaaattagaaacaatcaatygtttgtttagaacagataacacatgaatgtgattttgtaaaaccacgctatacaaaagagtagatgatggaaaggcttcctgccaccgttgtccccaaatttccctccgcagaagataccactgaccccaatttctcgtgaatcctattctgtgcataagaaagcataaattacgtatgctttgacagagaggtagtatgaattacacactttaccatttcattattttaatgtttattttattttattattattattwtttttttttattgagacagagtctcactgtgttgcccaggctgaagtgcagtggcatgatcttggctcactgcaacctctgcctcctggggacaaatgattctcctgcctcagcctcctgagtagctggaattacaggcatgtgccatgacgcccagctaatttttgtatttttagtagagatggggtttcatcacgttggccaggctggtctcaaactcctgacctcaagtgatccgcccatctcagcctcccaaaatgctgggattataggagtgagccaccatgcctggcctcattattttaatgtgtagattttaataatctaaataacttttatgaaaccatgaatagaagggatttttgatatatttcgctaattgtagcaataatgatatatagtgggcactcaggaaatttatattgaacaaatgaatagaagatttccttttggtcattttcttttcaagtatatacattttattttacaaaaatactatcaagtatatcacagtttcataacttttttccttaactgcacgtgctaaataaccttctatgtcattttctgtccttctgcaatccaatgcataatgttttatggatacatcatgatttcactaactcatctcattgttggatatttaggggactgcttattcattttttaaaaattgaagtataatttatatacagtacaatatacagatcttaagtgaatataccgtttatagtgtacagtgagttttgacaaatgtatatactcatgtaaccaccaccataatcaagacataaggccaggcacggtggctcatgcctgtaatcccagcactttgggaggccgaggtgggtggatcacatgaggccaggagttcgagacctgcctggccaacatggtgaagccccatctctactaaaaatacaaaaattagctgggcgtggtggcacatgcctgtaatcccagctactcgggaggctgaggcaggagaattgcttgaacccgggaggcagaggttgcagtgacccaagatcatgccactgcactccagcctgggtgacaaagagagactgtttcaaaaaaaaaaaagacgaccgggtgcggtggctcacacctgtaatcccagcactttgggaggccgaggcaagtggatcacaaaggcaggagttcaagaccatcctggccaacatggtgaaatcccatctctactraaaataaacaaaaaaattgctgggcgtggtggcacatgcctgtagtcacagctattcaggaagccgaggcagaagaatcgcttgaacccgcgaggcagaggttgcagtgagccgagactgtgccactgtactccagcctgggtgacagagtgagactccatctcaaaaaaaaaaaaaagacataggccattgccatcaacctagaaagttcctcatcagtcccatcctgcccccagccttaggcaatcactgatgtgctttttgtccttgtaaattagatttgtcttttctagagtttcacataaatggagttatatatatgtactcctttctgcctgctcctttttacttaatgtaatgcttttgagattcatccatgtcgttgtgtctatcaggagtttatttctttttattgctgattagtattccgttttatgtctataaaaatttgttcatccatttccccactgaatgcctttttgagttgcttctcgtgcaccatttgattttatatagcactgctgtggtgatccttgatttatatctgtcagtatgctcaggaataagttcctaaagtggaagccctaatcacagggtatgattttaagaaccttgcatatcaccaggtaatacattcccacaagattgcgctagtatacttccagtggtggtatggaagagtgcctgcttcccagcaactttgctaaccctggatattacccttaaaaaaaattagtaccatttggataggttaaaaatggtgctgaatggctgtgtttaaaaggagcaggagccgggcatggtggcatgcacctgtagtcccacctactagagaagttgaaatgggaggatcacttgggcccaggagtatgaggctgcagtgtgctatgattatgccagagtgaaacccctatctctttttttwaaaaaaagagtgggaacctcgagtgggaaaatgactagagcgggggtgtccaatcttttggctttcttgggccacactggaagaagaattgccttgggccacacatagaatacactaacactaacaataattgatgagctaaaaaaagaatcacaaaaaaatctcataatgttttaagaaagtttaggagtttgtgcttgccacatttaaagttgtcctgggcagcatggggcccatggtctgtgggttggacacgcttgtgctakaggatggcaaggcgagaggaagggaactctgaatcctttctaggcttcatggagccccatctgcagcacggaactgggctgagacctgcatcaagggctggatgagggctgttaaggtgacctggctggaaaactcctccagctccctcttagtccccgcattgcagtgtgtgctgcccctggtaactggatccttcggaggcagaatttgaatcatcctgaggcactcagtgccttgtaggtccctggagcagatggttccaggccctgggcattcttgtgacatggatacccatgccatgccgccagctgctaagtctggaagtggtcatcaagtgatttgggtggaagggttggggggacacgaggaggaaggagaggatgtcattcagaacagaagcatcgggaattggatagattcagttattgtaagggaaagttggagagaacttcaatggcatcagaaggaaattggccacactgcggtccgtccatgcatgaaaatatggtgcagtcattagacgcaacgtggtagacagygttggtgtgcaatggacttttctgattattgtaaaaaaaaaaaaaaaatccaagcaattcagagcacttccgactctttggagtgaaccattgttttttccttaactttttattgtggaaatttaaaaagataacacaaatgtggaaagaacagtagaatgagtcctcacatrcccaccacccagcttcctcacctgtttcatctgctcccccagacagtgtgtcattttacccataaatggcactaccagataagggctttttttttttttaacataacaactatgccattttcacacctaaaataattaccaataattcattaatatcttctgttgtccattcctctgttgtctcagaaatggtttttatagttgttcacatcataatccagataaagtccatgcattacatttttttttagygtcttttaagctgggcatggtggctcacttctataatcccagcactttgggaggccgaggtgggtggatcacctgaggtcaggaattcgagaccagcctggacaacatagtgaaactctgtctctactaaaaatacaaaaaaattagccgggcctgttggcaggcacgtgtaatcccacctactcgggaggctgaggcaggagaatcgcttaaacccgggagacagaggttgcagtgagccgaggtcacgccattgtgctccagcctgggcaacaagagggaaactcatctcaaaaaaaaaatttttttttaaattagctaggcatggtgacacacacctgtaatcccaactacttggaaggctgtggtaggaggattgcttgagcacgggaggtccaggctgcagtgagccgtgtttatgccactacactgtagcctgggtgacagatcaagactctgtctcaaaaaataaataaataaataaatataaaatacrtaagtgttctcaagtattttactctccaatggtcccctaccctgcctgaaaatattttttttcatgccattgattttcagagaaaacagtttgatttgtcctgataaatgtcctatattctggatttgacctgctacctcctcatactgtcatttaacttgaattcattgttaacagattggtttatacacttcgctaatgttgtgggattataatatgctttagcctacctgttttctagctgtagactcaagctgttgtccatcgcttcctcagagaagccgtccctgactcccagacaaggacgggctgggccttttgtatgttctcagagcacccttggtgattccttaagcacttagcacaatttgtaatcatacacctatttctgcaattatttgttgtagagctagctccctccccagactgtaggcccaggggagcaggcgctgggtctctccagctctcagcagagtgtgtgttgcataagagtccctccatcaggatttgctcatcactgacaccttatctgactgaagtctgtgctgtgcagcccgcaaattgccttcctggacttcactgtcgaaactgtctttttttttttttaaatagagtctctctctgttgcccacactggagcgcagtggcgcaacctcgctcactgcaacctccacctcctggattcaagcgattctcatgcctcagccttctgagtagctgggattacaggtgcgcaccaccacgcccggcctcaacatagtcttgtggggtaggtagcatggctaccagtaactccaccatgtactagtagaaaaatggcttctgaggggttaaatgtttgaccagagtcccccttttaagcaaggtagttaaagccttaatattttgcggatctgctgtccccgcctgaccttagataaggcacacatagagcagaggacttgcaatgcagcctccaagttggtgatggtataacatggacttcccctcaagcagagctgacaccctgggcagccaccaagctaggtgagaaggcggggrttggtggagcaaagctgttgacttggcgctggaatttctcttcggtctctccttttgtgttaacttttggttttgaaatcatttcaaacttagagaagagttgcaagcataatatgcaattttgtgaacattttaacacatttgtcctgtcattctttttctctatttatatttcttttcttcaaccaagttgcaaaaataatgccctattatcccttaatacttcagggtttatttctccggtgttttgtttttkttttttttttttgtaaatagagacgagatctcactgtgttgccaggttggtctcaaactcttaggcttaagcgatcctcccaccttggcttcttaaagtgttgggcttacaggcgtgaaccactgcacccagccatggttacttttaagacgggctctgaagtggtttctgcgggaatttttgtcagatcactagggacatctatcttcccaggacctccccagagccatgtttcaggaagaggggattcagcattctagttaggaagaagccaagcagtcactggtgggctttgctggcttcaactgtggggaaggcagagctctggctaattttctggggccatcttcttggcttggttgtcacacagtgcctgcgaaagcagcctctttatccagtggtcatttagtgagcctcatgtgtaatctgcaagacctgtgggaggctctgccaggagaaaccatgacccaaaacctgccctgaggcccttagcatagctgaagatatagtcatatcaaaccacttatagccatatgttaatggccataatagccatttaatgttagtaatgatagtccacttttaatgggtgcttaccatgtgctgagagcttgagatcccctccattagctaagtcctcaggcaactccttccagtaggtcctrtacttatccccattttacagatgggacatgcaaagtttagagagttacataccttacccaagcccacatagctagtaggcaacctggctccaaagctcactcctaccgctataccaaagacaggtccagttgcccaaggaagtcttaaaaagcttcaaggaggaggtgctgtttgatttgggtttgaaggatgagtagaagtttgccaggcagagacaggtgtgaagttcatctctctgcagggtccagggcagctagggagagtcaagcattagcggcctgcaaggggcagcctggtcagttgtggggaggaccaggagatgcaccaggaacactggcttagaggatgtgggtcttcctagatgtttgaaccttatcctgagaacccatggagggcaatgggaagggtggggaggagagtgccagctccctggaaatgcaccctggcctcagagactagttattacagttattgcagtcgccccaaagcgatggcatctgaactaggggaggaagtgaggatatttgacaggttgtagacaatagggtcaaaaggaccagcgaacaaaaagcgtggaagatttcaagtttcttgctagttggaacaaagtaactttccttagctgagcttgttcagcctttttcatagtaaacattattcttggagggccccttctggaaactgtcagttgaaggactccctctgccctgtaagtgaagggarttgatgttcattgggcacctgcagagtgctagcaactgttaagtgccttgtgtatgttatctggcttgattattaaagttgcttcagaaagaaaaaggatgagttaaatgtactgaccaaggcactggtggttcttgaatatctgtgcatgtttattcctgcatttaacacactgtttttagcagccaactgcatgctacacactgtgctagccactgcctacaggatgaacaaaaattgtgtacacaattggggatgaacaaaaattgtgtcatggaggttatagttgagcatcaggctcaagcggagaacttgtaaagcatagataggtgcccagctccatccccaggaattctgattcggtgagacaggaaatagagggtgtattaggtccctagggctactgtgacaayrtgccacaaacttggggctttattctctcacagttgtggagaccagaagtctgacatyggggtgtcagcagaccatggttccctctgaaggctctaggggaaggtccttccttgctcttctatcatttggcagcagctggcattttatccgtggtcttccttggcttgtagctgcatcattccagtttctgcctccatcttcacaaggccttctcctccttgtctgtcctcacctcgtcttccctctgtgtctctgtctctgtttactcttcctataagaacacaaaacactgattagcgcctatcctgatctaatatgacctcattttaacttgattgcatctgtaaagactctattttcttatttatttatttatttgagacagagtctcgctctgtcgcccaggctggagtgcagtggcgcgatctcggctcactacaacctccagtgcccgggttcaagagatctcctgcctcagcctcccgagtagctgggactacgggtgtgcaccaccatgcccagctaattttttgtatttttagtagagacagggtttcacctgttggacaggatggtctcgatctcttgacctcgtgaaccgccctccttggcctcccaaagtgctgggattacaggtgtgagccactgtgcccggctgactattttcaaataaggtcacattctgaggttttgagtagacaagaattgtcagggaaatactattcatcccagtacgggggggaaccccctttttaaataggtccccaggggatttgaatgcgtgtggtcaactggcaacccatttgagaaacctttggactgtagatgggtagsgaagtagagtcgcagcgagggggtagtggtgcagtcaccctactgtcccattttgggcttctcattagggtcgaagctcccaggagaatccacaaaaggaatctggaaatcgggggcaggagctggaggtgtggagggaagagctttggagccactccacagagtgatccaggaggaaagcggagagatccaagaattggacctgtgacagagaaccagcatggagggggacatcgggacctcttcccctggataacagagggcgtgggaggatgaggggcaccccagtcctccactccagaaggtatgggggatgcggtcctgtaggaagctggcagaagtaaagaattcagttggagggtgtggygtcttttaaaaaggccatgaatgttgtgtatgggggtgtttggaggccccagagccatgggttggatgggggaccagtgagggttgtgcacgcatgtgtgtggtcactgtggatgccctggcagctgtggctgggcctggtacagagtttgcccagaagggcagtggctctggcttccgggaatgaggaggtgtgcttggagctggcctgcctgccatctgcccaggagtagtacagacgccggctgcggatgtggtgcctgggttacctttcactctgctggaaggaagctacaggctggacttcagcaggaggggacgttacgggcattgttggccttatgtgacacgggccaccctctcaagaatgttgaaatagtgttcccacagaggtgttgatgctttacggaaaatgcttccttgggccttatgaagcaatcggggcagagagaggaaggagggtgagcctcctgccttgctgggcctcccaggtcgtgctgtgtactgaggcctctgaagagccagcctttctccccctttctttgccactttacatttgcaagtctccacttcctgttggtcaccttggttacacatggtgtttcttcacctctctgcggttctttgttcttagacaagacccctctagctgttgtctcaacccagggcgtggattcccgggctcttgttggcagcagtagggataggcatggtagggagattggaggaggaaagcagagtggtttctcttggtggctggtgtttgagagcagctcagccctgctttactgcaccttgagctgtttacgaagtggttgtcgccctccaagtattgtcataccccaagccctggcccgctcctctgatgtccaagcccaagatttaccactcayctgcagtgtggccttggcagttatacttctgtgcctcagtttcctggctactagggctagtgctggttccacctcggagggtgggtgtggggagatagcaaatgcacatagcatttacgttctagttgtaagggaggagatagtcccatgagagagagagaagtggacatgcgtgcgcacagagaaacaggaccggacatgcgcatgccgacatgtgtacattctccgagtatttacgtgctgatggaattgctggagactttagttctctttgtgctcctctgtattttctaaaattcctatagtgattaagtattttataatcagttaaataaaacattattattattatcattttctgagatggagtctcgctctgtcacccaggctggaatgcagcccactgcaacctccacctcccgggttcaagcaattctcttatttcagcctcccaagtagctgaggctgaggttacaggcgtgcaccaccacgcccagctaatccttttgtatttgtagtagagacggggtttcaccatgttggccaggctggtcttgaactcctgacctcaggtaatctgcctgcctcggcctcccaaagtgctgggattacaggtgtgagccaccatgcccagcctaaaacattattttgaaaggaaaatacaaacaaacctaaactatcacatggagggttagaacacagtgttttgagaacatagtgtctagaaaacagtagagtcagaagacccaggttcagattcaccatttattaactgggtgatcttaagcaagttacttagtctctctgagccatccttgtctgtaatgtagggatgctggtaatctcagaacccttttctgtaagaagcatattttgagattgtgtgacacagaatatgtattgagaaacattgcctttgaaatgactgctaggtgcatagtttataatttttgaagcttccaatctttgtgggtctgttggagaattagagtacaagatgcatggaatgcagtgtctgccaaattatagaaaaaaatattaaattgtatatatacatacagactttcaagttatatatatatatataaaactactatatatatatacacacacatgttacatatatatacacacacacatatacatacacgttagagacagggtctcactgtcacccaggctagagtgcagtggcataatcgtaggtcactgcagcctcaaacttctgggcttaaatgatcctttcacctcatcctcccaagtagttaggcctacaggtgctcaccaccatgcccggctaattttttatcttttgtagagatgaggtctccctaaattgcccaggctggtctcaaactcctggcctcaagtgatcctcccacctcaatctcccaaagtgctggaattataggcatgagccaccatgcttggcctcaagttaaatatttttaatgtatatctatctgtatgtatagagatatctatatatctcataaggctctataaaactattcatcataatgagcaattccaaatactcatgaagacttgcgggaaggtatgagaagctggaggagctaaatttcggaggaaagagaaggctgtgtccttccttgccctaggatggtgtgtgcctcggtctaccaagtagcaacagagggtttccacggaggaagcagtttagtgtttttgttttgttttgttttttaaagagacggggtcttactgtgatgcccaggcttgaatgcagcgcgtattcagaggtatgatcccaatagtgatcagcatgggggttttgacctgttccatttccaagtcgggccagttcacccctccttaaacaacctggtggttccccacccctgggaaatcaccatattatatacataatatataagagatgggcacctggacctcccaaggcaggacacccagcacttggctgcctggggcttctgtgagctgccatgcgctttttgtaagcctctcctaggctcctgatgccatggccatgtggacgttcttactagggcgtttctgcaggtgaaagctgtggttcttaatctcggcaagcttttcagtaaatctctaggtttagaatcattgaattattaggcatcacgccagggatttttgcaagtctcgccttgtggatgcactgcagtttcattttcgctggcataccaggtgccccgtagctggcaccctcaggcaccttttcccagagtcagctttctgggatgttactctgcccccaaagagggaggagggcaggaggagtgtcctgtggataaattcagcctagagttttccaaagttatattatttttttgacgaacaaatgtttcagggcctctactgggctaatataggcttcctttaaggagcaatgtagtatgcgatgtttcgccaaactgtggcccacagaaccctttttttcagggagcatatcttgggactagtgtgccacagaacacacattaggaaacattgcctttgaaaaatgactgctaggtgcacagtttataatttttgaagcttccacttctccataaacactgacccgcttcttccgtggaaacccactgttgctcttgggtagactgaggcacatgtcaccccagggcaaggacagagctttctctttctgctggaatccaactccctcacttactttcttttctttctttctttctctctctctytctttcyttttttttttttttttttttttttaagtaaagacggggtgtttctatgttgcccaggctggtctcatcaagcgatcctcctgtctcagcctcccraagtgttgcaattactggtgtgagtcactgcacccagcccctgccctgtttcttatgcctcctcgctggtcttcatgagtactgggaattgcttattatgataaataggtttatacaacctaagatcaggaacaaataatgttttttctcacctgtttaagtatttgccattcctgaaatatggaggtttttgtaattatcaggtgttccttttgcatcaggtattggggtcacagagctgaacaagacaagcccagtcygtgccctcatggtggttacagtctagcaggcaggaggacagtaagagcaaatgaatgagtagataaaaagtcctaggtgcttgggggggatctcacagaagcatgagcctgaaacacctttttcagcagtgacttttaggccaggcatggtagctcatgtctgtaatcccagcactttgggaggccgaggcaggcagatcacttgaagtcaggagttcgagaccagcctggccaacatggtgaaaaccccgtctctactaaaaattacaaaaattagacgggtgtggtggtgggtgcctgtaattccagctactcgggaggctgaggcaggagaatctcttgaacctagaaggcggaggttgcagtaagctgagatcgtgccactgtactccaccctgggcaacagagcaacactgtctcaaaaaaaaaaattaaataaatagaaaaaaaagaagtgacttttaagctgagatctgaaggaaaagtggattaataatgagaagtaaaacctcaaggcaattagaagaaaataatgcagtgcaggacactaaaagttaaaccgaggacttcacttcctcccctaatagaagaaaccaagggtgcctggcggaactttcatagtacaagtcaccttctaacccctccgaggttagcctcaaaatgctttcaaagcctgtgtgtgaagagcacatgctgaattttttcctccccctccccggctatgcagcagtgataggtatggttctcttgggggcagtctctgccctgcacatctggccgtgggcccagggtcttgagtgactgcatttcacctggcctcacctgcactcccgggcacgtctgagcccagcacaggtatgggaagtgtttgtcactctgccaaggtcagcacctggggacgggggttgggaaaagcagccaaggaccagacacatgcctggaatcttcagagacctgtccaggcagccctgctgcctctctgtctctccgtgtagcttaggttggggctttaggtgggctgtgattcatgagtccttggccttttccggggcactttccctctcaggtaatcctctttctgcttgagaacccccaggcaaaactcttgggcagcaaggagagtggtttctaaaggggcagccacctctccttcccccagaatggctcctctggtctcagaaatgctggctcacacgtcacagtggggtttcccacttggggagcagtgacctctgccatgggttaccctaaggaaggaagccagggtagataagggagtcccgagrggaagggagggcatagagggccacaggcagagggaagattcctcaaaacactctccatgtattcagacgtccattcactgagccagcagctactcattagtacttactctgtgccagggaccaagggtatggccaagggcaggagagaaaagcagctccgtccctcatggaaacccccttctgtggggggcaggggacagttcctaaacatgcttcaatgtgcagtggctgctggcggtgggaagcccacaggaggctgctgggtaggagggaggtcagggatggcctctgaggaatggtctgaacagggacctgaaggaagagaaacagcccacatgcccaaaatctgggtttgatgacgtcatggcacaaccttacggtggaaaactaggcagccattgcagacattgtttcccatgctctctgaggggcaagtgggaagcagttgtagatcgctatggcattttatgagagtttgcacaaagaaatatctgaagaatccaggtagaacctagtagtacttctgtctgaatccttctaagtgagggaatatgagtgatgttattctttttttttttttttttttttttagacagagtctcgctctgtcgcccaggctggagtgcagtggcacgatgtccattcactgcaagctccgcccccccgggttcatgccattctcctgcctcagcctctaatttttttgtatttttagtagagacaggatttcaccatgttcgccaggatggtctcgatctcctgacctcgtgatccgcccgcctcagcctcccaaagtgctgggattacaggcgtgagccaccacacctggctggttattctttttaagattcatcagtgaacatataatttataattagtaaaaagaaaaagaaaggaaaagaaaaaaatggaaaattccttctggaaggggctttgcattgtaggaagatgaagtgggatacttactgggcatggggtgttattatgacagggcagattttgttaaagggatgatgtggggttgctaggaaatcctcagggataaattttgagctgggccttgtaacacagtgggtatctagtctttttgtttgtttccaaactgaaaacatagtaactgaagtaataaagtggttatgcattgagcatttttgaaaaattcaggctrttgaaaagcatgatcgtgaaaahgcaagatctcagtgcccatcccgacctctcctccgtagccactgttaatattttgatgtatcttttctaagttttttctagcccgtagctattatgttaaaaaataataataataataaaggactgtgatgacaaaagcaggggtttttgtaaggtggatttctttttcccggaactccaccatggccatctgtccatgcctccacctgttcatctctagatactcctgcggcagatgggcttccctgagtcaggtgatcaagggccaacagctggggagggagartgatcaggaagcctctgcccttccctcccctcccacctcagcccccttcttctacagcctccccctagcctttctgctgcccacactctcaccgcctgtggccctgccaggcatgctgaggggaaggtcaccctgcctggccaggttcctgcccgcccagcgcctgcctgattgctgaatgcctgccaagctcctgcctaatctggggagagctttagaagccgccctagggcaggctgctcttttgtttctggaatccaggccactcagcagaggggctggcttcctgcactgcgctgctgcggccttcaagtggacttaggtcaagagtgcctggggaggaatgcagtcccttagagcaaagcccttgtaatgaatgccttccctgcaccccctaattgggttagcgaagtgatcagctagattctcaaactaaacaggataggcatgctgcagtcctacattgttatttccatgacaaagaatctcccttttcccagtgaggggaacaagctgaggctcagagctgctaattctacttggtttgagggctctgcagaggacacactgacagaggcacctcagctcaaaggtagaaagcctcattgcacatttctcaaagcaggtttctttgaaagcccaaagagcctttgacagagatagatcaattcaacttctctgagacttgattccccagcttgagggaagaggaagggccactaggcttgctgagctgctgttaacaccaaatactctacatttacggcagcgtgacccccatttctcagataggracactgagggtcagttcacatgcccaaggttggtaaatagtggaactaagattccgacccagaactgcctgacctcacactctgtaggtatcaagctaatccccggtatgtgggggcgggaggtgaggtggttggtacagggagtgactctgtatttattctttcttattcgatacatatttattgaatgtctgcatctgtgccagctacataaataagtaaattttcggccacaaagagaagactaccaagagaataaggggaacctgatttggaatgatggagaggtcagagaagtcttaggaagtgacatttaagtcagtatttgagggacaaacagaaacagggagaaagagcatcccagggagccagtgttctagcttcaaaatcctgccctcttgagaccagccccttccagcacgctgtacctactaacccctacttgccatatattgctatgcattccagtggtccataacttttccttttttcttttctttgctttttttttgagacagagtctcactctgtcacccaggctggagtgcagtggtacaatattggctcactgcaacctctgcttcccgggttcaagtgattctcgtgcctcagcctcccgtgtaactgggaccacaggtgtgcaccaccatgcctagctaatttttgtatttttagtagagacggggttttgccaygacgaccaggctggtcttgaactcctggcctcaagcgatccgcccaccttggcctcccacagtgcttggattacatgagccactgcacctggtccataactttttcttttatgcaccaatgtctttctttgagaatctgctcaaggcaaaggacgcttctcccaggaacacgtacaggaaagacgttctttgtgttgccttgagttctcttctctcacttggctcaagggaaaatctagaaggctttgagcttggccagttgagtggggagggaggtcaagacgttgcctatctgacttgtgtttgggggctttggactgcactgatgaaggcagcgtggcccggccaaaggtcacttggctaagkctaatttccggcagctgcagcccaccagacaccaaggatctatgactgtggctgctgcttgtcatgaccctaaacttagagccctgtgcttagaggaaatacccacgtagtctgcaagcttgtaggggctgctggaaggtaggagcactgttgagaggagctgccgccccgcactggctgctgctaccagctgtctggccttaccctaggaagaagctggccaaaagatctctatgcaaggctgctcagaccaggccaatgatctgctctaatcccttcagtttctattgccctcagagtagggcaaggcagttttctcaacagggcatgcaagctgggcccctgcccacgtttccagcctgtgtctaggcacaccctgcctggctggctgttccccagatgggacacttgtgtggctttgcaggtgctgtttctcctagtgagagatccttacctttcctgcatcttcaacaggtaaattgtacaacttggctcaatctgtcttctttgaagttcccatggacttgctactctgtagagttggtcacgacttccctctgttggccacgacttccctctgttggccaggaccttctgtatccaccactgcaattctttccttgctttctttactgcctctccctccctccccaccccttctgtctttcagcaattagttattgggcacctaaccctgttctcttcacactggggtgctgaagtaacagtgatgtgcaaaggagacccagatctgccctcaaggagtttgaactccatggtggctgcataaattcatcaaaccatgaagatgaagaatacacaagcacatcaggtcttttccttaaagaagttaagctggggctaaaagagctccatgactgattgattgattgattttgagatggagtctcactctgtcacccaagctagagtgcagtggtgcgatctcagctcactgcaacctccacctaccaggttcaagtgattctcctccctcagccttctgggtagctgggattacagaagcgtgccaccatgcccagctaattcttgaactgaggtcttgaactcctgacctcaagtgatccacccccgtcgacctcccaaagtgctgagattacgggtgtgagccaccgtgcccagccgagctccatgacttaaaaaaaataaaaataaaaaagttttctggtaagcccaagcaattaaaaaaaaaagttgaaaaaagggatactttgaaagtcttctaattaagatcttttgctagttagataaagcccagggactcagggactttttgaaactcaatttcttcatatataaacataagggagaagaagtaatttattcaggctttgagagccttccatgagcaaagctctaggactgcgaaaaatagctgagtcctggtctctgagctctctggaggatcaggccagaggagaagtaatcagtgtgaaatctcaactcaagcctcactttcaggaggcaggcctccctcccctcagagacaatggggcctcccagagcatctgtggctttcttttgcagtattagttcatcacagtttggaattctgcaactgtcttattgctggattgccacctctctcccttgttggactgtggactccatgactgtgggtgataacgtctgtcttgtttttttatagcagctttattgagatataacaattcacatatcataaaattcacttttattttattttaattttttttgagacagggtctggctctgtcgtccaggctagagtgcagtgacacaatctcgggtcactgcagcctcctcctcctgtgctcaagtgatccttgcacctcagcctcctaagtaactgggactacaggcactcaccaccacaacaggctaattttttcatcttttgtggaaatggggttttgccatgttgcccaggctagtctcaaactcctaaactcaagcgatccacccgcctcagcctcccaaagtgctgggattacaggtgtgagccactgcacctagccaaaatttagcttttttaacgtgcagtcaagcaacctaaatgtccatcaacagataaatggataaagaacatgtgctacatatacacagtggagtactattcagccgtaaaaaagagtgagatcctgtcatttgcaacatggatggaactggagatcattgtattaagtgaaataaaccaggcacagaaagacaaacttcacatgttctcacttatttgtggaatctaaaaatcaaagcaattgaactcatggacatagagagtagaaggatggttaccaaaggctgggaagggtagtgggggttgtgggggaggtggggatggttaatgggtacaaaaaatatataaagaatgaataagacatactattgtattgcacaacggggtgaatataatcaatatcttaattgtacatttcaaaataactaagagtgtgattagattgtttgtaacacaaaggataaatgcttgcggggatggataccccattctccacgatgtgattatttcacattgcatacctgtatcaaaacgtctcctgtaccacacaaatctatatacctactatgtacccacaaaattaaaagtaaaaaaattaaaatatgcagtttagttgtttgtgtattcacagagctatacaatcatcaccactatctaatgacagaacagctttataactccaaaaagaaaccccatacccattagcagttatttcccattaactgttacccctaacctctggcaaccactaatctactttctgtttgtatggatttgcctattctggacatttcatataaatggaattatataatatgtggccatttacgactagcttttttcacttaacataatgttttcaagattcacccctgctgtaacatgtgtaatattctgttgtatggatacattacattttgtttatccattcatcagttgataagtgtttgagttgtttctacttgggaactgttatgaatgatgctgctgtgagtattcatatacaagtttttgtgtggccatatgttttcatttctcttaggtatatatatatatatatgtatatatatatatatatatatatatatatatatatatatatattccaaggactggaatggctgggtcacttaagaaccctacgtttaacattttaaggagtttccagactgtttcccacagtggctgcaccattttacttacccaccagcagtatatgagggttccagtttgcccctatccagcacttgtatatacattttcagttttgtattgattttttttacaacaaccattctaatgagtgtgaggtggtatcttatcagggttttaatttgcatttccctaatgattagtaatgttgggcaccttttcatgtgtttgttggtcatttttatactttctttggagaactgtctggtcagttcattgcctatttttaaattgggttgtttgcctttttattgttgagctgtaagagttctttgtatgttctggatacagtcttttattaacatgtgattttcaaatattttcctccattttgcaggttgtcttttttctttctggatggtatctttggaagcataaatgttttaagttttgaaattcaacttatgtatttttcccttgatgcttcttgttttagtgtcatatctaagaaaccattgcctaatctaaggccattaaagatttccccctgttttcttctaagagttttatagttgtaagtcttaacgtttatgtctatgtctatcttattccagattgcatccccagtgcctagaataacacccagtgtagagaaggtacttcatacttactgagtaaaatgaatgaatagctcttgaatgaatgaatgaatgaatgagcagatatccctttctagtcctggatctgctgctagttaagtaagccccagggttaagagagaggttttctatagaagaggggcaccaatttgtttcgatctcatcccgttgtgagcctgccataagtgagctttcacattccttttctgccaacttatttcctgttttccttcaattttacttctttttagtttccttctttggcaaaatgttgcaaagacatttcctaaacaagtagtgtctaggctgggcttgatggctcaggcctgtaatcccagcgctttaggaggccaaggtgggaaggatcgcttgaggtcaggagtttgagaccatcccaggcaacacaatgagacccctgtctctacaaaaaatacraaaacaattagctgggtgcagtgatgaatgcctgtagtcctagctacttgggaggccaaggtgggaggattgcttgagcccagaagttcaaggcttctgtgagctgtgattgcaccactgctctccagcctgggtaagagggggagactcctctcttaaacaaacaaacaaacaaacaaacaaatagtgtctaatcttctttgattgaacggtaaatatgagagatactgcatataagaacattattatgttgtaaaaaactttgttggtttgatatcttttattggtttttcttgagttagacaaataaaataaggtaatgtggcagtatatatattgcaaagtagaagtaaaagtcatctagtcacctcccaggggtgtgggaagtatcatgatatctgaacttacttttagaaaaaaaatgtatatgcatgtagagaaaaagaaggcagatgtcaaaaattagggaattgaggtgaagggtatttgggagttccttgtactattatttcaacaacttttttaggttgatttttttcaaaaacccgtctctcgtaatcctaccctcagaaagaattagatgtggatcctgagaggtcacaggtgtgctaggcattttgcatacattttaaatttagttctcagctctcgaggaggaaacaaaggtgatggcaggtgaccagggtcacacaacttggctgagtagtggaaccagaatttggatgtgttacttcagaccagaccctaggggaaaaaaaaagaatttggacttagacctctgaccccaatgcctttattcctttatggccttgtgtatctcaaatagcaaacctttcccatgggaaggaatgactggcttcctctgtcatcctctaggtccttgatactttatgagcctgtgcttagtgaaagcagatgggagatagcccaggcggggctgccatcctgggacttgcaggaaaactaagaagggtatggagggaatcgttgcctcccattcaggccctgaggtcccatttcctgggacagccgagactctcaggaggcagccctgaccgtcacccctccgccccgcctgtcctccaggaactgaagctgcccaccttccgagcccactccccactcctgaagagccgccggttcttcgtggacatcctgaccctgctgagcagccactgccagctctgccctgcagcccggcacctggccgtctacctgctggaccacttcatggatcgctacaacgtcaccacctccaagcagctctacaccgtggccgtctcctgcctcctgcttgcaagtaagcgaaaacctacgtcttcctccgcgcttgtgcggtctcctcccgctcagtgcgcctggctgcttccaaatcactttacattttgacgatctttgcacgtcttatatgttcatccttcactgagcgttttttagcatcaacatttttagatgcaacattttttagcatctttaatgtaccagaccaagtgataaggatgttagcagcttgtctcaatccacacagtggccctaggaggcagatactcttagtataccccactttacagaggcacagagaggtgacgaagccagttttgggctgcccgggtagtatatggcagacaagatttgagcccagaactgcctggtgccagaacctgtgccctcaacctcctgtctcctgcttcctggtatgggggatatgaacgtgctgggaggggaaccctagcaaccactgttcataaggtgttttgaaatgtgactgcttgatttggacctaagcaggacccattgtgtggtcaccaggcctgggcacagccctcttggggtttgcaccttccaaacaggcctcactaaaaacacagcgtagctttgaccatctgtctgtctgccttggtagagattactgtgttaattcgctgctactcggatgatctccttaaaacacagttctgccatgccacccttccacttaacatcatcccatggtttactggcagtcttaggttaaagaccaacccttgagttcctgcctctttgccctgtgcctttctcctcatcacttcctgggttccagccacactggccaagccccctcttgtcatagagctttgcacatgctgttccctctacctggattgcttctccctccctcccgctgcccacctggttctgggtaaacatcaccgaggctctagatccctgtgaaaaccttcccccactgccctcagcaggtgaggtctcccaagtatgcagaccctcagcgtcatgtgctttgaatgaacaaccaccaccccccatggatagcaagtttcagggatggaaaggagcttggcacatagtaagacctcaaaaataatctgtgtaatcaatgaaactaatggagctaatggttccttgagagccaggcctctatacttctatagttgccctaatgcagaggaatggaatgccccagaggcctcaggctcaaagtggccaggtacaattaggacatttctttgacatctggtattttatccttgacagtcagattttacattctcctctgagatatgtttgtgtcctatttcattattcatttcccctccctgcccctccatccttcatcctgcttggtgctgcaggactatggcacccactttctcctgtagctttgtctgcttttggcaggcttccayaaaccccatgggcacgatcacccagttccggaagcacagatttagagttttcagaattctgtctcgttttccacgctggcaccttttacctgctgttgttcgtgatcccattggctgctttaggctcatagccccacatttggtgatttttctctacctttggccaactggattcccttgttacacatgcgagccagtcttgctgggtgtccagcctgtctcagcaccccaaatcaacgtgcagccccctttcgtctgcggggcttgtgaaacatctccggctgtggagggcacactgggcatcgtatttcaagcagcacaggagaaatttgcgccacggcctttggcctgctgctgtctgtgatctatgggctgcatcrcggcccgctgggggcaggggacttatatttccatggggccatggaagctctccccgagtgtctgtctggggagctgggatgtgaggcacacactggagactcctttgtgctgctgccaccttggcggagagaggggacgtttcagacagagaggcagacgcccccacccacgtgtctgagggcagcacagcctcgggcagcaggaacagatttttcaggacacctgccatatgctgcagagaccagagggaagaaaagtttccatgacagcctgaaatcctattcttccctcctcccctctccccaggccattgtgggccacaagggggatccccttgcctcgggaagtttggagatctgctaatttggtaccaaattattctgagataagaagagctggggttcttgcccccccacctgtcaatctcaggtttttaaatctgcttccagatagacaggaaggctgggcgcggtggctcacacctataatcccaacaccttgggagrcagaggcaggtggatcacctgaggtcaggagtttgagatcagcccagccaacatgatgaaaccttgtctctcctaaaaatacaaaaatattagccaggccagtcggataacctgaggtcagaagtttgagaccagcctgactaacatggagaaaccccatctctactaaaaatacaaaattagctgggcatggtggtgcatgcctgtaatcccagctactcaggaagctgaggcagcagaatcgcttgaacccgggaggcagaggttgcagtgagctgagatcatgccattgcattccagcctgggcaacaagaacgaaaccccatctcagaaaaaaaaagcaattagccaggcgtgatgggcgcctgtaatcccagctattcaggaggctgaggcaggagaattgcttgaacccaggacagggaggttgcagtgagccaagatggcgccattgcactccaggctgggcaacaagagcaaaactccatctcaaaaaaaaaaaaaaaaaacagatagacaggaagcagagatgggattttctcacctacctacagccccttctgccccgtccaacagggctcagccagggacccatgtctgcgggccacaggaggaggcagaagaagcgagagcatttcgtcattccacagtggacatgtggcaaagacaccctctctccctcagagttcattgtttgcgtctcctaccttaacacaggatagaactctaccataaatatagtatagagatcactaaacagtaaatgaagttgagcctccctcttctttaatctttcatcttatacagcacccctcctgcaatgtctttttgttcttcctgttgtttaattaaaaggataatttgacaacgtggaaatcccacaacttccaggtgagttggctttggcagtgcccctgaatcatcggcatcacagcggctgtggcttccttccttactgttctttctacatgctggaccccatgccaggcactttacacacatcgcacggatcctcacgaccagcctatgcggtcgtgctgtcacccgccctttttataggttcagagaggccacaaaacttgcccaacttgtagtgtggggttgtgtttgtgggttttttgttgttgttgtttgtttgtttgtttttgtaaagaaaaatacaaccaggcacggtggctcacacctgtaatcccagcactttgggaggctgaggcaggcagatcccttgaggccagcagttcaagaccagcctggccaacatggagaaaccctgtctctactaaaaagaaaaacccacaaaaattagctgggtgttggtggctcatgcctgtagtctcagctacatgggaggctgaggctggagaattgcttgagcctgggaagcagaggttacagtgagctgagatcatgccactgcactccagcctgggtgacagaacaagactctgtctcaaaaaagaaaaaaaaagagagataaaattcatgccacaacataaaattcaggattttaaccattttcaagtgtacggttgagtggtgtttagcaccttcacgctctctctacttccagaacatttttatcaccttaaaaggaaacttcgtacccattaagcagtcacttgccgtttcttcctatcccccagctctggcagccactaatctgctttctgtctgtatggattcgtctattctggctattttatataaaggggattatacaatatgtgaccatttgtgtctagcattgttctcttcatacagaattttgaaggatcatccatgttgcaacatgtatcagtacttcatttcttttttttttctttttcttttttttttttgagacggagtttcgctcttatcgcccaggctgaagtgcagtggcatgatctcagctcattgcaacctccacctcccaggttcaagcaattctcctgcttcagcgccccaccccccacccacaccgccccaagtagctgagactacaggtatgtcccactatgcctggctaattttgtatccttagtagaggcaaggtttcaccatgttggccaggttagtctcgaactcctgacctcgggtgattcacccgcctcggtcccacaaagtgctggggttacaggcgtgagccacagtgcccagccttcatttctttttatgactgaataatattccattgtatatcccacagtgtgtttatccagtcatctgttgatggatgtttaggttgttttcaccttttggctgttgtgaacagcgctgcagtgaatatttgggtaccagttatatttgaacactggtttctaattcttttgggtatatgcctatgggttggattatgggtcatgtggtaattttatgttggactttttgagacaccttggaggtttgcttttgcttggtggttgctgcctggagatgactgcagtattgagtctttggccccagggcatggaccagcctgaggagggagggagggttggggagaaagccaggagggcaagaggtgaccttttgctagggtagctaggccttaactgtaagaccttattattttgcacaagaagtgtgagatacgtttttacttttaaaaacctgaaagcatttagccaggtgtggtggcacgtgcttgtagtccccgctacttgggaggctgaggtgggaggaactcttgagcccaggaggtggaggttgaagtgagctgagatcttgacactgcactccagcctgggccacagagccagaccctatctcaaaacaaacaaacacaaaaaacctgaaaggtacagaagtacctagtgtgaaaaattagtttctcccctttgctcacagtcccactcccacagttttgtgtgaatccttccagacctcagccgggcacggtgactcaagcctgttaccccagcactttaggaggccaaggcgggcagatcacttgagatcagaagttcaagaccagcctggccaacatggtgaaaccccctctctactaaaaattccaaaaattagccaggcatggtggcacgcacctgtaatcccacctactcaggaggctgaggtggaagaattgcttgaacccgggaggcggaggttgcagtgagccaagattgcaccactgcaccccagcctaggccgcagggcaagactctgtctcaaaaaaaaaaaaaaaaacacacaaatccttccaaacctagatgtgttttcatagctgggaaaatttattttcatttatggggggaaaatgaatcatagattacacccctacacactacccagtgaacaaaactgccagattccctctcttccttccttttccattcttcctttttcttccccatctaatggcaattccatcgtactttttctgttttctttcactgtcacttccggaccctgagcctgagcctgtccctgagaaaacaaggtttctcactggtgagtggttttcctctgtcctctgagcccctcctgcccctggcccactgcctgttgtctgtgaaaagcagtggaaggtgaggctgatagatctgactcttacagtaaagttctgacttctggtttctgtaggtggggccacatcctgtgctgaccttcgtgctggcccctgtcctcctccctaggagaagtgtctggcaggaggtggtcgcatggcctttctttcaggggggtgggaaagcccccgtctctggctctggtcctcctgcagagcagggtcccttagctctgtgagtcagtcatgctgtgctgagcttacctgtgaaaaggcccatctccttactacagattgtttttttttttgagacgaggtctcactctgtcacctaggctggagtgcagtggcatgatcttggctcattgcaacctctgcctcctgggttcaggtgattctcgtgcttcagcctcctgagtagctgggattacaggcacacaccaccacatccagctcatttttttatttttagtagaaacggggtttcaccatgttggccaggctagtctcaaacacctgacctcaaatgatctgcctgcctcggcctcccaaagtgctgggattacaaacgtgagccaccacacctggcccttactatagatttttaaaattacaattattatactcacttgtaaagtgagatccaaagaataaaataaaaatccttttcccaatcccaggtaacccctgggaacagtttcttctgaatttgatctggtgtatttttctggaattgttccatggatatacaaacacagttgattctcattacgggttctgttcttgcgaatttgcctacttgctaaaactcttttgtaggccgggtgcagtggctcacgcctgtaatcccagcactttgggaggccgaggtgggtggatcacctgaggtcagaagttcgagaccagcctggccaacatggggaaaccccttctctactaaaaatacaaaaaaattagccggttgtggtggtgggcacctgtagtcccagctactcgggaggctgagggaggagaattgcttgaacctgggaggcagaggttgcagtgagccaagatcgcgccactgtaccacagcttggatgacagagtgagactctgtctcaaaaaaaaaaaaaaaaaaaaaaagtggcggcactttcgtggtgctttgcaaacacgcacagagctgtgtgtcccatatggattgacccatacccatattccaagctgagacccagtaagaagcactctgtcttcttctttcacctctcacactgtaaacaaatgtgtttttagtggacttagtgccacatttttcatatttttgtgctttttgttggtgattttggtgtcaacaagtctccaagaatagagctgaagtgctgtctagagctcccaaggtcaagaaggctgtgatgtgccttgtagaaaaaagcctctgttagagaagctgtgttcaggcagaagttataatgctgttggccatgagttcaatattaatgaattaatgtattaaacaaatacacaacacaaagttataggctgatcagttgatgaaatgttgtgatcagagccttgcaggaacctaaccttgtaccttcccctaggagcagtggttcagtattcactaattcagtgttcacaatggctttatagagcataactgacatgaataacaagaattgaccagatatatttacacagctgggttactgctaaaggtgctttcttcatagtatgttacggaacctctttttccatcagcgcttgtggatttacttcactctttttattgactgcaaagtcctttgttttataaacactgtcatttatgtaatgatttctctatttttggacattcaggttgccatctctttttttcactgctgtacagtgactggctttttccctgtatctttgcaaacttacatgagtctgtctgtaagataaattcccagaggtggaattgttttggtcaacaggtaggtaacactgaagattttgataagtagtgccaaattgccttacagaagttttaactcaaccaacagctgatgagacccgtttttccgtaaatttgacttcatttgtgggagcctttggaactgttagcattggtggtacagtggtgagcacagctgccttccagaaaaacatttatttgacttactctctacctaaacaataaactataaaagaacaagcaatgtctcttctccatcccggcccctcacccgtgtccacttggggcttctcttctgtgctcccagccacgagagcctttgccctgcatttctgcctttccctatccaggaagcacagacaaggaatcctttccagactgattgcttttagtgcctgttaagcctcatgtcttagggcagataccactaaaagctattgcctgccaggtacctgcagtggggcttcaggagattctaggagaggcctgtcttcctcccagtaaaccagcatcactcccctttgcatcctccatcccccactcacccctgctttgattacttggcaactgttgcttctgaaaagcagcttctttgacaacaaggcaggggacgggatggggtctccccactggagatttcagaaacttgaaagcagtcttaatcctttctggtcgacaaggatgaatgaatatgctgcttcctagcctggagaagttaaayacatcagctctccccaaagctgggaatgcttgagatgcctccacggctctaattgtaggcagcagctgcaaatggggcaatatttccaggtggtctttttcaggggtgtatttctgacaaaacatgagatttattgatagaattaaacctaaatcttcaaggaaacgtggcagcgcccttgcaggagataatttaatagctccctacatctcatgcaagagtggtcaggaggaaactccatttccttcctgccgtggagagcatttgaaatgcttgagcctttcaatgtttgaacatttcaggaatcagaacaggtcttacatttgatgtgtgcaattaaagtgactattgcttatctttcttccaaaacactgccatgacatcaatggtgcttctctaatcagtgacgtttgcgtggtggccacgcggcacagggcaactggaaaaggtggtctgtcacattagtgagggccatgctgagcaaatctgggcacggggctcgaatgtcacagcacagtgagcggaggacatggtgattttccatttcctgttcccatctctgcagactggcaggcttagagctgtttcaggggagggattttgtgtaaactgcctgtcagacagctggctgggccggaagctcttaaattgttcaatttgccttagcaagtttaacacccagacctgtttgtccagggcctaactttccgggctctgcatggcttttttttattttaattttatttttgttttccgggagtgggggttgtatttcaagctgcacgaataattaattgaacatgcggtgttcaggagcccctgatcgcagcagcccacccctcaccacccaagcacttacctgtcagtattgtcagttgtgatagctagcactggcagggcagctttggttgattttgaaatccgtttcagactcgaacgagatatgttggcctattctatcccttggtgctaagattagagattatttttatgtgtggagcatttacctggatttttgagattgtcttcaaggagtgtgtgttgcctccctccacctcctaaatcttaattttaattacaagcattgtggtgtctagacaggaaaagtctctctttgtcaccgacatagtgaggtttctgggacttttctaggaaagtctgatgcctcccgacttgtaggtacttgtaaaacaggttcatgccgagatattcttggactggagcagacctacgttctggaatgttctctggcagttattctgctagctctggcttctagattcccagcagcagagtcttgccttctgaggagtttaaagtgtttttatcagcaggagagtaatatttgttcctgtagaaaaccagaagatgggaaaaaataaaaataacaaaataaaaatcacttgtaatctcactacatttctcttttctataatcggaacctgcgggtggagggtaaatcctagcctcagtggtgatgggatcgttaatgtttattgagtgtttgtttatttttatttatctttttgaggcaggatctcactctgtcactcaggctggagtacagtagcatgatcacggctccctgcacctcagcctcccagtacctgggaccacaggcgcgtccataccaccaggccctgctaatttttttttttttcgagacaccattttgctctgtcacccaggctggtgtgcagtggcgcaatttcggctcaccgcaacctccgcctcccaggttcaaatgattctcctgccacagcctcctgagtagctgagattacaggttcccaccacctcacccagctaatttttgtatttttagtagagacagggtttcaccatattggtcaggctggtcttgaactcctggcctcaagtgatctgcccgccccggcctcccaaagtgctgggattacaggcgtgagccactgcgcccagactttttttttttttggtagagacaaggttttgccatgttgcccaggctggtctctaacttgtgtgctcaagcggtccaccagcctcggcctcccaaagtgctgggattataggcatgagtcactgtgcccagcctatatgtcacacagtgttctgaattttttacacagatttactaatttaatcctcaaaacaattctataaggtaggctgtagttgtattttccgcaagtatcagaggaagaatccgaggcccagtaagttaggacacttccctaaaagcatacagctcggatgtgcctagtaatggggacacaggttgtcaccttggggttgactcagtggttctcagccactgtacaactatggccctagttgtacagccagaccacgtccttccttggctgtgccaggaagattcaggtcagaacgcggagagattgctgggagactcctgggcacacttccttctgagccagcagagcagcatttgtgctgaccccgatgaaaacatcagccctcaggaccagctcttgtatctggaagcatctcccctctgaaccacaagggcggtacccaagatggcctctccttttccttctccctgttccccgcataggtcggaacaaaggatcagggtccccagtgcccacacgttcagcgcagcagtgccgtcagacctgggccagaggcagcccctggtgagttaggagtgagctttctttaaagcagtgacaccgaaaccttctttcgtgacaggagataactcctatcctccgtacgaggacagaagcacttgtgggatgcaggccccagatgccagctattcgggtgacaaatggcccccaccccgcaggccctgctttcagtcagtgacacttatttgggtcacgtgtaaagcggagcacaaaggaaccaggggttgcctgaggccgcagtgtgatgtcatcacagcagtttctccttcctgacacagggaagtcctcccagcaagaagggaagcccgtgggtgacccagctggccgaatgccacctctgacctagaaggcattttcacaatttcctcctaaagaaaacaaccacccacaacctcacctctggtctctttttaaaactggsctcaggaattgattcagcctgtcagaaatgggcttgctttcattctttcatccatccgtccttccatccattcgttgattatttatcaaggcctctgtgccagagactggagatgcagccctgctcttgagagaggaaggagaagaagagagctttttcttgatttcctgagggagaaaggaagctcagccaggcagggtacccagatccaccttcacaccaggtctacccagcggactttggaagcccaggaatggctggtgttggaggcctgtttctccaggatgtttcctaactacaggatcagaaatgggccagagatcttggatgcagctacagcaggtccttaaggggacttaaggggaggctacctggcctccaacccctgtggtcctctcagctttctcccttccttgagcaccactgaagcaccctcttacagatgaagggttttcttgctttgtccctggctttctctctcccctacaccaaatctcatccagaaaccaaaccactgtcattgtagctgtgactgtcattacagggctggctctgaattgagcacaagtttacaaagggtgctgttctaagcacactaagccatcatgtcaccctcaccacaattctatctacttgtcttcttcccatttcacagatgaggaaacacaggtccaagaagttgtgacttaccccagaccacatggctagtaagcggctgccactccgtagaatccaggacagtcatcatcagagtgtgggcactgcccgctgcactgccttacacagtaaaaacagcctgccagagcatggtgccctcagagtagtttcacaccctctccatcaattgctcaaaatctgtctcccctggttcctcagaaagacgcttgtctgctgggcgtatgagcagtgcctttttttgccaagagtaggaagcacctttcttgccttcaataactgcaagaagtcaaagagagtttctgttttttaaaaaaagtcaggctggggagcacctttagtacaaaaagtttcctgttagagagccactcctttgacttaaatgctatcattggaagaaaaaactaagtcctgttgatcatatagctctttagtggaaaggctctggaattaaattgctaagtagcgtaagcaaaggagagattgaagtcaagagaatttgtggaagggccaagcatggtggtgcatgcctgtaatcccagcactttgggaagccgaagcaggaagatcacttgagcccaggagttcaagaccagcctgggcaacatagtgagacactatctcttcaacaagtaaacaatttttaaaaattttttcaaaattaagagtatttgtggagaacagggcggttagatggggtgaagctgaaactagcctgacacatccatggaagttcctccacccagatagatacacttattatggagcttataggattgcagggggccttgtgactgtatataaggtttcctgcttatgatgtaaaaagctcgggactttggaatcatttattcattcattttttaaaatacacaaaagctattattaattttatgctagaggctgtgctaggtgaacaggatctgtggtgttctgcaagacagatttgttccctaccctcatggagcagacagacttttaaatgctgctttgtcccttatcagctgggagatcggggtaactcaacctttctgagcttctgtttccatgtgggaaacacccccaacctcccagggtcgttgccagaatcagctgagagcatctgttaagggcacagcaagcacagttcacagaccccctagcccacccaaccctgcagtaaatagatgtgtggtccagggtctgccagcacatttgatgcctgctgtgcgttgggcctcgggatgcagcagagaaccaaatgccaaacgaagctccccgccctcccagagctcacatcctggtgtgtggattctctgcctcttgctacccagtggattctctgcctcttgcaacccaactgggttacctgggaaaagtctcaccctgggggagggggacatctgggaaaggccttggacgcaacactcactcccctttcttcctcccggactgtgagccttgaaatcaccagcaggaggccagagttcaaggtcacagtcctggggaaaggaagctgtaacgactccagtccactccatgcattccagcacagygttgactgtggagtcgggtaagggtaggggagccttttgttgggcctttttcagcccctttttcagaacctgtaagaaaatatttctagataacaggacttgagaagatcccgggtctggagtgcaaagaataccatgttcaataaataatacagcagctgctaccatttatagagcacctcccacatgcccgtcatgttacctgggacactccttgcaccctccctactgccctatgaggtgtgggtttccaggtgattgcccaagatcacacaaatgataccaggagtgaggatgggaaactggcacttgagcccctgccctgcccctgctccaggacattcctgcctgtttctggtggggacctcccccagaatcctggctgtccctggtcacaccggctccaaggccataaataaagctggtagaagttctgccttttctggggctacttttctccactccaggaaggaagaatctgagagaaaaaagcattagcatcagaaaggtctctattgagcctggccctgcgtgggcttccacccctgggacrctggcctcccttgccagcaaaggctgcaaagctgggaaaaagccctttcagccagagctttctctttcctcttctgtccctgccacctgactgcgtagcactgcccacatgcacctgggaagatagatgtcaggccccacctgggaaaaggcaaggcctgggtaccactgggcggtccttgatccctctgacccgccagcmccatctttcctttatcatcagcacctgcagggtaggctggtggctgctggaggggcatggggatagctatgggatctcaacttctgataaaagtctggttctcattctcagataaaatgaggaagagattttttaataggagagcggccattcttgtggaagaatagctttgcttgtttttaaaggcattgcatttcttttttcttttttttttttttttttcccctggagacggagtctcgctctgtcgcccaggctagagtgcagtgccccgatcttggctcatggcaacctctgcctctggggttcaagcaattctgcctcagcctcctgagtagctgggatttcaggcatgcaccaccacacccagctgatttttgtattttagtagagacagggtttcaccatgttggccaggctggggcattgcatttccttttttttttgagatggagtctcactctgttgcccaggatggagtgcagtggcgtggtcttggctcactgcaaccttcgctgcccaggttcaagcgattctgccttagcctcctgagtagctgggactacaggcgcacactaccacacctgggtaatttttaaatttttttagtagagacagggtttcactatattggacaggctggtcttgaacttctgacctcgtgatccgcctgcttcggtctcccaaagtgctgggattacaggcgtgagccaccacacctggccggcattgcatttctttagggaagaaaagtagccagctgtggctttaaaacctgtttctctttagccaggaaactttggcctaatctctgagcctgggttaagcacctgaaagggcagcaggtagccctgaatgggtccatcagtaggcatcttcccacgcatgaaggacttttgggggcattcgtggggcacagtgcagaacacggtctgtctagttgggggtgggccgcgctcaagcctgggcaacaggaatgagagaatgctgaatttctacagaaccttgttctgtgctggttacctttttgttttaagttttcgggcttttttaaaggcagtgtaaatgctgatgactgttggcactgggtaataacattcaagggagttcattatagtaacatttctctctctcttttcgtatatttaaaattttctaaaatgaaacggctttttaagcaattaaaaataactgctcctcttggcgctaattcagaagagtcaggaatcctgtttggtctgccttgaggcttgattgccaggacagtaggtagaagataagccagtcttcagagtgttcaccttcatagagaaagaaagtagaatgtgcttgccaaggactcgggagaggggggacctaggaattattgtttaatggggacagagtttcagcaggatgaaaagagttctggagagggatggtggtgatggctgcccgtcattgtgagtgtccatataatgtcactgaactgtacagtgaaaaatggtaaactttatattatgtgttgtcataagttttttctaattaaaaaaaaaaaagccagtctgtaagctggatccacagcatcttgccaccacggcctcatctgtggttaagcatgtaggccacatggatggatgcatggtcatcctcacctgccacgaattgcccaggagctctgtgtgccagcctcaggaaatggtgttagggatcagccagccacatgcagaaaggagggcacataagaggcatcacttacaggcaccaccgtcaccaccaacactgggggtacacgtgcgtctgcctagcctccgagagccagagaagtgcttcactaggtttagaatgctttttaatcttataagtatgttgatagtgactaggcacagtggctaatgcctgtaatcccaacacttggggaggccggggcgggcagatcacttgagcccaggatttcgaccagcctgggctctactaaaattacaaaaattagccaggtgtggtggcgtgtgcctatatacctaggtactcaggaggctgaggtgggagggccacctgaacccaggaagttgaagatatggtgagccgagattgagctacttgcactccagcttgtgcgacaggagtgagaccctatctcaaaaaaaaaaaaaaaaaagaggttgatagggctcctgctgttccaatttaggacaatgtgaacatcaaaaagaaaaatgtagatggaatgatatgatttttaaaacttccttttcaacccccagtataataatttattcagaaaaggatcatccatggatgcaaagccattgagctaaaggttgttgagaaacaggatattcacaaagtgtgccctcccagattatttattaatttcccagggaagctggtaccttgaactggagcagtctcgtgtcaccaccttaatcaagtgatctaacataagccaggacaaagtgacgtttcctaggactcctgctatggtccagtgggtgagaaggacagaacagcttctgtcatttgcttgcctgtactgtttgacctgcatctaattgtgaggaaacaatcaggcagatccagaatgtggagcattttacaagacaactggcctagattctcccagagtcagtgtcatgaaaagcaaacgaaacaaggggacttcagcggtaatagactccatgtgtgaacctagtttggattctggatccaaaaacacaaaacaaaggttataaaaggcatttttaggacccctggagaaagtcagatgtggactgaatattagaaaatgtgattgcattaatgttcatgtcttagaaatgctaataacattacaatttgtaggaaaatgacctcaggaacggatgctgaagtgttcggggtggcatgtcacgtctgcaacttgactagaaatggtctaacaaaaccagtatttacagacagaatacacctagacagagcacacatggatcagggtcagcaagggcagaatctggtgaagggtcctatgtgttcattgttgtctttcatcttttctctgatttgaaaattttcgaaatcaaaagtgcatcagagaagtcagagattccatggctattgtctggcttggaaggactcagaattctgttcccagcctctcccaggggactcgcctgaagtcttctaggcatctgttgcctgtgcagtttgtcgataaggaggaagcagctgagtaacggtgcttggtggtggcagcgctggggacaaggggccagccccactcacagtcccaggaggaagggaggaaatgtctgccaggcacgtgcagcatcaggaaactcataaaatcttttctggctgctttttaactgctggccaggccaagcccaggttaactctgaagtctgcttctgggtgtagaagctgagttctcccatcagctttttctctgagcctctgaggattgtaaagaacctacctagaaggttcctgccacgagcaagtgcatgaccagctcgaagcacagcccattctgtgtgccgggggcttgtgaagcactttccattctgcagcaccattttatcttcatgtgggacaaggtcctacaacataagcaaataagcagcctgtcgagtttagtgctcgtaggtccagggcaaactcctgaggattcagacccagcactgcctggctgtggcctgccgtgtgcgttcccaggaagcagagggagcaggtgaaatcagattccgcagtaatccctggtgccttccattggaggataatcctcttgggcctggtagcagagctctgaaaggtttgaaaagcgaggaggggaggaggaaactaatctgattgagcacatctgccagttctaagagattgctggctgccagcagtgctgtgcaagggtcttagtgccaccccagtacagtgcaccttcacctcgccacctcctgctctggggagggaaagagctcgtttctgctgagtgcatgcaaccaaggctggctcagcacaagattcaggggagccggggcaactttggaaaaaataaataaataaaattcttccttttaaaaactgcacaaagaatacatgatcattggagaaaaaactggggaatacaagatcatcagagaaaaattcaaatggcctaaaatatctgtttcctgagaggactattcattcatttaacaaatatttattgggtacctactatgtgccaggcatgtgctgggaactggtggcacagcagcgaatgggttggactcagttcctattcttacaaggcttagagtcagatgccagccattcatattaatacttgatgttaagcaagtaatctaagtgtaggaagtccgtttaatatctggaggtctctaaactgagctctggaggacaccgataaggggggtgagggraagagcattcccagcccggggaggggttggagtcccacgtggctggatcctgtgcttgaagagggagtgttggggggagtatggggggagctgccaaagccaatagagccagtcggccagagcctcaaccctgggatttccagccatgcaggaggctcttcctctytgggcagctttgacctcgcgttggcctgcctgagttgttcttgtgtgcaagacaagaaagtgtgtacttcggacacagcaccattgcaggctgagtgactgggctccggaaagggatggaatgtgtgcttgctgtaaactgcatggtgcggggctggtagtgcctctgcccttcactgtcttgtacatttccaatcactagactcctctgcatcaaagaccagagctctgtgtcaggtcgtcgttacccaccgagtgggctgctgcaaggcttgccgagaagggagcaaccctggcttgctgagacgtggttgattcattctgcagtgacgtcttttgagccgtcctcaggaatgtgttgtatctactgtggagcagcctgtggtggttacttccttatctcccctaagcagcatgagagatgggaactgggtcagaggcacttgcagctgggagcaggtgcgtgcatgtgttgtttgcccttcccttcgtgagcactgatgtgtgctttgaggtcagctgggccgccccaatgcctcttttggcatttacttagtggcagctccacaccccatgaggctggccttggggtcaygggtgaacagaccgaggccaggcccttgaaggcctcaccacctgatgtgggagtcgtacagtacagggggctggtgtggagggcgtcttctgagaggcagggactccaggtgaaggacaggtcagggttggctgagtgaggaggggatggggaagggtgctccaggcccagggggctgtgtcaatgaaggcttataggcaagaactgccaaggacagggtccacggccacctgtggggtggttttcccagagtgaggaacattgaggctggagaggcccacagtctgcagagcctcacgcagtggaagctgtcatgcccccccaccagcccctgagtcttgaccctcagggcacaaggacctcccattgttccctgagagcatccacaactgatgactgccggggttgctatgtaaatgcctctgctctttaacccgtgggtaggataacctgaggcctgtcttaggctgtttctcagaattcctcagtaggattaagctcgggttgtccacagtggtgactcgcttgtgtccttttgggctttcttccctttcctgttctcgtcccccacctaccgatctttcctgggcttaccttccaagacctggaaaccagagggaacccacactaagaccccgtttacacagtttgaactcaatagccaggatagcgggaagccattgaagagcttttctacacgtggagggacagggccaggtttgcgtggccatgctgactctagccaggaggttggattggttagggccagatggagagtagggagggcaccttattccccagcccctggctgctgctgctgaccgctatcggctgctttgtgttccagaggcttgtctgagcatttggtttgcattttcccattgactctaacaaaagccttatgaagtataggttccatcttacagatgaggaaactgagtcacagagaggttgagacacctagccatgatcccccagtgggaagtgatggcttgtggattcaagcctaggtttgacagatctggaatgtgtgctcctattcctccgcagtctggcctgtctgctttctgtcttctttgccagcaatgtccaggcactgtaaggtgggccgttagcttcctgggttcaggtaaatgtcttccagtaacccctgcttcccctgctcccygacaggtaagttcgaggatcgggaagaccacgtccccaagttggagcaaataaacagcacgaggatcctgagcagccagaacttcaccctcaccaagaaggagctgctgagcacagagctgctgctcctggaggccttcagctggaacctctgcctgcccacgcctgcccacttcctggactactacctcttggcctccgtcagccagaaggaccaccactgccacacctggcccaccacctgcccccgcaagaccaaagagtgcctcaaggagtatgcccattacttcctagaggtcaccctgcaaggtgacagctgggacccgatggcaggacctcccaccccttccccaccacccaggggtcggggtcaggcggctctaaaaggcatgtccatccagatcaggccttctcactggggcctgtgcacccagatcactcttaactttgcaggcagtaagcaaagaaagggcaaggattcgcccagtaacatgtaaaagagaaatagcaacttatatgcaggcagccagaaacctagaaacttacagatcaactggtaatttttcttacagtaacctgaaacattgcaaatgaattaaatagcacagatttgcagatcggttattctcaaatagcggccatcatacagatagtatggggagagggaattatgtttacatctgttttagcaataaaagttaccctgttacttgaaacttacttgaaacttgaaactcagtcttcccagtgttttaaaatctagatgttaactgggtcaaaaatactgctgataggggcgggcgcggtagctcacacctgtaatgggaggccaaggcggacagatcacgaggtcaggagatcgggaccatcctggccaacatggggaaaccctgtctctactaaaatacaaaatattaaccgggtgtggtggtgcatgcctgtagtcccagctatttgggaggctgaggcaggggaattgcttgaactcaggtggcggagattgcagtgagcggagattgcgccactgcactccagcctggcaacagagcgagactctgtcttttttttgtttgttttttacaatagatatttatttaaagtaaaacagctgcagaccaaataattcttaagattgtttcaggtttaaccatcttcgtaacagctgcatccacagacttcaactacatgattacctctttgcccattctgctctttcttttctttcccgaataacctctttcagatacggttcaaggtagaaattttcctcttcatatttggtccactgctctttaggcaagatctgatgcttcatggacaggtccagtgccctcttcatgtgaaacatcctgtcattataaaggttctcaggaagccttcttatggcttctttcacatcttcattctcatatattgtatcatctttcattaaccccagtttattgaatcctgtggcgttgtaataccattttcgaataccatccagccacttgcctgatgctgcaacagccttcttgccagccattttgaccagcgagactcggtcttaaaaaaaaaaaaaatactgttgatacaaccatcccataacctaccacaaactaaaatgggcatgagtatccagatcaatgattggactgggcgcggtggcttatgcttataattccagcactttgggaggctgaggtgggcagatcacctgaggtcaggagttcaagaccagcctggccaacatagtgaaaccccatctctactaaaatacaaaaattagccaggtgtggtggtgggcgcctatagtctcagctacttgggaggctgaggcaggagaattgcttgaacccaggaggcagaggttgcagtgagccgagatcgtgccattgaactccagcttgggcaacaagaacaagactccatctaaaaaaaaaaaaaaaatcagtgattgtgatcccaagcattaactgagcatttactgcatgccaagtgtcttgcttcagtgctttgcatacattatctcatttgaacctcacagcaaccccacaccaaaatcacctccattaatcatattttacaaaagaggaaaatgatgctgtaacttacccaaggttgcgcttatttttttttttcctttttgtggagaacggggtctcgctatattgcccaggtaggtctcgaactcctgggctcaagctatcctcccacctctacctccctgagagctgggattacaggcgtgagccaccacacccagctgtaacttacccaaggttattgctaggattttattttattttttatttttattttttgagacggaggcttgctctgtcacccaggctggagtgtagtggcacgatcttggctcactgcaagctccgcctcccaggttcaagcgattctcctgcctcagcctcccgagtagctgggattacaggcgcccgccaccacgcctggctaattttttgtatttttagtagagttggggtttcaccgtgtcagccaggatggtctcgatctcctgacctcgtgatctgcccctctcggcctcccaaagtgctgggattacaggcgtgaaccactgcacccggccaattttttaaatttttttagagatggggtctcgccatgttgctcaggctcgtctcaaactcctgggattacaagtgagagctaccatgccctgctcattgctaggatttgaaccttgggagtctgactgaatgatcgtttgtatcaccctgttagcaccctgactgatactttattttttaaatttgttgttgttgtttagctgccctatgaactgatctttaaaaggcaaaagtggaagtaattgaaaatcatgaaaaaaaatttttttttttttgagatgaagtcttgccctgtcgcccaggctggagtgcaatggctcgatctcagctcactgcaacctccacctcccgggttcaagcgattctcctgcctcagcctcccaagtagctgggattacaggcgcccaccaccacgcgtggctaattttttgtatctttagtagagatgggggtttcaccatgttggccaggctggtctcgaactcctgacctcgtgatccacctgccttggcctcccaaagtgctgggattacagatgtgagccactgcgcccagcaaaaatcatgaacaatttaagacaacagagtaataaactgaaaatccagtgtcattcaggaaaactgcagaaatttcaactgtttgcacatatttagcaccagcttttcctcgtggccagatatcttagttggacattaagattcctcagtcaacctaagtgccaattttagttataaatatcaaagtcttacaaccactcattcagtagattttcactgagtgcctactatgggccaggcattgttacaattaataagtagctttaagtcataccccaaaacggaagcctttgaaatagtgtgtcattctcttataataaccaaagaaaggacaaatgttttgcagttctatttgtagaacatcagcaagctccttgctgctccctgggagccgtggacagtattttgaaaacactgttctaggctgctatcagaaatctcagactggtctgagcgtggtggctcacacctgtaatcccagcactttgggaggctgaggcaggaggattgcttgagctcaggagttcgataccagcctgaattacatgctgaaaccctatctctcaaaaaaatacgaaaattagccagatgtgtttgtacatgcctgtagtcccagctactcaaaaggctgaggtagtaggatctcttgggcctgggaagttgaggctgcagtgagctgtgatctcaccactgcactccagcctgggcaacagagcgagaccctgtctcaacaaaaaataaatcccagaccaagagccaaggttaagattcaaaaatggaacttcacagtttctaattttccatcctatttgtagggcagcgatgaaaagccttgaaagcrattcatttgtccatccattctcagrgtgggcctgggattccaaggggaggatttggatgctgacyccctccgtggctttctttcagatcacatattctacaaattccagccttctgtggtcgctgcggcctgtgttggggcctccaggatttgcctgcagctttctccctactggaccagagacctgcagaggatctcaagctattccctggagcacctcagcacgtgtattgaaatcctgctggtgtaagtttctcccctgaatcctgtgtttctgaaatagtgaggttcctcttgccttgaggcctgcctcaggccacgggcagtttccagagtctggaacttgtggtggttcttccagctacagggtctcagggaaagtgggccatggtgactcctggtagaagtggggtttcgagaaccagttcttcctattttgaatagcttcaggtttgctttttattttattttattttttttttgagacagagtctcgctctgtcacccaggctggagtgcaatggcacgatctcggctcactgcaacctccgcctcccgggttcaagcgattctcctgcctcagcctcctaagtagctgagattacaggtgcgcgccaccacgcttggctaatttttgtatttttagtagagacggggtttcaccatgttggtcaggctggtcttgaactcctgacctcatgatccacccacctcagcttcccaaagtgctgggattacaggtgtgagccactgcgcccgaccgggtttacatctttaaagtcaggcagcaagggagaagcgggctgtttgcacctttaaatgtctaggctatttgatctaagtcccagtgtaatcttatagataatcgcattgaaggacttccattataagctacttttctcagacatggtcacaaagctgacctcttagccagtaagctcccctaagcgccacagcctctgcaagggtccctgggaatcttggggaggaaatgttcagtgtgtcagagaagatacttaaaggcatcatgagcccaacaccctgaaactgacactggaggtaaatgtgccccatagttactgcagggagcaaggcaaacaggacagagccattcccagtaggcacacactgtccagttccccttccacctgccaggcactgcgtatcctgggtgctggcctgactgactggtgggctgtgtgggcaaagcggaagcccttagacccctgaagagagccctccccgatgtgggaagctttgctggcagctgtctttatctcattcctctgaaaagtcagtcctactccgtaggccttattttaaaatttgtgtttttgagaaggtccccaaagcctggtctgagtgtcggtgcatgccttacataagcctctaattgttttgttttcccaaaaagctatatgggaagctttttttgagatggcaaaaatctctgttccagcccccttttcagatgaaaaatcctaggccccagcggtcaatttggttgatatcagctagctaaggagtgaccccgctggggatggagctggcccagaattgcctggaaagcagagattgggctcattcaggccccaggaacactccagtgccaggggatgggaaggcattggtgagcacaagcaggcgccatcctcctggaagccaggtaactagaagttaccctctggagcaggttactctctggggtattgactgtggagatagggcagcatggggctgtggggacagccagcctagtctggaggggccagaagaaattttctgtaggaagcagatccaagctgagagccaaggcctgaatctagtttgtgaacagctggagcggtgccacacacagtgagcacagccaggtaaggcctggtggacacaggacacacgcatctcttccagtcccacttagcaagacaggtagagacacacacaggcatctggtggcttttggcctccagttctcacccaggtcttctcgtttcagagtgtatgacaacgtcctcaaggatgccgtagccgtcaagagccaggccttggcaatggtgcccggcacaccccccacccccactcaagtgctgttccagccaccagcctacccggccctcggccagccagcgaccaccctggcacagttccagacccccgtgcaggacctatgcttggcctatcgggactccttgcaggcccaccgttcagggagcctgctctcggggagtacaggctcatccctccacaccccgtaccaaccgctgcagcccttggatatgtgtcccgtgcccgtccctgcatcccttagcatgcatatggccattgcagctgagcccaggcactgcctcgccaccacctatggaagcagctacttcagtgggagccacatgttccccaccggctgctttgacagataggccacctccagacctcacgaggaagccttggagatgtgggcagaggaagaggacactgaagaggagagctcagccaagtgaggcagcaggaggccatccctgaagagccttggaacgtggagggtctgtgctccttttaaataaaactgacccagagcaaaacattcaataacatacctcacccgagagcattcctctgagaaacgtctgccacgtgtggctagggtacaaaaggatggcttggtggccgtccccccacacaggggcccagtgaatcgagaaagacttgataagaggccaggagagtgggaactggacacagaccactgatctcaagcatgtccagtttttagcattaaagacttttctattctttgctgatggcagctacaccgctgaaaaaggaggggcagcctggcgtgttctcaggacccccggaggatcccatattgggtgcttttctttccctggctctatgcagaggggcctgagttggtgtgtatgcctgagtgtttgccttgcgaggcacagtgggtggctgtcttgcctttgttttcgaacctaaaaccattttcagccttttagatatgtcatgtgctgctgcttcccgaagtggtcttgctttctgtttcgtaagatgtcttgtttacacactgtatcagggatttggtgatacttgaaaattcctttggagaaaaaaacaaatttaattgccacactgcctgtcccacatgagggctgttaatttggaacccaagtttgaacccaacttgtgatggacccgcaggtaaccacagagcttcctttttgaaggcatatggttggagagaaccattttcccagctctcggttccggaagattccacgtcttggaggctgtgttcaccactagaactttaataactacccagggagggagaagctcgttgaaaggaagacaaagatttaaacagttcccacctctctccaccacatacttacagggcatgagtttaacccagtctaggctttgagtgtggctgatagcgaaggatagcaatgtggaaaatttgcttagtcccacctgtatttggggagtgggatgtacatgggcgtttgataccaccattgataggcaagcgactggttggatcaaaagccagtatttagggatctgcagcgagagggccctcaggaagactcttgtaaccatgtgcaatatgtttttattctgactcgcagcttgtgctcagcatgttctttggtttagtttggggttgggggacacattgttcacccagcagaactgggaggtgcaaaggaccgtggaagcaatttttgttttgtttgaggaatacctgtcttggattccttagccccttgccagtcctggagactgtggcaggggccgccaggaaggcagctgtctgctgctgagtcagatcggaaggtggtgaatctttccagagcagctgaaaatctcagcatggagacagtaagaaaagagacggggtgtggataagactctgccaccgtgtcacactagcataggaggctgcacgttcatttgttgttgtttttttttcctttgccaacctccgttctatttatgtgcaagcagtttggattcaagttcttgtatctgtctgttctgggacctggggattgtgagggttccctcacagccagcacgacccccagaaagaggcgtcccacaataaacacgtcacctgctcttgatctctcacctcttgtcctaggcatcccctcttgggccggcccctccttccctctctcaaatcagccctggtgagcatctccctatggtagagggtggaatattgggggcagcagcaagacctcgggagctgagtcctgccctctgagtaggagctgggcctccctgggcacacagaggccagcggaggggtgtataaggcttgacaccccagctccatcaccgtctcagggtttttccaaagaaaccagtaggatatatatggagagagatttattttaaggaattggctcatgtgattgcagaggctgtggtctaaaatttgtggggcatgtcagcaggctggaaattcaggtaagagctgatgttgcagtagagttcaaaatctgtagggcaggcccacaggctggaaactcaggcatgatttctgtgttagcagtcgtgaggcaaaatttattctccaggaaacctcaatctttgctcttacgaccttttaccagttggatgaggcccacccacattatggaggcttttcttaaagtcaactgattgtaaatgttaatcacatctaaaaataccttgacagcaacatctagactagtacctagccacacaacaggcactgtagcctagccaagctgccacataaacttaatgatcacaccacttaccagctgttggaaggcagttgacccaacctctctctgagcctccatcttgtcacctgttaaaatgggagtgataacaccttgcctcatagggttcttaagaggattaaataacataatgtacatcaaggccagtacctccaaaaaaggagataattattatatttcttcaagcataagatcagctttttgtaagatgcactattattttatgcactaataagactttttagaaaactaaatcatgaggcagtttgcaagataccattgattatatgttgcattctgatttcagaagcgttacatgtcaaaatatgtatatgtagaattgatgagatatagcatcagctgttatgaaaaatgtcagattcgtactcctccttgaagggagtctcactcaagacttctgtcttgccctctacctacccagcttccagcaggagaaccaccccagagagccggtgtcactgtggggctgagacatttgctaagtgcagatgcctttgattagacaattaggggaggaatgggaagatgagctcagggcctgaggctgcagcccagacccaggagtgtgtttgacaccgccaagggcggggctgagggcagtgctcaccacccgctgtgtgcaaggctaggtgaggcaggaagctctaagttttggggattcagagacaaggcaagtcttgggttgaccaagagcacccacctcactttggacaaatccctccctctttgggcttccatttctccatctgttactatggagatggtcaagttggtggatggttctaagctcttggggcggggggagactgtgccacagaggctgtgacctctgtggccttcagccagagggatccacttgtatttcttccacccttgggcactcccatgtaagattgtgttaattcccatgctggaggacagctatgaaagctttaaaaagcacaaagatagtcttaaagttcctcccagggctggcatcaggttaaattcagaggttttcaagcctgagcaagctgcagaatgacctggagccttctctaggaggggtggggacctggaatctgcactttagccagcttcttggtcattcaggcatatgatttctttgtttgttttttatatttcagttgtatttttataactccccagtttagtttgattttttaaatttttattttatttatttatttatttatttatttatttatttatttattttttgaaacagggtctcactctgtggcccaggctagagtgcagtggcacagtcacggctcactgcagcttcaaccttctgggctcaagtgatcctcccacctcagcctcctgagtagctgggactacaggcacctgtcaccatacccagctaattttggtattttttgtagagatgaggtttcaccatgttgtccaggctggtctcagactcctgagctcaagcaatctgactgcctcggcctcccaaagtgctgagattacaggtataagccactacgcctggtccagcttgttttgaaaagtattttctgacgtctatatgaatttaacagaattatctcaaagtacacagaaattacctgtatttgccagtaaatatgagatgctgatgaaagaatactcaatataccaatatttaagcatgtcaacataatagaactttttccaccttttaaaattatttttcccacctaacccaatttatatttgacatttgggttacatgtgcatatagaaacagacctattccacaactgaccatagataaactagcatgcaagtgtcctttctggatgtaattaagtttcagaggcagcatggttcaaatgggagcaaatgagctgacctcctcatgaaatacactaggcaaaaaatcaagaagtattaaagttgctaaagactgattccagatcttttatttcttcctttttctttttaattttgagacagggtctcactctgtcgcccaggctggagtacagtggtccgatctcggctcactgcaacctctgcttcccaggttcaggcaattctcctgcctcaacttctcaggtagctgggagtactggtgcgcgccaccatgcccggccaatttttgtatttttagcagagacagggtttcaccatgttggccaggctggtctcaaactcctggcctcaagtgatccacccgcctcggcctcccaaagtgctgggattacaggcataagccacccgcccagcctcttccctatcttttaaatatacaagtgtgcactgtgggtgtgtgtgaattaagacgattctggactgtgagctcctatgggcggggctattgtcactctataaaaagccctagggcaaaaagatggaggtagtgcagggagcagagggcgcctgtcctccatccagccatcatcaaacccaccgaagaggcagacccgattaagtcttagtgggttaggtgttgacctgggccttcaagggaggttttactccactgtgttttattttgttgttttatgtcgtttgttccactatttttgtaattggggcaaagtgagaggttcagctaatctaagaacacttaatataccccagaaactgtctgaatcaattatttttattcttctgccaaacacaactgatttccatctgcaattattttttaaggtaagaaacagtaagtcagtgaagaaagagctgggttagcttgcccactgagagatgcagagccgaaggctggggtcaagtcaggttggccgcagcagggtacagagcagcctcggtgggcttcctccaagaacgttctgcagcacctgacacactgctggtacaccgtctcaaaaggcagccatttccataatagggatctgcattaataagttggttttgtgatcacagctcccaagtagttcaattttagctttgcagtttttaacttgattgctttttctattcctatctctgctgggcaacgtggctcatgggaatgttgtgtctcttcatgcagctgtgccctcggtagtcaggggattccctatctcgtacccagacgtcaccacactgtctaccctccaattctctgaaatgtttttttttttttttttgagccagagtctcgctctgtcgcccaggctggagtgcagtggcgcaatcctgactcagtgcaacctccgcctcccgggttcaaccgattctcctgcctcagcctcccgcttagctggattacgggtatatgccaccatgcccagctaatttttgtatttttagtagagacggggtttcatcatattggtcaggctgatctcaaactcctaacctcaggtgatctgcccgccttggcctccgaaagtactaggattacaggcatgagccactgcacgcaggactttgaaatgttttgatctgaaaactgcttctgcagtgggtgaccaacagatgttacccagacacacaaacagcaccgacttaggcacctgctctcccatctttacgtgcacaaaggtacccagagactgcctgtgtgatttctttgaagaaacattgaaggattaactgtgcaggaactggttcccaaactcaaatgagagtaaggaagtagcatccctgtctgaatgtcaaccatttgagtcctagacctcaactttgttctatacttagtatttctttctttgttctatgcagcatttctctggcttagctgagtgaagggctaggacacccagacttcttttccaagaagaatctgcttctttccaaactaacactgcagactaaatgcctggatttggcttagagtcagggttccagttccttctgccctccaggttcaaagcccatctctccaaagctgtttctgctcttccccttagtccttgtgggactggctcctcacccttattattattattattattttttctgagacacagttgctctgtcacccaggctggaatgcagtggcaccatcttagctcacagcagcctccacctcctgggttcaagtaattatcctgcctcaccctctccggtagctgagattacaggcaagcgccaccatgccagactaatttttgtatttttagtagagacgaggtttcaccatgtaggcctggctggtctcacactcctgacctcaggcgatccgcctgccttggcctttcaaagtgctaggattacgggcgtgagccacagtgcctggcctgctgctcaccctttatatcagtgattctcaacaggggtcattttgacccccaggggacatttggcaatgtctggacacccatttggttgtaactgaggggggttactaccagcatatagggagtagaggtccaggatgttgctaaccatcctacactgcacaagagagcccctcatggcaaaaaactgtccagctccaaatggcaatagtgttgaggctaagaaaccctgctgtaggtctcagctcacgtgctacctcccgaacaggcctctgtaacaaccctagtcattctctcattagctgttgattttcttcatggtattcaaaccatctgaaatgaccgaattaatttgtttacctgatttgatggctgtgcctaaactacctcccctcccaccaccccatataataatagctcctggtggtggtggcagtagtcatcacagctaacatttattaagtacttactgttgtatttcaggcatttgctcatattatttcctacagccatcctagtaaccctacaaaataggaagtattattagctgtgttttacagatcagaaaataagggcacagagaggttatttgcctaaggacagcagcggcagtgaaggagccacagttcaaccccacgccccagcatcctgtgctcctgacccagtggcttcggagtgcaagaggtaaagtctccgtggctggcccagctggccatccactcacctggtagggaacaccccactaggacagaacaatggacgtgggttcataaaagcaaagagttgcctggcgttcacactcctgattcatggccggggttctcagagcatgctcaccagcagacacagaaccgtagctccttgcacatctgccaccggctaacaagatttgcggctccatctgtctgcttctaacatgcttagatctgggaggggctccctgagctcccagccccatctgtgaaggtgaagacctgggaccaggcttggggcctccccagagcttcccccaggaggggacctgcctcagtgctggctcagaccagttccaggcaccatccagcttgtcaagcagcccaaagagctgccctcctccttgccagcaaccagcatccttgtatttctgaggcaatccctggcaccagg

SEQ ID NO: 5713 - DNA, 21739 bp, Homo sapiens
actgtttagccattgaacttttgatggccagtgagtatgactggggcccatccaggcagggtgtggagcagagggccctcctttatgggctggactcactagtgggctgcttacctgtgactcacctccaaggctcaagttaatgctaacgtgttgatttgctagaactctgagctgtgcctgtgtctccttgggccctgggagatttttttcttttagcagtattttatggagatattgtctaggtagagtaaaatgtacagatcctggttttctgttgagttttgttttgttatgaggcagggtcttgctctgtcacccaacctggagtgcactggtacaatcatagctcactatggcctcaacctcccaggctgaagcaatcttcctgcctcagtctccctgtagctgggactacaggcatgcaccaccatgccccactaatttttttgatttttagtagggatgatgtctcattatgctgcccaggctggtctcgaactcctgggctcaagcaattctcctgcctcagtctcccaaagtgctcaattacaggtgtcagctgctgcacccagcctcagcctgttgttaatggatgtaaacacctgtgtgaccaccacccagaaccagatccagaacatttccaggctctcgaagactccttcgtgcccgtcccagtcagagacccccaagggtaatgccattctggcctgttgttcaacttgacttgaatggaattttcacagcatgtgtctgtttggatctggcttcttctgctcagttgcgaggcccattgatgtttcctgtggcctagctcctttttattgctgagggccactcagttgtatgaaaaccacaattcattctcccttctcctttggtgaacatttgcactgtttccagcctgggacaatgatgagtaaagctgttaaaaacaggcacatatgttttcctttctcttgggtaattttttagaagtagaaaagccagccaatagaagtagatatttgactgtattaaaactcaccaagcagtttttcttattttttttaatttttaaattttttttagccagagtcttgctctattgcccaggctggagtgcagtgtcgtgcactctcatggacacacatggatccagatgccacagcagccttagctggccaaccttaaaacaacacatttgttcttatagtgttggaggtcagaaggctaaaatcaaagtgtcatggaaggtggccagcaggaccgtggagcctctgaggcagtgggacactttggctaagagccacatactggctctggctggcaggcagtcttggccagccaggctgagctccccactgtcggggcaagcctgggtgtcctctggtgatgctgagtccagaacaaggctgtccacattctggtccgcagggctcagctctgctttctagacttccaaataggaagaagagggaaagttcccagtctctgggcacaaccaagaacagagagcaagttctgactcagcagagggattgattcattccatgcaaagagctgcactgccaaggctgacacgagccagggactcagcacacggcatcacacccagtcctctccagaactctgccacgtagtgttaccatcctgccattcagaggagggaagtggggcacaggcaggtcaagcaacttggccaatgtctgaattgctagtgtacggagctgggaggggagcccatggggccataaatccagtgcaaaaatccgtcctcctgaaccctacggagcaaaagtgagtccagttgttttcctgggtttcctggacacacagatctgaatttcacagcagccttggctggccaatcttaaaacaacaaatttatactcttaatgattctggaggtcagatgttaaaaggtcaatgtgtcagcaagtttgtttccttctggaggctccaggggagaatctgtttcctttccttttgcagcttctagaagctacatgcatgccttggcttatgggccctcctgccatctttaaaactgtcagctttgtccaggcacattgactcatgcctgtaatccaagcactttgggaagccaagacaggaggatctctttagtccaggagttggagaccagtctgggcaagaaagtgagaccgtgtctctacaaaaaaatagaaaaaaattagacgagcatagtggtgcatgcctgtagtcccagctacttgggaggctgaggtggggggaatcacgtgagcctggggaagtggaggctgcagagagctgagatcacaccactgcactccagcttgggtgacagagtgagatcctgtctcaaaaaaaaaaaaaaaaaaaaacacaaaacaaacaaacaaaaaaccaaaaccagcttcttcttgcttctgttgtcacatctgcaggactcattctcccgcctcccttttataggatccttgtgatcacattgggaccacctgtataatccaggacaatctccccatgccaaaattattgatttaatcacatctacaaagtcccttctacaacgtattcacagtttctggggatttgaatgtggatgtttctggggggtggcccactgataaccagtgttataagtttcttgaaaatccttccagagatattttatctataaataaataaatgcaagtccatagcctccccccacccactttttatacaagtggcatcattccatatcagtgctcagttccatcttcctctttttcttttctttttaaggctacacagaacctattatatggaaataccctaatttatttcacttttttcctgttggaagacttttaagctctttccaatgctttgctttataatcttttgtattataatgctgcaacctatataatcctataaccttgtttgtaggataactttctatttaaaatctcatttttcaggccaggcatggtggttcatacctgaaatcctagccctttgggaggctgagacagaaggatcacttcagcccaggtgttcatgaccagctctggcaacatatcaagaacctgtcttttcaaaaaacttaaaaattagtgaggcatggtggcatgtacctatttggtcccagctattcgggaggctgacgtgggaggatcacttgagcccaggaggtggtggctgcaatgaaccaggatcacacccctcactgcactgcagcctgggcaacagagtgagaaccaatctcaaactaaaataaaataatcttgtttttcagaatttgagggtgccatttaagacattttgacacttcacagaacttttttggggaacttgttgccttggagattagcctgtcctgtcccacccccatgatctgtacttcctgtttctccctcctggcttccttaattaagccttgtgtgtacttgcgagcccatgtccatcacgctctgccttcaattctggatgctgtgctgtgaatacgcttgagtggaggccgcatgctttccaggagggtgtgtattttcagtgttgtctctcatgatagtatgaaaggctctggagggaatcacaggcctccacaaacaggcaagcggaaaaatgttccacagacatgtttcagggacaacaggcttcccaatcctaggtcgtgctggtccataactggatcaggctgactctccctccccgacaccgctggtgtagacagggacaagaaagagaagtcagagacacaaagaagctgtgatttgcttgaggtcactaaagtacttaatggcagagttcagacctgacctgaggggcaacaaaagacacccccctcaaatccatggggagcagagtctatctgaatcagatcccagattttctggggctttcacgatgccaggtgtgtacactgagctaggatgggtttcccagggttctttgtggtcacacaactcaacaatacagaccagaaagcagtggcgagtaggctgaatttggctggtgggtgttttctgtttggtctgcacagtgtttaacttgttattataggaaattcaaacatgcagagagaattgtaccatcaacaacacacacccatcactctgctccaacaatgatcaattcaggcctatcttgcttcatcctataccctccctcgcttgcttcccttcccaccctcaaatatgtggaagcaaatccagagataccattccattgcaaatatttcattttgtatctctataatatgggaatttggggaatttcatttgagacaggatctcacttggttgcccaggctggagtgcagtggcgtgattgtggcctcaacctcccaggctcaagtgatcctcccacctcagcctcccaaatagctgggattaaaggtgtgtgccacatctggctaatttttttatttttttgtagagatgggggtcccactatgttgcccaggctggctggcctcaaactcctggtctcaagtgattgttttgcctcggcctcccaatgtcctgcaattatagatgtgagccactgtgcccagccaggaactttaacataatcctttttgacaaaaattttcctctaagaaattagaaaattttacagaaaaataaaaatccagacttctgtcttctcttaaaaatttggaagctctgccaatactgggcccagatggcaatcactgattagcactgagtagatgttgacttttcagatgaggggtgtgacgtctactttgccacagtccccaccactcccccacctggccatctcacccatacacatcacctgcctggctcctttaggcatttaatttgtgtaggaaattgacctaaaggagatattagagaagacattaaaaacttgaagaatgtgaaaatcagccaggagatagaactgtgctttaatgagggttatagaaccacactggatatgaggcattttgggaataaactttgaaaattggaagtaccagtttgtgaattttgctcagagagatgaaggtggggggtgggtgacagtggtgaagcatctcctatgtgccagtctcttttaccacaggctgtttctcacaaaatcatcaatcatatgcagtaggagaaacacctttgtattttacggatgagaaaactgaggcacagagaggtgaaataggcttcccgaggtcactcaggtcatatgagcagcagagctaggattcagacctggagttggcctgactctaaaacgatgcatgcctcaccatggcgcattgctcctttaaagagcaccagaagagagaatttgacaaagtggttgcccgtggggcctgggatgggtggggaaactatgctagggctctgggctgctgagggcctgagggaaggaatggggagcccgggcgcagaagtagaggagggggctgccccacggctacagaaggcatctgggaagacactttgctgaaggtggccaggagggcaaaggtcacagtggccattgttatatggtggtggtggggagagggggatggcttcttcttaaccttctcgggtgagtcgaaggtttaccctccagacccttgatgggtcccttatgtcccttggacatcctgagtccccagccagggccctgggcgctttgctgggagcttgacataaggtccagcagcccccattgctacctaattccttagcagcccagggtgtctgcctgctacttccctgcctggaaggaaggccttctgcctggtgcgttcctgctgcagcctccactgcctcttagactctcacacaagctcagctccctgtcgcgtcctctcagggccaggcttctccttatcacaagcttagactgtctgagtaactaattggatttgtgtttgcctccacacaggaccctaagacccgtggggctgcgactccctctgtactggtcacagccgcaccctagccccttgcatggcgctgtcaaacccaggctggccactgactagcgctggaggggagcaaacgggaggccggccacctgactgatggtcccacaccttctccctgcaggctgtccccttttctgggactattcaaggaggtctccaggacggacttcagatcactgtcaatgggaccgttctcagctccagtggaaccaggtgtgtgtgtatatggatggaaacgtttcactccagcctcgtcccttagtaaaccactgtgcctgtgagcctgggttagttcaaacagcaacatccaagctcacgtgcctggctcaggggaggcccaatgcgtccctaacccatgccacagggcagcactccacaggcacaacctgcacccaggggtgccattaacctggactccaggatgaatggggccctgggagctgacggtctaaggagggcgtgggatggtcagagttggatgattatgttctgggttgaaccttgcacactgtgactaagagttgcaaaaatcaaacttcctctatttcccgtaactgctctcatccactctgaagctctccttctgctgatgtgaaaatattgaaaattgacattcaaagtaatttggtctctttcagtttcaaggccttttctggaaactactaagtcaattcaacatactaacattgtatcagggctgtttcccaccccctcctccctcccaaggtgggctgtctgggaacagagaagagctcacatggcttctcagtggctgggagggctctagaccctcacgcaggcctggctgacccctgccgaggcaccctgattgggtgacacagaggtgtgcagctctctcctggttgggtgggagaccacagggtggcttgctgaagtctgcggggcccacagaagagcctctggactcatggttctcccacagaagcctctctgcctcagtcccaggggtcctctccttaagaccttctgggccttgcagatcccaactcaacatcagttcggccactagattcttgctgacctcccccaggagatgccaagggcagggcggccctgatccccctgaaccctccaaccaggggaatcaggaccacacccctgatcttcctccccttcctctcttcctctcccttggcctcccctacctcccagcaccaggaaggcttccgactcccatcctgtcgaatagagacagatcctacctcagagggccctctcctctcgggagctttctgtctctcccttccttggggcaggaatttccaaaggactacagggatgaagctgaagggctccaaaagaaaaaaatacattcagaggtatttcaaatgtamtcatctccatttattcatttattcatttaattaattattttttttcttttgagacagggacttttttctttgacccaggctggagtgcagtggtacgatcatagctcactgcagcctccaattcctrggctcgagcaatcctcccatctcagcctctggagcagttgggactacaggagtgcactgtgatgccmagctaattaatttttttttaaagtagagatgagatctcgctgttgctcaggctggtcttcaactyctgggctcaagtgacccacctgccttggcgtcccaaggtgctgtgattacaggcgtgagccactgygcccggccccaatttcacatgctctttacatttgttctcttctttcccacttaatcaggcttgtgctagcctccaacaagtgtccactggcatggaaggctctctcttctaggtgtgcttaacaacttccatctttggtaacaattggtaatcactttccaagacctatgcttcttgtttgctaatatcagcacttttccttaagcattttctacttatttttagaaaatcatactgtaaaggcaaaatccaataattgcacaaaaacacattagrtccaaattagagaaacaaaaagatgccaaccaagcagtctctgcgacgcaagttgtatgcaagatcccagacaaatgcraggcagaggcaccgaagccctcctgtgcctgtcactggcaataacccatgccacagaagactatttgctttccctgggcctaggtttgctgtgcgctttcagaccggcttcagtggaaatggcattgccttccacttcaaccttctgtttgaagagggagggtacatggtgtacaacacgaggcagaaaggaagatgggggcctgaggaaaggaagatgcacattccctccagcaggggatgccctttgacctctgcttcctgctacagagctcagatttcaaggtgagcaggaaacccctccccacctctcacccccgggtcycccagctctatcaggcgaatgggctttaagtaatcaccttgattgacattcagccagagtgatgctactatacagataacacaatcatttccttgtaaggtgttaytcatggctgcctagtcatcttatrcacctttatctgaatctacaggtgcacctgctgcttcttttactctgaaaataagaactagaggagtcatcacgttgctgtttggtggtgtgtgtctttgaattccaagctcatgccattcctctgctatcaccacacctcctctccaggtgtctggtaacatttattattcagcgacattgttccagccttcatccagggtctattaagggtatagttttgtaagcaaattgcaaattacctttgcaagcagagtaggtctctgggcttgagaagcctgtgggtaagtcagtccgagtatgcttatctgagataaggatgtccccatccactcagtatgcaacstgaggtcacctctcctctgctccccatgagcattttatgcatatataaataatacccctgcagccataaaaaggaacgagatcatgtcctttgcaggaacatggatggagctggaagcctttatcctcaacaaacacaggagcagaaaaccaaacaccacatgttctcacttataagtaggagctgaacgatgagaacacatggacacaaggggggaaacaacacacccttgggcctggtgggggagggagagcatcacgaagattagctaacagatgctgggcttgataccaaggtgatgggttgatctctgcagcaaaccaccatggcacccgtttacctcgttaacaaacctgcacatcctgtactcataccctggaacttaaaatcaaagttgaaggggatgggcacagtgggtcatgcctataatcccagcactttgggaggctgaggagggcagatgacttcaggtcaggagttcaagaccagcctggccaacatggtgaaaccccatctctactaaaaatacaaaaattagctgagtgtggtggtgggcacctgtaatcccagctactcaggaggctgaggcataagaatcacttgaaccactgcactccagcctgggcgacagactgacattccatctcaaaaaaaaattgttcaaggaaaaataaataataaataaatgaaaccccaggtgagctaagactagaaagacaaacctactgcaggaaacaaccagaagaatgaaaagtcyaactggagccccgtagagactcgggttgatgcacttcrggtcacacacacgttcctgtaactggccccacactgaagaccagactcaggtcttcattttctagaaagagggtccaggagctcaggggtggtccccatcccagcctgggatgcctcccccggaacacgtgctctcctctggcaggtgatggtgaacgggatcctcttcgtgcagtacttccaccgcgtgcccttccaccgtgtggacaccatctccgtcaatggctctgtgcagctgtcctacatcagcttccaggtcagactgtscacctggcaccggtcccaggggctgggatgcagggcccagcrtagctgtgtctaggcccwgctgggtgggcccaagccaatctcctacccaggtcactctggggacaacctctgcttccctgtcccagtacctgcccgccccttctcctctgtcactctgcccctccttctgtgttactgtccctgtccggaacacctgccttggtctcccagactcctcagctgcccctttctcctcaccccttgatttccaccctggttaggaggccatattgttctagaaagaacacaggctaaggaaccaaactgaatccagttcaaattccaagctctgccattcatcctctgtgggatcttagacaagcaacttcacctctctcagcctwggtttcttcatctgtagaatggtcattgcctgccccccatgggtggttgtgtggttcagtgaggagacagatatcagaggtcacacagtggcccccctgggcccacaccagggtctgtttgacctctgtgttttaacaactttgaatgtgttgccaacatctaaaaggtcaggagagtcaggtatggtggtggaggtctgcagtcctggctactcaagaggctgaggcgggagaattgcttgagcccaggaattagagttctgcctgggcaacatagcaagaccctgtctccaaaaaactttgtttaaataataaaataaaataaaacaaataaaactaaagaaggtcaggagataccaataccacgtgaaaaatgggaagattagggtatgctgggcccacattcccacagggcaccagcagctgggtgggagctactattacccttttggcattcgaggctgctccctgagatcagcgaagcacacagtaggccctcagcaaatctgggcttctcgccctttggtcctcatctctgactttggtccctctttccctgactccctcccctgtgggtgaatggggagggaagagctggagggagaccgcacccctgcactgctcaccagagcctggctctttcccatcccatcttggcatggccctaacccccttgcctcatccccctgcctgcctggtctctccctcttgcccttgcctctgcctttcggcttctccttggctctattaatgcttctcctcactgcccggtgccttttgttttaacagaaccccygcacagtccctgttcagcctgccttctccacggtgccattctcccagtctgtctgtttcccacccaggcccagggggygcagacaaaaagtgagttcaacacagaggccctgggtggccgagcagacagtaggaaggaccragggtctgagaggctggccccagccagcaggccactcagggcctacaggccccatcttgcccactcaagagttccctgtctgtctgccgggcacccagagctggggacctgggggtctccctgaattcttcattcycccttctttacgtctctccaaggcaccaagaggcccgaagccaccgacatggcccaggcctccgggattcctcaccatgacgacaggggtccagttccccaccccccacacccaaccactgtcacagtggttcttataagcacttaagttcttataagtgcttcttataagcaaatctgatcacaccctctccctgcttaaaaatcttcacagcccccagcccttcaaataaagcccaaattccccagcagggcatacaaattcctcccagtctgaccccaatcaacctcgctgcctcaccccyaaaccacaaagctcacgcagcctctgcagctcactcaaggccctctcgggccaccatgtttttgcatatgctgtccctggtcccggaagcatcctctgccagcctgcccccagcacacgcctaattgcccttccatgctctgcctaaatgtcgctcctctgggagtcctccccgcctggaatattgttggacgctcccccatgaccccacrgagtctgtacgtatctgtgccatgccagttcaaagcacyccattgtaactgtgtttgcgttgtctgtccccgtcactccacccccatctccctatgcccatgaggcttcagagggccgggactgtgccttgttcatttgcactcagtgaatgaatgtggaatgtggttcacacagccagggagaatgggataccagccagggcaagaacagtctactgggtggggcaggatccaggacaaggaggtgagcagcccttcctctggccactccagtagtggggactgggaggaggggcgctttgtctatgcagtcttcttacggctcatcacggtacagacagggcacctgcctcctgccacgctgacttcaggactggtcgagccccagggaacatttgcagcgcagcccaaatttggccctggccctggggaggatagaaagtgtgctggatacagtcagacagaactggctgccactttggatttgatgccttccacctgggcgagcttgggcaagttgcttaatctttctaagcctcattacctcaccagggacacaggagctgaggctgcttccctcattggaaagcactgaaacccaggaatcagcccacagtaggccttcaacaaataccacttctcaccttagtggtaaaatatggcactggaagtaatgctcttggctgtgggagctacagagagcaatgaggtctctatcaaacccagcctcctctctctcaagaggaaccaatggggataccctaccccccaaccccaaagccctgtgcacctgggggtaaaaatctgggtgccacgggctcaggaaggcttgcttgggagcaagagggaggtgggtgtgtccggggaggcatttctgagcacaagagcctccctggagttttgccaccatctcctcccattctgtggtgcccgcgataaccaccattctgactctcctcacccctccagcctcccggcgtgtggcctgccaacccggctcccattgtaagtctcttgctttctttttggatcgtcctcattttggcttttctgggctcatggaggaggcagggccaggcattgggcctctcccattgggagtrgggagggcacaggccaggcccttgaccatctgcccggcctggtgaggttgggggttggatgtggttggctggccgtgatgaaacaayctgagttgccaccccgtgggcagccacggaagaccatgccccacattcacttctgtcacctgcaaagggaggctaggctgagagacgtttccccgagaggaaagatgggccagagccaccagcgtccccatctgtcttctccagggttctaacctttgcccctcgctcatccccttgagagaagagacacctgggcccaccctctgtggggtctgtggggccattgggcttgttacgccccctggagggtgcctgccgtgtggcgccctctggtgggagctggtggttttcacacgtgagagcctgggtgagacctggtttctttcttccagacccagacagtcatccacacagtgcagagcgcccctggacagatgttctctgtaagtctacaagttctggtcagttcacagctgcacagtgtcctccttcaccaagaactaaattccctagagcgctagagttgggaagaaagcggtttagcaaggaggatggggacactaggggctgagtgcttggctcaggtgacatgtggctaaagctgtccttgggacagcagagattctggaagaagcaggatttatccagtggtggaagaggcaagccccctagagaccgggagggaaactggtctgtctgtcaccaagtggggagtgcagtggccccagcacccggatgtgaggttcctggccctgcatcctgggtccccaggatgtcactaccgatcataggcttaagctcttctcctgctggtgcaaatcaggccggaagtttagcgttagtggggctgcctgcagaggggttgagggrcaggtgaccgtggtggagtccgggaacacggcaggaagttccaggaaggctaacatgaaaagggaggtggatgggggagtccaagggccaaaggctcatgaggtcagcctcacagtggagcccctctagaatgcatgggtgcgcgtgggtgagtgctcgcgcacacatgcgctctcccattgaatttcctggtttcttttcagcagactcccgccaacccacctatgatgtacccccaccccacctatgtaagtgrtttctcagggagggcggaggttctgtttgtggtgggcaggctgggggtgaagggccacttcgggggtatccactagccttgcaaaatgaaaagcgaagggctttcaaaatggtaagctgaagggcttcaaagcttcccagcgaattagaagactgtggagaggagctttcaaccttaaaactgtcgtgtcaatacgagcgcattgcatggctctcccttttcaccccacgagatgagtctttttgtgtttggccaaagttcctttcatgacactaatctaagcccattaatatgaggagcactggaaagttttcctttggcttttatggaaccaagtacagatatcgttggtttcttcttagctgacagcccaaattcatgggacctggtacaatcttcccttttgtgtggtgggctgccctggctgccactggctgacccatgcctctccttctgaaagccgacgccttttgtcaccatcattccgggagggctgtacccatccaagtccatcatcctgttgggcactgtcctgcccagtgctcagaggtaagctaagggctccagttgacctctgggaagagagagcccttcaaggtgattccagccattcccctggctttgggcaggctgtggatgacggggaggaaataaggcccagaactcagtggacaaaggtccaggtgggctgcccaccccaggttccacatcaacccgcactctgggaaccacatcgccttccacctcaatccccgttttgatgagaacgctgtggtccacaacacccagatcaacaactcttgggggtctgatgagaggggcacagctggggagaggtggggagtgggcagtgaagatgaagccccatgctcagtcccctcccatcccccacgcagctccaccccagtctcaagccaccagctgtccactcctggtgggaggtgacgtcctcagtccctcccctctgacctttaacctaactctcaccttgcaccctgcatcaacccttcaccccctcctggaaagccagcctgatggcatcccactggcctccaccaactgaccagagtgttctcttcaggggactggctcctttcccagtgtccttaaaataaagaaatgaaaatgcttgttggcacattcatgtgggttgaccgtggcttctttaattcatttggagacattttggagtctgtggaatcgggcggcggtgctgctgagaggagtgggatgggaaagcatggactccctttgggcagggggtcctgacctcacacctcctcccagagggtccctcacaaatcccacgagggtgttggagaaagcaggctggggctctagccttttgggcaggagtctcggacacaggaaggtggtaatggggtacmccaggaaacagccccatgcctccgagatgggagaggggctggggcagagcctgtgagggccacagcagggtcagagctgcctcctcagacctggcgtcccagtgggaggaggtggcttggggaggggggtcaggagaagccaacccgaagcaccgtctgggtgtgtgttccattgtgggtctctccggcattaggggttagggcttgcataggaaaagtggctcagtgttcatgtgtkgggttctgccagccactgggccactgccaggaagcccgactctgcatccaggtgatgccaacacatcctgctcagcccagtaagaatccagttcctcaggccccatagtagtcctcagagcagtggcaccagctgcatccgggagtttgttggaaacgcagcatcccgcgccccacccgacctgcgaggtcagagtctctgttttcacaggaccccagacgaggtgcgcacattaaagctggaaagccctggtccgggagcggactcctggccttgttgctgagatgcacggctgtcgcgcagggcatggagctttcctggagcctgaggttggcactgccccttctcctgcccctgagatgctactgctagaaggggaaggtggcgggcaagggggtgaagtcggccagggcacccaggaggcagaggccaaacctaagctgggagccgtgtgttgccaggaccccagtggccgccgctgagctccttttttggttctgaccaggagaaggaaacggggcccactctcctaagaaggcttccttggcctgctccaaacccaagagggtccccagtccctcaggcgaggatgctgtggcccacactcgcctcgacacgctgccttcccagggaccacatccgtactggccaaggcacagtctcgcatgagactggtggccccagagcaaaacgctttctaagacagtgtccaagaagaagctcaaggccttcctcgaaacactggccttatgcgacaatcccaccctcaccagaccccgtttcagatactttgtgtgggaggcaggcctgcgccccctgccctaccacaggtctttggaccagcacgaagctccatctgctgctggcacacctggcagccatttcagaggagccatggactggctggggtgtccctctgtcggggatctgtccaggctgtgacacccaccagctccccactctgagaagagctttccctacaaaacacccacacacgcatacagtgtgattaaagtaaaatgcaattcatgtaaatatctccatcaaggaatcatacagggaagacccaagtggccatggggaacagactgggtgttagttttttaaatacagaggcataaataactgtacacaaggcagttaaatacacagtggtgcgatagcacctcctggtggtcacttgaagtggtgcactcagcagcaagttccatctttcacccacttgccaggcctggcatttaagattttgtctccaagggaccagggaggccccagtttgagagaggaggctccgatcaatccagggtgctacttgttaggaggtcaagtaaagggcttgatggggagcaacgttgaggaaataagacttgaggctgggggatatcactttcctccatctccccaggccctgtgacctcagataatgcagagctggctccatccttaagttctgtgccggcagctttaacccctcctgtaggccctcagagcgctgacatctccaggctgctgggctgcaccgccaccctgtccttcttcgcctcgtaaggaaatacagcaccaaagatatcttcgtgatagcgcttctggctcttttaggtaaaaacagagagcaacgtgtcaagtccaggctgggatgagcccctggggttgcccagcttccctatcacatggaccttcatgagccatctgtcttcccaactgttatacttagattgtgcttgaatctggtttagaccctaaccctgctcagcacctgctctggtgcgggccctctaaccatctccaaagctttacttagcatacccatttcctgcccagcgttcatcccccacccaagatactccaggaagtgtgagctctgagataaatatgtttgggaaatgctacgtcctttctttccttccagccttgaagggtcctgatgaacagcagcatactgaaggctcccagaagtcttgtagtaaagcaacgtgtttgccttgccttaactaagcatgtcccaggctattcgaccttggaatctttttgatgccaactgtctaccgacccactgaacacatttggggaaatgcctgttatctcctcactgttcttcaaacacgccagcttaactcccacccccggggcctttgtacctgctgcccctccagaacagcccagagtgtttccttcagtatccacagggctcctcctcaccatctcaggtttattctcagatgccaccttccagctctgccttccctggccaccctatttaaaattacactccccagcgttccctgggctgtttcctgctgtttttctctgaagcactacacctctttcttgtctgggtttgtcagccccagtagaatgtaaagaatttttgcctgattcatttactgctctatccctagcacatagtaggtgctcaataaatgttcagttgaacgtatgaatgtgtcttagggagagtatggaagtgacaatcacaggctttggaaccagagagaggcagactgaactctaggctctcacatttactgctgtggtccccgtaggcccccttccctctgtaaaagggggtgcctccctcataaagtcctcggcaggactgaatgaaatgtcacatgagaatccttggcaagcagtatgcccagtgtaagcccttgataaatatcactattatcttcatcaataaaatgcaagcccttcctgctggggggatgagggtgagcagacaccagcctgggtgtaaataagaagtgtgaggttcacacgaggctgacggggggcagccttgctctcccctgtgttcacagccttgctttggccacacagatactttctgaaaggggggtttggggagaggccagggagactctcctgcccccattctacagatggaaaaatggaacacattcacccgacttctcaaagctgccaactggtccaggatgtgcagtagggccatctgacagcccacccagctcagatctcagccactgctaagattctcttggggtccagaacctttctgggcctgattcccctgggtctacctgccacccctggtcctggctccaacggcctgtgcccttggccggcaccttcagcccacacacccactactataccttgagctgaaagaaatagtcctcgacctgctcctcattcaatttcagcttggcagccaccagctgcttcagggtgtgggccacgtcccgggccatgcgcacatccccgcaaacatagaggtggcctggctccttgtggagcacacggagcacctcgctggccagctgctgccgcaggatgtcctgaacatagacctgaaaccagaggaaacagtgggttcagtcctcagctgctcaggacaaggcttgcaggcaggcctgctggcctcaaggaggcggggagaggggcactaaggggtgaggagtgagtccccttccagccaggaccttgcaaggggccaggctcaggatgaggtgcatggatgcccctggggctcggctgggattagagagataaatgctggacacagtcctgccctcgaggggctgaccatccagtggggatcccagactgtctctgaatttgccatgcttcaaaaaggcatcaatgaaggcagtccccctgcccagggctctgcctacaccccagaaaagggagcctctcaatgcagtctacccattaggtctctgcagggtatggatcccgggctccccagatacaaggtccaggagtcagtcagggactctctgctcctgctccacacaggatgcccagtggccccagcactgggcacagagcactgggcccaagaggtgccctgatgggacaaatgtgtgaaggccgagagtctattctgacaccccaggctcagggggtaacgcggccctggggacagaagagcccctctgatggccgtggtggaagcatcggccgccctccagccttgcaaggcttgagcgtagccagcctggaccacctctccccgggcagtcgcgtgtcccagggggcctgctggggaccttcagcaggctgggctctggggttaacccgcgtgtgacctaggttagtcctgaacctctccaggtctgtcgcttctgctgtatgagagggtgtaatgctcttcacagcatcactctgatggttgtgaattaccagcattttcgagctcaggaggtgaaggctcggggaggcgaggggcctgtggggacccagggctcacagtggagcttgtgtgtgtaatgcttcacctgctttgaggctgcatttaccttgggcttgccaggcaggcgggaataggctgtgtgcaccgcatgcagcacccccttctgggccatctccagcatctcctcctggtagatgtggtcctcatctgggcggcggcacccaaacaccaaggtcatgcggcctccccgcactcctgcaggagtcccgggctgttgttaccatgttggccaccagagggcgccagggctccaagcccaactggaattctcacttcactcccactagctatttaatagcattatccccactttacagatgaggaaactgaggcccagcgcattcagatcactcatccatagtcacagaactgaaagtgcggatgcagaattccctcagccaatcggagatcaaaagcagggactttcctgttacctccactcccaggagagggagccctggctactatgcgggagacggaaaggcagccattctaacccgcagaggcccgcacagggaagcaaacttgggaggccttccctcgagagaggtcaggaaccgtttgtggggctgcagttctgctcctaggcaggcgctggccccctggtgcccctcccacctgggaagcctccagccttacccttgtgctgggagtcatggagccgttgctgccagaaactgcggaagggcgcgatgcctgtgccaggcccgatgaggatgcaaggatgggagggatcctcggggaggtggaagccgctggcactgaagaggacaggagaagagggggccagtcctcagacaccccaggcccacgcacacacaggatggctggggagctgggcctgtgggaggcggtcgtgagggggtggagaggacaagaagctcctatttgatttcccacgtcctgcaggctgcttcacttctgtccaggcaccagcacctcccccaggtccttctgaaaaagggccaagctcactggactcttgagacccacctgtcatcgctgtccctgctacaggcagccacaccagtgtgaccccagtgccttctttatgggccaaggggctccgagcgtctcctaaaccccagatccctccctttcctcccggaactcccaggggtcggcggccccacaggggacagagtggaaggggtgcttacttccgcacaaagcagggcactgggtcttggggcttcaggctgttgagccatgtgctgcagacgccgtggtgcaggggaccctggccatctgcaacgataccacaaagtgaccaacgtccccccactgcccatgcgcaaactgtaccagctgctccgcccacaccacggcctccttggacgcccccactcaggcactctcaggactcaatgagcagctgtttgtcctcctggttctgagatccaccctctgtaagcgcggagctgaggaacgttgaaagggacttagagaggctgcaagttgctccttctgcccaagcagaaactgagacggggagaggaaaagtgacttgaaaaaggtcactcaggtcgtggtggaatcaggtggacagctcagcttccctgactcctactccagtgctccttccaaagactttctccgggaacactcccagctcaccactgagctccactgacagcagcatgaagtggcccctcagggtggctactgctgtgcgtgctcatgagcgtggcccttgctggtagcaaccctgggtggtggatgagctccgcgcatttcagcctgctctggcaccttgctttcctcctcagtgggccctcctgggcttgtagaaacccaggaggtctctctgggttgtgttccctttacaatggcccagcacttgaagaaggcctccaaccaactgcagaggtccccctggtt

SEQ ID NO: 5714 - DNA, 14785 bp, Homo sapiens
  misc_feature (1)...(14785): n = A,T,C or G, or insertion/deletion polymorphism (see Tables 1-2)
gaatacaacaatctagtaactctggataccatattctttccactccccagagtttcttgttgccacttgaggatggagttgtttcttagtgacttttctaaactattgttaagctgttctatgtcatgtgtggtcactaaaatctattctgttagcttcatggtcagctagtgatttgacagaggtttccttaaacagctggagccaaaaaaataaataattaatgccctcccaggttttgcagatggactctgagttgggacacttcttcaacacttaaccaggcagtttagacgtccaccttaaccttcactggctgcttacttggaggctaaagatcacccagaggtaaaagcctaaggtcatctcaggtctttttaaagagtgtgggcatccagggctaaatatccagtgtttagccctggccatgtatgtgacattctgatttcctcagtatatgcgggatattttgaaagccatattgccttatgtatctccatctccagcctctacctccctaggcttttcagtctgtctgctgttaacccatccatcattccatgccccaggcatctgtgactagtatttgcctttaaatgcttttgacaaacattgctatggagacctctccaatcttaataaagttccaagaggagtgaagcaaagaccagcctctaagctgatctttttgggggctatcatacatgtcaaaggacacaaacacaattctttgaaaagaaagttcattttgccttttctggcatcaggaaactacaccaggaatgtgggacaccgtccccatggctgcctcatagctgagggtgtgggggtgggagtgagtaggtggctaaggaatagtggcacatgctctcctaccaaaatctagagctcctttttcattaagcactactttggttgttgtaaaaaaaaaaaaaaaattcatagactccagagtacagaaaaacttaattttgatagtttttttccaggttaatagttgctttagttggggaatgtgttgttggagttctctaccatttttggtgaaggcattacagttgtcttttaataagattttaaaattatgaaaaaatcttatgtatctacccatgtgcttaccatttctggtgctcttcattacatatttgcttttggtataattttctttttgcctgaaggactgaaacacttattacagttcgtgtctgctggttatgtattttttcactccctataagtctaaaatccctttttttatagatatctttagagtctgttaagtagcttgatgcaatcattacacatggtatacatatatcagtacatcacacagtacctcatgaatgtattattatatgtcaattaaaattatacatatatatatgtttttaaaaggttttttttctggaaatagaatctagtttgacagcagttgtctttcagaactttagcgatgttggtcatctgtccctcatttgcattgtttccaatgaaataactgctgtcatctttattattcttcttatgtgttgtgttttgtgtttttcatttttgctttctgctttttcaattttctctccttctctggttttgaacaaatacatgttactctcactcacaactataaagcgaacttaggaaacaatctatagggagagtttgttgatgattggttatacattttcagaaacagttgtttattccttcctttacaaaggctaatttccttagaatattattgtattgaagaatgtcataaataattttatttgtcacctggacctggtgccaagatacgtggtcaagcattattctggatgatctttttaggatgtttcttggatatgattaacatataaattgctatactttgagtaaagtagattgacctctataatgtggacaggcttcattcaattcattgaaggtgtaaattgaatgaaacactgaccttccccaagcaagatggaattctgtcctgggatttgaactgcagtatcagtcacctgacccataaagagctggttggtttgtgtacagcatttgcaagatgaatggacaacaccctgtttggaagtctacccctttgatcaaagaagataaaaacagaacagctcttgtgggctgaattgcagggtgttttcttagcagtgatggaagaattgaacaatgataaaagctcctatgttttagttttactgacttatgggcagtgactgatggcctggccatataattaattaagaaagcagtggaaaactggcctatgaaaagaatgcccatatgagacacagtcctatggaaatcactatggtaatttgaggggtgcattaacgtaagacatgttgatgcctgatatagattggatgttgtccccacccaaatctcatgtcgagatgtaattcccagtgttggagttggggtctggtgggaggtgactcaatcatggggtggtttctcatgaatggtttagtaccatcccctcagtgctgttcaatacccatcagaataactcccttccaggtttggaaggtgattgaaatcaacaagcatttatctctaagtgcttgccaggtgcacctgtagtcccagctatgagagtgtctgaggcagaaggatatcttgagtacaggcatttgggtttagcctgagaaatatttgagtctagcctgggaaacatatcaagaccacatctcaaaaaaatttacatttgcttgtgaagatcaccggggtctacgaaataagtagacactgaggctgtagcaatgcagagatgggctgaatcaagacatactccccttgcatcccccacctctaataagcacaaaatactcagtaaaactgttctttttaacaagactgggcacagtggctcacacctgtaatcccagcactttggcaggccaaggtgggtagatcacttgagatcaggagtttgagaccagcctggccaacatggcgaaaccctgtctcaactaaaactacatcaattagccaggcatggtggtgcacgcctgtaattccagctactcaggaaactgaggcaggacaatggcttgaacctgggaggcagaggctgcagtgagccgagatggcgccactatactgcacccagggcaacagagcaagactgtgtctcaaaagaagaaaaaaaaagaagtattctctttaacaagaaaagagacagagacagagaccaaaaaaaaaaaaaaaaaaacgtgaatgggaggtattgccaccatgtggaccactgagccacattacactaggaaacacacttgcccagaatgtccaacaatggtcagagaaatttgttcctcagaagaagagtttcagagagaattaaaatagtcatttgaaacattgagtgtataaatcaggagcggggagacataagcatgaagggcgggcctatacaccttcatgagtgtgctcgctcttgacatgagtgtggacaaaggaatgtccccactagagagtgtcctctttttccctgctggatcagggaaaggtgctggtgtgattctacatacaattcttccctaaaaaataaataaataaataaataaataaataaataaaaacaatccttcccaaggccagaagacactagaattatgactatactttacctcaacttgcttttctcatacctgatgcagtggtctcaggactagggatgcaaataaaagtccaggcacaggaattattcctgagcaagaaaccgttaacatatttaaaaaccattatgcaagactgcctaagggcctggagtagatgtgccttcactgcatctggcaaagttggagctaacattgaatgcagctgtattgcctggaagccagatagccaaccagttctctgcctgaataaccctaacctctatgaactggaatggactgatgggagacactcgctgttactagcatggtatagctccctgcataggccagcacagcaggaaaacctaatgtcccttccaaaatgagaaatatttggtataaatgcagaagaggaagaatagtagctgaggtgaaatgaatgaataaatggggtatgtaatgaggaaaatccaatataacatgatctcctcaaaagaggtataaacgaatgatgatattgtcttttatctcatttttaccagatgtctgaaaggttgaagccatatgttgctgagaccattgctatttttggactgcaatgggcgaattgataatgactaaacaggactctggtaatgggccagtatctttttactgctatgattcttctgctataggagatctgtggttggccaagcaaaggggctcacatttataatttcaccactttgagaggccatggtgggaagattgcttttgaggccaacagttgcagaacagcctggggcacataatgagactgcatttctacaaaatatttaaaaattagtcagccatggtggtgtgcacctatagtgccagctgctcaggagacttgaggcggaaggatcacttgagtccaagaatttgaggttacagtgagctatgattgtgccactgcattctaccctgggcaacagagcaagacattgtctctaaaataaaataataaataaataaatagaaattataagaagaaataatgtggttaaagaccaggaagtgatctgtgatccaataaatatatttggtctttgcccctagtccctgacaggcaggtcctaaaacgcttgcagtccctcagtgataagcatgattttaatatggcaatgagatgactatggggtgaggggctcctagatagtttcaggatggaggctgcttgccagaaacaccagctgtgattagaggattggaactttcactgccatccccatcctctggggaagaaaagggggctggaagttgagctcagtcatcaatggccaatgatttcaccaatcttgcctacacaatgaaacttccatagacacctctagacagtgagttttggagaacttcccagttggtgagcacatccgcatgtccacgtgctgggaggacggcacacctcatctccatagagacagaggcttctgcgcttatatctttctgtaaggcagacacccttgtttctaggagggacctagggtggactgtggattctttctctggggcaaataaaaatgtagaatcagaaaattcaggcactttgcactcctcatgggacactccagcagcactcacgtgaccatcctgagaatggacaggacacctgaggtggggaagggagcacagaacccagacaccagcctggacacaggcacctgggataatctcctattccttggaaagttccagtatctgagggaggaacagtgacttctggtcctgacctgagtggagaccgagggactcagaagagctggaatcagacccccacacacactgagtatgagtcagagaacaaggcctgagagaaaaagtcacagtgcccaagactgctgcaggggtcaaaggggactgctgatcagtgttccagggatttgctccagattaatctgagtcatggaaaaactgcctttcttttgtttctaaacaaatacctgcaaagacaaaagaccacataaatccccaggtgcacaactttttcagatttaaagaaaaaacaacccccgtctttccctccattcccaggagaagctcactctgtggcatcaagctgcctgggtgagctctcttctagaagagtccagggggacaggcaaggaatgggaggcaggaagtccagttcagggagggggattctgggatgaaaagtgaagggagagggactgagcccatgctgagggtttttctctggtttctcagacagctccggggccaagattcggggagacattgagacagagcgtttgatataaaagaagggggtaagagccaagtcccagggcccggagcttggctctctgggcttcaggccccgagggcggtgcctgggatgggccggctcagctttggggtttcccgagctccgctctctctcttccacctttcccaacctgtgtcaggtccttttacctggatactcatgatgcggcctcagttctcacttccattgggtgttgggttcctagatcagccaatcagtgtcgccgcggttcctggttctaaagtcctcgccggcccaccgggactcagattctccccagacgccaaggttgcgggtcatggagtcccgaaccstcctcctgctgttctcgggagccgtggccctgatccagacctgggcaggtgagtrcggggtcgggagggaaaargcctctgcgggaaggagcgaggggcccgcccggaggagtaaatctgcacatatatttaattacagattacaattacaatcaaggcagaaatgatctcatttttacattacaactctggaaaaggcaatagactgagatgcaagtgtgcccccaagtgatgggcagaaggagagaaggtgttttggatgcattctagaacacaggtaatctaaggagagttgatcaaggccgtggaagagtcctccagccactattggccatcaaaggagtcctctgtgtcccaggaatggtcctgctttggtgtccctggtgtgacccatyacccgctgggaacagcctgagagaagtagggcctctgcaccaatgctgctgaggatgtcagagcacaggaacgaggccttgggaaattacctggaaatgcgactgaaatcttccttcctgaggggtctgggctcttggaaatcaaaccctctcaggttgggtggctggacgattctcctcacacttacaatgggacaaggggaaccaggaggcccccaaggggatccctgggttccacacgaactcctcctaccctcattgtgtgacagcagccatgcctcctcctgkggatcaggatctattacctgtgcctggagagraggggactcctcttctcacccgctggtctctggacacatactgtccaattcccctgkggcagctgtaatgtgtagttcaatgggcactcrtttgtcyccttttaagggtaccctcctttagaatccaggaccttctaccctgcagagtgtkgttttgggagagaagtgcaaaatcccacgacaggtgagttgaaggaatgggatatggagccacatccacttccaccccttggtatctggacccacgtgttcttcctactgagattacagaactgtagagatrtctttgatttttaaaatgcaccatgtcctgaaagatggcaccctcccacccgcagagtgcttcctgcaagctggcgttgagctgtgcctatagaagctcttttcaacattctttatggycagsagcccttggttggtgcagatggtgataggaccagtgggtcccacagcatggccacactgcacctccttcgctgtcaagtgggtcccccacgaagatactgcacggagagcagtgccaagcctgtggatcaggaatatcaacagcccccagagagtggtgctggctgagggtctgagagcaggacaggaaaacccacctatggaataggtgcctatccctgtgaagatgaacctctggcccttccaggatggaaggagtgcaatgtagtcaactcctcacttagggtctggttggtcacctaaagaaatagagccctaccagggaagatcattgggttcaaatgctgatgagtaggacatttagaggtggcagtgtctggatctaccttggtaggagggagtcagtactgttggacccataggtagcctcatccctgccactgtgtttgctccatttatgtacccatcctacccggcctgggctgacccatggggaaggctggctaatttcagtgcttstgcttggttgttcagggccatttcaggtttgggtgttttctggggatgttaacatgggattcaggctcaactcacaagaaacttttccatctcatgatggatgctgttgggcatgtccaatgtatgacttcatgagttayacagatgctaattcktaggggcacttggaatcacatggttgttttgtgtcccatggtcaagcattctatcttaycagggcctacagtaacatgccaaaagttgcttccaacatatttctctgctttggatggggcatatttctgtgctgtggatgacatggccttactccagaatcccaggccctccactgtgactctcctactggtgcttggttcagctccaccccaaatcttaccccaccactggcactttcagcaccagggggtctgaaggatggtgactgcrccatggcctggatctgctgcagtgtcctttcctgtggaggctccactcaaagctggcatcctcctatgtcacctagagtgtgggtcaaagcaatacacctacatgtagaatgtgatgtcagaactcaaacaggctcaccaggcagtgtgcttccttccttgcatgaggatgcaagatgcaacagtttgtctttcacattggaagggacacccctggatgcccctaaccactagacctgtaaaacttcactgcagtggccacttctgaatctctgtaaggtttatttatcttcaccctctggagagaagatgttttaccaaagcctctagtgtaccttcctcctcttactcatccatcccagtcaacatgatgttgtcaatgaaataaaggaatttaatattctatagtatatccaggttctccagatctcttaagactgtactatagaggcctggggaattataatagccctgaggcaaactatgaattaaagtgttgtggatcccacatgaatcactttatatccacttttgtgtgtgtgtgtgtgaggcagagtcttactctgtcacccaggctggattacaggtgcacaccaccatgcctggctaatgttttgtttttggttttggttttgtttttgttttgtttttggacagagtttcactctttttgcccaggctggagtgcgatggcatgatctcagctcaccgcaatgtccgcctcccaggttcaagttattctccttcctcagtctcccaagtagctgagattagaggcatgtgccaccacgcccggctaatttggtatttttagtagagagaggttttctccatgttggtcaggctggtctcgaactcccagcctcaggtgatccgccctcctctgcctcccaaagtgctgggattacaggcatgagccaccacacccgggctatatccacttctaattggaatggaagggaatgcactcaccacatccacagctgcacactgtgtgcctgaggccttattaatctgctctaccagatatatccagccagcatgctagctgcaatcaggactcctacttggtcacatctggagtaatcccattcattccttagtaatcccattcattccttaggctccatcaggcttatttgctaaattacatggagataataggcaaccccaacaccaccccacatcctccagctctctaatggtggtgctacccccacagcacttgcagtgccttccacaagattcaccctgggacatacgatcatttttgatttggccagaatggaggcagtttcagaggtttccctttggccttcagcacaatgagagcccttactccacagactagggatgcagtgtgggggtgactccagctgccagggcatcagtgtcaattatgcactaggagaatggggagataaccagggctgggtctgtggactcagtgaccccatggtgagccgtgatgtgtccaggtttatttcgtggtctccgtaatccccaatgtgagggggtcatgatgatgctgtgggcctctgggcatcaatgtcatctcacacccaaagtcagtactcccccaagttctccctatttccctttcccagggtacagtctctaaagtaaatggctgtaggtccctttgcacaatggctcagggaattgacccagcatacacttgccacagggttgcagggtccttcctcctaggaatatggacacctcctccgtcactgggttctgaatctgaagcttggctgagatctaggcactgagaatggatcatgattttgtattggttcaaacaccctcagcctcctgctcctcaattcttgctttcttatcatagataccaagcagtgctcttgctggctgcccttctgttctgaccctggaacaccaccctctattaaccttacccacaactgcaggcaggtcaagccccctcggctgctcctctggggttgccatggtaaccgtgtcctctggcttttgcaggtcactgccaccacttgttctctatctcttcagggccacaccctctccgtggatattaatgagcccaactctgggacatcttttcctaccatcaccctcagccttcagagaacaatacaatgaaacttcttagtgatgcaggtccctgttgccagcacgttcctgaggctctggtggaaggtgggccccctgggtcctcttataaagcacggttccggtgggctttccggcctcacgtaatgtctccatcccacaggccaaattcccccagcctcattattccctcttctacatgttccggggcaactaagtcaggtctagcttgtgagataccggcatcattttttcccagtctacatggatcaccccagcagtgggtttgccccatgccctggggtctttgaaaaacccatgtgatacggttggctgtgtccccaaccaaatctcgtcttgaatttccacgtgttgtgggagggaccaggagggaagcaattaaatcatgggggcaggtctttcccatgctgttctcatgatagtgaataagtctcatgagatctgatggttttaaaaggagaaatccctttcgcttggttctcattcttctcttatctgctgccacgtgagacatggctttcaccttctgccgtgattctgaggcctccctagccacatggaactgtgagtccattaaacctcttttggtaaattgcccattctggggtatgtctttatcagcaacatgaaatggactaatacatcatgccttgagaaagtgttcccaagtcaaaggatttttatctatctagcttgaaattctgtccctttgatcaaatgccctcaaattccaatcccagaagtgttccccaggatcctatgtggacatgccagctagttcctgcaaagctcctgagtggaattcccgctgcattataagggtgaggcttctgcagcatcttccagcgtaggaagtgggaaccattactggaaaaggcgagccttctctgcatgcccagagggtactggagggcacccatctgataatgctgtcctagtttgcagaatctcatgtttccccaccagggccctgattttccacaacaggcctgccttggctgaatgtcaaacatctctggaggtctgtaaccctcacaatgatatcttcagctaccattccacactatctaccctttcgctacaggaaataagggcctctccatgagacactgcagaggcctcacacgtagccagtgacagctgttagaatccctcagattctcattctccttttatagggcatcaacacagctgagcagtaaccagccagcttccctgttgtaggttttccctcccaccctgtcattattgtgtagaggcttctatcacaccacctgccatagcacccgggaaccagggcatcttctcaggtccgtgctggggatatccacagcagctcagctgcaccttgtgccatggactttctctgtccccaaccaacgtggatggcattctcggcctgccaggcagtgggcaagctcagccccaatccccgtttttgtctgtgtctatggaccactcctgaagccacttgtgttggttagcatcccctgaggagcagactgcaatacagaattaaatgtgccaggatttattaggggaaatagccatgaaagaaattggggagcaagacagaaaagactgggaaagccataagactgtgacgcaagtggcttttttatttttattttttgagcaatctcagctcactgcaacctccacctcccaggtgcaagtgattctcatgcctcagcctcccaagtagctgggattacatgcatgcaccaccaaacctggcaaatttttgtctttgtagtagaggcgggttttcaccatgttagctaggccggtctcaaactcctgacctcatgtgatctgcccaccttggcctcccaaagtgctgggattacaggcgtgagccactgtgcccaaccagactgcaatgcaagtttaaaccccagtgaaggagagagggaaggaagtttggctgaaagtatcctagacccagtgcaggttaagagaagttcagtaagggtgagccctggagcctcagtgggcctttaaaggagggacaatcctgtctttgtttctcctcttctctcaattattgaatcgaagaagccaatggcaagtatggtctgagagcaaacgtagcaatagatttcaggcggcaacagctggagcatcatcagttgtgcttcctctagctgaggggctgggatgtgcattctcaagactgccacaacaatccagtggggagaaaggacaaagggtaatgatcaaagagaaaaaaaggtatgaactgatgaactgatacctttaagtagatgagaaggatgatgtttgggacaccagtagagggactggctctggctgggagcgggaaggttaacccacaacaaccatccatgtggtagaagacccagcatgcagtgcagctgcaaatgcatgagcagatggaatctgtgaaattgtcttctagtgtgttcagttttctcagtgaagtaggaagcaaggtcatcagctgaagtaagaatgcagatagaaggttggatgtgtgagcagagagaaggtgtgtgagagtcacccagaccagtaggaggctgagggtgagccatgcttggagagggtgattgctggtcgtggtggggggtccccatgaggtttgggtcatgaagttagagagagaagtcagcatgctgtgtgctgctttccagcctccttcagctcatgggggcaggtgcagtgtaggcagaggtggattccaccagctgtgtagttttgccaaacaagtatggcaacgcaagggaggggcaagggagggatggaaattatttacaatagaattcaaaatggctgaagagggaggagaggacatcaagggtgagggacagtgagtagatggcaggatcactggattgggaatcccagagtgggtggaaggattgttggaattgatgtactacagggcagactccaagcctggaaagcaggcacataggcaatgagtggttcactgatattacgtcacagcatatgataaaatgatagtataagtatcctcagagcctgtggcctccgtgcaaggggatgagtggaaagatggtcagagaatggaaagtgtgagatagagagtatggaagggctggggttcttggccatgatgagacctaggactctttaggggagaacaacaacaaagcaacaggatcctggtgtcagggacagaccatggccatggcgggatgatagcagctctcctacgaaataatgcttatatgacaagggcatgagattcaggcagagagaggagaaggtcatggaggagaggagtcccagcatctgagaagccagagggcgatgcatcctctctgctctatgggtgtttattgctgccataaaaattaacacaaaacaagtggctttaaacagcatctctttatcatgtcacagtcatgtgtgttacaatttcaacagtctcatggggctaaaatcaaggtaaggggaggtctgtgttccttctgactctgaggaaaaatctactgtcaagctcattcaggttcttgtctgaattcacttccttgcagataggactgagatccccacttccttgctggctcctgtccaggggccacccttagctcctagagccctctctcagttcctcatacatatcccatgcaacatnnnnnnnnnnnnnnnnnnnnnnnnnnnnnnnnnnnnnnnnnnnnnnnnnnnnnnnnnnnnnnnnnnnnnnnnnnnnnnnnnnnnnnnnnnnnnnnnnnnnnnnnnnnnnnnnnnnnnnnnnnnnnnnnnnnnnnnnnnnnnnnnnnnnnnnnnnnnnnnnnnnnnnnnnnnnnnnnnnnnnnnnnnnnnnnnnnnnnnnnnnnnnnnnnnnnnnnnnnnnnnnnnnnnnnnnnnnnnnnnnnnnnnnnnnnnnnnnnnnnnnnnnnnnnnnnnnnnnnnnnnnnnnnnnnnnnnnnnnnnnnnnnnnnnnnnnnnnnnnnnnnnnnnnnnnnnnnnnnnnnnnnnnnnnnnnnnnnnnnnnnnnnnnnnnnnnnnnnnnnnnnnnnnnnnnnnnnnnnnnnnnnnnnnnnnnnnnnnnnnnnnnnnnnnnnnnnnnnnnnnnnnnnnnnnnnnnnnnnnnnnnnnnnnnnnnnnnnnnnnnnnnnnnnnnnnnnnnnnnnnnnnnnnnnnnnnnnnnnnnnnnnnnnnnnnnnnnnnnnnnnnnnnnnnnnnnnnnnnnnnnnnnnnnnnnnnnnnnnnnnnnnnnnnnnnnnnnnnnnnnnnnnnnnnnnnnnnnnnnnnnnnnnnnnnnnnnnnnnnnnnnnnnnnnnnnnnnnnnnnnnnnnnnnnnnnnnnnnnnnnnnnnnnnnnnnnnnnnnnnnnnnnnnnnnnnnnnnnnnnnnnnnnnnnnnnnnnnnnnnnnnnnnnnnnnnnnnnnnnnnnnnnnnnnnnnnnnn

SEQ ID NO: 5715 - DNA, 16105 bp, Homo sapiens
atatcagagagaatatgcaagagatgcagggcactgcagagagatggggaaagcagggcaaagtgaggctaagatggaacaagcactgacactaaatgacactccctatttgcacactgttctgaatgcctcatttaagtctccctactttgctctggtttgttttgggggcttttgtttcttttttctttcctttttttttttttttttgagacagagtctcgctctgtcacccaggctggagtgcagtggtgcgatcttggctcactgcaacctccgcctccctggttcacgtgattctcctgcctcagcctcctgagtagctgggactacaggcgtgcgccaccacgcccggctaattttttgtatttttagtagaaacaagagtttcaccctgttagccaggatggtctcaatctcctgaccttgtgatccgcccacctcagcctcccaaagtgctggaattagaggcgtgagccaccggcaaccgcacctaccctgtttatttcttttatagccagggtctccctcttgttgcccaggctggagtgcaatggcacaattcaaggctcactgcaaccttgaacttctgggttcaactgatcctcctgcttctgcttcagatcaccaaatagctgggactacagtcaccgtgcctggctaacttttttttttttaatctttagtagagacagggtcttgcaatgttgcctaggctggtcttgaactcctgacctaaagcgatcctcccacctcatccccccaaagcactgggattacaggcatgagccaccacacctggccacaaagcagtattaccacatttttacagatgagcaaactgaggctcagagaggtgaagtgagttgcccaagatcacacagaaacaggcagagctggtatctaaattcagactctgaggctacagacactgcacttctttttcttcttcttcctcttcttttttttttttcctttttttagagacaagctctcactctgtctctcaggctgggatgcaatggcataatcacatctcactgcagtttcagcctcccaggctcaagcgatcctcccaccttagcctcctgagtagctgggactacagggtgcaccacaaccacacctggctaatttacttttatttttattttttgagacagagtcttgctctgtcacccaggctggagtgcagtggctcgatctcagctcactgcaacctccacctcctgggttcaagcaattttcgtgcctcagcctcccgagcagctgggattacaggcgcccgctaccacacccagctaattttttttttttttttttttttagtagagacagggtttcaccatgttggccaggctggtcttgaactcttggcctcaggtgatctgcctacctcagcttcccaaagtgctgggattacaggcataagccactgcactcagccactaatttttttatttttattttttgtagaggcagtctcactatattgcccaggctggtctcgaactcctgacctcaagtgatcctccagcctcagcctcccaaagttctggacaacctgtgcacactaccatgccctactcagacactgcacttctaactactaccttttaattcacaagtcagagaccaagaaagaggcagacacccttaaatacagagaaaagcagagaaataccgacactaagaaatgggaggcaggggaattgagagagaaaatggaaagaaacagagaaatgaccagagaaagacagatgagcaatgacaatgggagttctgaggactgaggctctctccctcaatcccgagcccctcttttctttttctttctttttttttctttttttttttggagggttggggggacagagtctcactctgttgcccaggctggagtgcagtggcatgatctcagctcactgcaacctccaccttcagcgctcaagtgattctcgtgcctcagcctccctagagtagctgggattacaggcatgcaccaccatgcccggctaatttttgtatttttagtagagatggggtttcaccatgttggccaggcttgtcttgaactactggcctcaagtgatctgcccacctcagcctcccaaagtgctgggattacaggcatgaaccactgcactcggccctcccaccctctcactgaaattctctgaaattctcccctttgggatgaggatggcaaccccaggcatgtaccctcccaacctgggacccgacctaataccctaacatcctgctgacagtggctgttctcgctgggcaggcgtcccaaagcacatcgagccagattcaggcagagtggaactggcccctcagccatcagtggaggtggcctgggaggctctaccctgaacggggtctccccaaagtgatgcagaaactgggacatgctctgctgagcatggggctgactggagtgaggcttataggcagtgcccacatggggattaagatgtcagctctttaatccccacactgttcccatcacaggctgaccagagtctgccccaggacccagccagggacacagaggtcgggggagagagggagaagagagggagagacagagagactcagaggtcctgagaaagacaggcagagagagatgatggagaaaaacacgtgaagacactgagaagagatggagaggaaaaggaagagacagatacgcagggatggcaaagagatcctggaaaacagagaccgggaggagaaagagagccactgagaaaagggaaagacagtgatgtccagagagaggaaagacaaagagaccctaaagcaaagataaataaagagaacagaaatgaagagagatagagagacctgagagaaaaagaaaaagggaggaaaagaaagagagaaacagagaaatccagtctaattacaaagagatagaaacaccaaggcgggaggatcacttgagcccaggagttcgagaccagcctgggcaacatagtgagacctggtctctataaatatttttaaaattagctaggcatggtggcacgcacctctagtcccagctacttgggaggctcaggtgggaggatcacttgagcccaggcagtcatggctgcagtgagctgtgatggtgccactgcactccagcctgggcgacagaacaagacagacagaagggaagggaagagaagaagaaagggaaaagaggggaggggagggaagaaagaggctgggcatggtggcttatgcctgtgatcctagcactttaggaggctgaggcaggaggactgcttgagaccaagagttgaagaccaacctggccaacctaacaagaccctgtctctataaaaaaaaaaaaaaaaaacaaagagaagtagcgaggaagaaaaattgggcattcattcaacaaacatttactaagtgcctactgctgtgctgggcactactttaagtgctgggatacagaagcgaacaagacaaaatccctgctctagaagagctgacattccagaggacagcccacccgagcaaaacggaggaagagtcaggagctggggagaaaccagaagccataataaacaggatccattaaagcctgtcacagagggtggggtagggctgggggaggatgcagcttactgtgccccaccacactcccgctgtcagtggagtcagcagctctgagcaggggtcctgccccacaacccctgtcagtcaccaggttccagaaaggctgacaggtaggaagacccaggataggggaggacagaatatggaggtacaagggggtaaacatgcggaaaggcacgctgaagaaataaggagaggcacagaagtgccaggctgagacaaagggaagcacagactaggggagatacagggaggggaagacacagacatactgaaaagagagacagaaaacagacacaaacagaggcagagactgagagaaaagagagagagatgggaagagacagaaagaggagagagagagatgaacacagaaacacagagactgagagtgagggaggctgggcgcgctggttcacaactatactcccagcagtttgggagaccaaggcagaaagattgcttgagcccaggagttggagaccagcctgggcaacacagtgacatcctgtctccttaaaaaatacaaaaattggccggacgtggtggtgtgtacctatggtcccagctacttgggaggccaaggtgggaggcttgtttgatcccaggaggttgaggctgcagtgagccatgatcgtaccactgcactccagcctgggggacagaagccaggctctgtctcaaaaaaaaaaaagaaaaaaggaagggagggagggagggagggagggagggagggagggagggagggacggacagagggagggagggagggagcaagcaagactgagagatgaaacaaagatacacagagaccctcccagagacaatgccagtcctaggctctgcacagtccaccccccgcccaccatctccccaggtctgggccctgtgccaggcacttggaggaaggctggatttggccaagcagggacaggcaggagggtggaccacattcctgaacagtctgttccaaatacagccccaacctcactgctcccaccaccgcagccctggcccatccaggccagagtctgccccctctagcccatgccctaggatgggggttgggggggatagatgagagaatgagggataagtttgtctgtcgtcatggcctggcctcagacagggacttgggggactggataccagggggttcagcagcatgggcacagaacatttgggggcatctgggagccagtgccttggggatagagatggtagattcagggcaggacataatatggaggtacaaggggatcaacatgcagaaaggcaccctgaagaactaaggagaggcacagaagtgccagactgatggacacccagaagccagggaaattgaaggcagatctggggaacaagcatagtacacagggtcctaagagtaatggaagtgacaagggctcaggtgtgagctcctaggaatcacaggcacagagcacaggaatgccaggggtgtctttagaagtgtatttgagccaggcgcagtggcctgtagtctcaacacctcgggaggccgaggcaggcggatcacctgaggtcagtagcttgagatctgcctggccaacacggtgaaactccgtctctactaaaaatacaaaaattagccaggcctagtggtgcatgcctgtaatcccagctactcaggaggctgaaacaggagaatcttgaacctgggaggtggaggttgcagtgagccgagatcccactgctgcactccagcctgggcaacaagagtgaaactctaagaagggaaaaaaaaaaaacagaagtggtgtatttgagagtcggtgtgtatttaggaatcagaggtacagggtacagcgttcaggggacccagaggtggcccggagattgaggaatacacacttacaggccaagtaaattggactcaaaggtgctaggggctcaggagggtgcacctgttgtccaggtgtgttgccatgaaaatgctggtgcacgaaagttgctaagtaagacaggctgaggcagacacacaaaaaaagccagggggagccagggcacagctccactagggctgggggcggggtggagacgtcgggttggggaatccacggaatgagcagcccggagacgcccactcctcccacatcgggtctccgccccgctccacccctaagaccccttggaaatcaaatagaggtgaaggggtgcaggcgtggagaattgcaggcatgtcgcgggtatcgctgcgctgctgttgtggcttctggtgctggcgccggcgtggtgggggtagggtgggtgccgcgctcagatgcgggggtccctacctccccggcccaggccgctcccattgctggggaacttgcagctgcagtccggaggcctggaccgcgcactccattcccgacaggaatgggggaacggaattctggattcgtgaaggtggggctggggactagaactcctcctgaatgaagacagctgagggtttgtactctatgatcctgaggaaggacaggaaggatgagtgctccggactgctgagtactaggaaaggagaatagggagtggagagcctggggccgggacactgggtcgtaacgaaggagcccagagcaggaaatcaggttgtgggaagaggggagcagggggtctgttctggttcagggtgggcaggctgagtactgagggcccaggagacgactctgagggtgcaggaggctgggaagctggacttccaggtcctaagggaagaaggaagtgggggcctggactcctggatctcagggaggaaggagctggggatttgaattcctgggcctgaggaatgagggtctgagacgaggactcctgggtctgaaggaagagggagctgggggcaatggctccgatgaggaaccctatgggcacccgctgagcaccggctacccgtagctctccggccgctggggccgggtgttcacagtgcggctgggcccgcgccctgcggtggggctgtgcggctacgcagcgctgcgggacgcgttagtgctacaggcggatgcggtctctggccgcgggtccatggcagtcttcgaacgcttcacacgcggaaacagtgaggccccggcgctggacttgccggyccggacgctccaggctgggcgggtaaatggtagaggcgggcaaatgggggcggggcctaatagagactccagctaatgaggtgcaaacggccgagagagggcggggcggcgctaaagcgtaaggttagaatggaggttcatcctgcagccaacaggagaaaagagcctaagagtcaaagcccgagagccagcctaggtcagggatgragcccagcaaaggcggggccaatgtgtggatagggcacttggaggtctggtaaagaagcaaagggaacgaagccggccgcaggagtcggaggcccctaaagggatgtagccagtgacccggcgcttcctggatagggcgtggccggctcccsggcccgcctcctttcccgtccccaccacaggaatcttgttttctaaccggccgtgctggtggacactgcgcaattttgcacttggagcgcttaagaagttcgggttggrtacgcggaccgtcgaggcgcgcgtcctggaggaggcggcttgtctgctagacgaatttcaagccaccattgcttcggcctggccgggagagcggaagggcctggtgtgggagagtcccttgcactgccaagacggggccactggaaggtatttgggtggaagaaagccagtaagcccatggggctggctgrgggcaggaccamgcgttatgaccaccgtcctgttcctacccccaggrgccccrtttgaccccgtgcggctactggrtaatgctgtatccartgttayctgttcttgtcttcgggaaccgctatcgctatggggacccggagttcctgaggctcctgaacctcttcagtgacaacttctgcatcattagttccagatggggcgaggtgagagggccggccacaatctttccttggtgcgtccagccttatgccaaatcccgagtacacagacctacctacaatggatcattagaatgggacagattcctggaagagttctagaacatccagtatcaaagtcctagtccaatctccctgtagggaaactaaggcctagtggccttgtgcagggcccatgttgagacagaccctgtctctccagatgtacatttgcctgtccctcatggactggctcccgggcccgcaycaccgaatcttccgaaacttttcggagctgcgggtcatctctgagcaaattcaacgacactggcagatgcggcagccagcggagccccgcgatttcattgattgcttgaccagatgggtaaggcatgggtcccagctctctaaactctatccatgccgcccaccaacaggtgcctggcacgcggcagcmcatctcctctgcccacagtaacagcaggacccggasagccatttccaggagtagacgtcggtaatgacgacgcattttttttttggcgtcaccgaaaccacgagcaccaccctgtgctaygggctcctcattctgcttaagtacctagaggtggcaggtgtgcaacccggagagacccagaatgggaggctgcagtctggggatggctggagggtcctggaagtgcgcagctcacagcctcccccggcctgagccaaggtgcaggagctggaccctgtggtagggtggaggcccgccccaagcctggactatcgcgtgtgcctgccctacgccaacgcagtgctgctcgagatccagtgcttcatcagcgtggtgcccctggggctgccgcgcaccctcaccctcgacacccacctgcacagccactgtctgcccaaaggtacccactgagtctggggatcccgtgcgggacscgggtgcatgagatcagccagaatcagcaggtktgcgctgtgcagaccaaaacacaatcagttacccctggagcaggaaggcasctctgccttcccttaggctttttgttgttgttgtttgagacggagtctggctctgtcattcaggctagaatgcagtggcatgatcttggctcactgcaacctccacttcctgggttcaagcgattgtcctgcctcagcctcctgagtacctggtattacaggcacccaccaccacgcctggctaatttttgtatttttagtagagacaggtttcgccatgttggccaggctggtctcgaacttctgacctcaagtgatctgtcctcagcctcccagagtgctgggattacaggcgtgagctacttgcccggcctattcccttgggcttttaaaaagcgtcttggatggaggtggtgcaggtgctcaccaagcccgcaggtaacccaagttgcatgtatccccagggcacttttgtgattcccctgcttgtgactgcacaccgggaccccactcaattcaaagacccagactgcttcaaccctaccaacttcctggacaagggcaagttccagggcaatgatgctttcatgccctttgcctcaggtgcaggcagaggaggaaggggaccagcctggactggctctggggtacctggtgctcactgtgcacctgtgtacccggcaaagcagatgtgcctgggcacaggcctggcccactcgggtatcttcctattccttayggccaccttacagaggttctgcctgctccctgtggtacgccctggcaccatcaacctcacctgcagtgcactggcctgggcagtgtccccccagacttccagctccagccagtggcctgctgaggtcaggctccactatggtgggctcactggccctcaaacctccataccctcctcggtcaataaaggccctaaattgcagatggagtcagatgtgtgcagctctgaggtaaacttttatttcttggctgacaggacttccacacccatgctcctcctggcaccttttactctgcccaagcagtggcagcccagtccaaaaggtgcctgccatggccaaaggggttggggagtcacttcacattccaggctggaggagtgagaggacttgggggtactcctcccaccccattgccagcaagaggccatgactcacctcaaccccaagtcctgcatcctggtgggaagtgacaatgcctcctcccagctctccatacctaatggggtcatgaccagacagggtaggacccaggcccccagcttcagttggtaacggtggcctccacggctgccccctgtccaggtgacaaccccagcccccatgatggggcagcaaaggtctcttctcctccttggtcctcagcaacagacagagccctccacaccaggcaggacagaggcaaagtcagaagcagcagcggtggcagggaaggagcagccagcacaggcccagggctctcctgaagtcatttaagctgtctgccatgcggctctgggactggccactaggtgggcgtaggcggctgtgatacaggtacttggacacctttctgtcctgatgctgggggtgagaggggacaggagacagtgagtcatcagaaggacaaagaagccaagggaaacctggggagatggggagaggaccaggaagaaatggggctcctgttggggtaccaggagagtgggctaaggaaggtgggcagagatgaagaaaaatgagtggtgggatttaacaagaggctgatgagggggatggggtggcatcaggcccaagagggcccacagaataggaaggactgaagggagggaagcaggtacctagctgatacttgtctttggctgctgcccgctccttggcatcaaaataccagacagtgatggcgtacctggagaccagggtggttggacattagttttctgcaattccagctaccatatccacacacactaggcggccatccttttgagccacccggttctgctcccacctaggccccctctcaatacttcgtcgctccctagtcactctgaggctctgacaggacattgtcacagggggagcacctgggtgcgtctccagaagtacaggtcatacctggtggcataggctggcttcacctcgtgggggttccgccggtcagaccagaaaatgagcaaccggtcaaagagtggctcgatgttggctaccacgggccggccctcagggaagatctgcagcaggccgccatgcacctgggggcaggccaaaggatgaggctagctggtacggccaggagccgctgcctcccacggtgccccgggagcccactaggaggcgcagcgtctgcctgcatcactccctcccacccctcgggctctcaaagtgaatgacaacccagagactgcatcaccatggagatgggcaggaagctactaaagacaggaaaagggggaaagtgttcattacaaggccgggtggggctgggcagacagcaccattcccggaaagaggggagttcccaccacacagtccgctagagaggaggaggtgccatttcccaggaagagccggcagatcgcactgcccgctgtgtgttgagaagagaaacaggagaatgccagaatctgggctgagagtggaaaatggagtggacgcacgccacccccgccccagccctagccccagcgccaccctcaccctcaccctcacccctaccttaacgtcccagttctgattcaggtaatagatacaggtgatgcagcgcccatcgccgtggggattgtcaacgtgccttacgtacccgagcccgttgcctgggtaacacgccaccatggcctggcagggatggagggaggtaggtttactggggctaggcaggcacatcttagagaagcagccatgaattacctattttcccacccctccttgccccatcttccccatgactccttgggtcaagggttccaagctcctgccccaaaagactttctttttcagccaaaatcccatccccaagtctatcagaaacctcagctcctgggcctcaagagcccactccctcccaacacacatacctggggcctggcacccagctagggctcaattagtaacagagtttgatttgtttcaagataccccaaaccccacctcagccatttcagtagaataataccaatttaaacattttcaggtgtgcaaggaggtggcctcacagccctagaccaggaattcttacccttggctgtggagtggagccccctggggagctctgaggttctgaagtacctggcctaaggaagggcctgaaattggtaaagcttcccaggtaattctaccatgcagcaatgttaagaactgctgccctggactacaaagaatccccactaaattatctgtcccatagacctccgaacaggagccaaaagctacagtctgaatagaaagacctaattccaactccaaggataatttgctgggtaaccctagccagttccaacacctgaatgggcctcaactgcctgatgtgtacagcaggggtaataaacactgctgtttacagcggtagcaattaatctctctgagaacataacttgggaggttctggagccccaactcctggagatctaacaggactcattgcagggcttggtttctctgtctacagggttctttcctctgcctgacagttgccactcccctgacccagccctacaatgctgtggccagggccccgggatgtttgtcatcagggagctggcagaaaggtggctgagaggtaaaggaaatggcccagccacttctgcagacacaattccctggttcaagtctcagtgctgccacatgagctgtggcatcaggcaggtgacttcctggtctcaggttcctcatccatggatccaatggagctcacagctatttcacaggttgttgtggaacaagtgaacaagataacaagtgtctgggaagacagccagcacagtgcctgccacatggagaactggagcacaggctgaaatgccatttaaaaattttaaaaggtccctgtcccaccctctgcccaaagtcactgcagtggcaagatgaggtagcacacaaaaaggggaggactggcacaaggacccttcaacttctccccagcccggaccatctgtcttgacctctctgccctgacctctctgccctggtacaactctgctggcgtccattccccacgaatgctcagctacacctatgggcccggcccagcaagacagtcccaagataaacattcacgatcaaacatcagtggccactgccacaacaggatgcttgccaagcacgcacgccacagcagactgggctgcttcaatcctcaccctccccaggacgcctcccaacacattatcccagggctcaccctctgtggtggatgttaagctgctctgcattaaccatgtgcacctcatccaccagaccttgccctggaaagagagggctgccaccatctactgccacctagcagtgggaagctgacaaccttctctctggcagcaccagagtacaattagtgagaaggccccccagggaaaaccctaatggctacacttcaaggttcaggagggggcaccttctttgcactgctcactccctatggaagggtcggcactctgagcaaccacctcactgggagaagaattgggccatggtccaggaggcttagaaacagtgagttactgactagagatgggcaagacctccccaattaggaatccaatcagagattacactgatgatgcacgtggatgggtggcagggaaggggtccagtgctgcaccctcttcccacaattcatccccacacagcagccagagcccctcctctccaggtcttcactccatcctgagaaaatacaaattcccaaccacagcctcaaaggcccccaacctcatgtgcctctcccatcactctgctccatgcctcaacaggctgagctcatcgccaccacaaggcctcagcactggcctgggacactcttccttctgaccctctttgttattcaggattcagagaccaagggtcaccttgagtactccggctgattgtccgttccactcctagcaacatggcatcagcacaggcacctgtttacctagtactgccctggaaggcagccacagggaagcccctggggccaggttggtctccccagtgcccagtgcagtacctgcagactggagtgcactgctctgggcctcctctgcaccccagccctgctatgtttcctcctgccctgtacattctcacacagcgcctcccaccaagcacatgggactcacacagaaacaggaacctgctctttagggccccacccttcccccacatatacacaccttgggggtgaaagcatcctctggccccaaggaaagtatctacttcctgccctcacaggggaaggcctcaggaaacttgctctccacccctcccacctaggggagggacaggtgggaccagggccaggagaccaaagacttaaaggctattggtgacaatctgcctgccaagagccccacccccactacacacacaccccagtcagaagcctgtgactgtcccacctccaagctgctcttcaaggagcaaaccaagcaagctggactctccctggggtcccctctggtagcccttgctgccagtgggagtcaactctctcccacctacaggtcaacggagcacctgtccccaaccagggagttgggggaaggaaggatgacacaggagctccactcagaacgactaagaagcacgtttctactggctctagccacactggtgatccatgtccccacggcaactgctgcagcccacctgagcaccccacagccttactctggagtacaggagagagtccagatggggcccatctaaaagcgggaaagcctggagttgctgtctcactggggaggggagggctcctcccctatgttctcagtccagcctggcctgtccttacttccctaggacaatcaaggtcacctagggctaaaaaagtccaaacacgccccttccccaatcctcgctggggccctgtccccaaccacatagaaggtgggcaccagaggcaccaaaacacaagagatcttctcctactctcccctccccaaactgccagactcactggggatgtaacctggttttcgtattccgtggatcagcaaattgaggctcagagcagtgtcccatctgggccactcagcccttctggtctccccctgacgaggacgacagccaacctggggtgaagatgctgagccagggaggccactgatcccgcccgcacaggagccaagcccagggaggggccggctctggctcagctatcaagtaacgggagggagagggaagtagaacaagttccagctggggtggggaggaaacaggccttggccccgggggagccctggtccctgagccagctccagcctgagaggaaagccacacagaagcagaacccaagatgggatctgcaggaggaggcagaggacatcaggagctcagcctcacgcctgcagggcacaacactgcccgtgccatcagccagccaggcatcactgtgttgagcagtgggcactccccacagggccttgtccaaaggacaccaagccttggactcaaggccaggcccccacaccacccatgaagacaatgatcctgtcagcagcccggaaaggccctatggaccactgtcctgtgctgggctcctgaccccaggttcctgaacaggcagctggaggccatgaggccttgacaactgcccggaaactccaagcaaatgagcatttgtcttaagagaggatctgtggcctctgacagattctcaaaaagacccaggctccaaaataccattaagaactattgttctaaagcaaaaagaaaaagggactaagaacaaacacataaaggcagaggaagagacagacatgggtagggaggaagtgacacacaggacagggggaatggagggcagggactgggacagtgaagggtgggagacatggggatgagctccacctgggccaacaggcagccacccagtaccacccccaggagactgtcctcgatgcagatgccacagtggggacccagggcacaatgcagtccagggccaagcactcggcccagcgggcagcacccctttccttccctcagcccagggctcactcatcacagccaccctcccccttctgcttctcctgccttggagacaggatggatggactagaaacatgggccagcaaacagggatggacgacaggagcacagggaaggatgtggacagggacagacagcaacagagaacggccaggtgaactgtgtgcctatctacatccccgtgcttggtctggggccacagactgacaccaggaggccatgaaccccaccaaggtccacgctgtgaatgtcagcagctctcatgagtttaagagggttcctggcaaagtcaagaaccactgtggcgatgcttgaaggcagcatgctcgttaagagtcatcaccactccctaatctcaagtacccagggacacaaacacgcagaaggccgc

SEQ ID NO: 5716 - DNA, 12837 bp, Homo sapiens
  misc_feature (1)...(12837): n = A,T,C or G, or insertion/deletion polymorphism (see Tables 1-2)
atcccatctaggaagtgaggagcgtctctgcccggccggccatcgtctgagatgtggggagtgcctttgccccgccgccccgtctgggatgtgaggagcgcctctgcccagccgccccatctgagaagggaggagaccctccgcctggcaaccgccccatctgagaagtgaggagaccctccacccggcagccgccccgtctgagaagtgaggagcccctctgcccggcagccaccccgtctgggaagtgaggagcgtctctgcccggcagctgccccgtccgggagggaggtgggggtcagcccccgcccggccagccgccccgtccgggagggaggtgggggagtcagccccccgcccggccagccgcctcgtccgggaggttaggggcgcctctgcccggccgcccctactgggaagtgaggagcccctctgcccggccaccaccccatctgggaggtgtgcccaacagctcattgagaacgggccatgatgacaatggtggttttgtggaatagaaagctgggaaaggtggggaaaagattgagaaatcagatggttgccgtgtctgtgtggaaagaagtagacatgggagacttttcattttgttctgtactaagaaaaattcttctgccttgggatcctgttgatctgtgaccttacccccgaaccctgtgctctctgaaacatgtgctgtgtccactcagggttaaatggattaagggcagtgcaagatgtgttttgttaaacagatgcttgaaggcagcatgctcattaagagtcatcaccactccctaatctcaagtacccagggacacaaacactgtggaaggcctcagggtcctctgcctaggaaaaccagagacctttgttcacttgtttatctgctgaccttccctccgctattgtcctatgaccctgccaaatccctctctgtgagaaacacccaagaatgatcaataaaaataaaaattaaaaaaatatatatataaaagctgaatttagatagaagttatgctatcacatgaaatgacaggagctagggttctttttttttttttttgaaacagggtctcgctctgccacccagcctgcagtgcagtggcacaatcacagcttattgcagcctaaacttcccaggctcaagtgatcctcccaccttatccaccttaccctcccaagtagctggaactacacaggcaccaccatacccagctaatttttcttctttctttcttttttttcttttcttttcttttttttttttttttgagacacagggtctccttatgttgtgtggcctggtctcaaacctctgggttcaagcactcctcccacctcagcctcccatcgtgctggaattacaggcatgagtcatcacactcggcctagggttcttatttttgggtaaaatgccttcacagcacttcctattatcagttttaaagatcagactcttcctccatgcctcgccgctcttcggttctactctgtccactgccatggcccaagctgacatcgtgctgatcggattggcagtcatgggccagaacttaattctgaccatgaaagaccatggctttgtggtctgtgcttttaataggactgtctccgaagtggatgatttcttggccaatgaggcaaagggaaccaaagtggtgggtgcccagtccctgaaagagatggtctccaagctgaagaagccccagcggatcatcctcctggtgaaggctgggcaagctgtggattatttcatcaaaaaactgataccattgttggacattggtgacatcatcattgatggaggaaattctgaatatagggacaccacaagacggtgccaagacctcaaggccaagggaattttatttgtggggagcggagtcagtggtggagaggaaggggcctggtatggctcattgctcacgccaggagggaacaaagaagcatggccccacatcaagaccatcttccaaggtgttgctgcaaaagtaggaaccctgctgtgactgagtgggagatgagggagcaggccactttgtgaagatggcgcacaacaggatagagtatggggacatgcagctgatctgtgaggcataccacctgatgaaagacgtgctgggcatggcacaggacaagatggcccaggcctttgaggattggaataagacagagctagactcattcctgattgaaatcacagccaatattctcaagttccaaggtgctgatggcaaacacttgctgccaaagatcagggacagtgcagggcagaagggcatggggaagtggaccaccatctctgccctggagtacggcatacccgtcaccctcattggagaagccgtctttgcttggtgcctgtcatctctgaaggatgggagaattcaagctagcaaaaagctgaagggtccccaaaagttccagtttgatggtgataagaaatcattcctggaggatattcagaatgtccctctatgcttccaagatcatctcttatgctcaaggctttatgctgctaaggcagggagccaccgagtttggctggaccctcaattatggtgacattgccctgatgtggagagggggctgcattattagaagtgtattcctaggaaagataaaggatgcgtttgatcgaaacccagaacctcagaacctcctactggacgacttcttaagtcagctgttgaaaaccgctaggactcttggtggtgggcagtcagcactggggtccaggctggcattcccatgccctgttttgtcactgccctctccttctatgacaagtacagacacgagatgcttccagccaacctcatccaggctcagcgggattcctttggggctcacacctatgaactcttggccaaaccagggcagtttatccacaccaactggacaggccacggtggcagtgtatcatcctcgtcatacaatgcctgatgatgatgatgctgctcctgtcaccctccacgattccacagaccaggacattccatgagcctcatggcactgccagctggccctttttttttttgagacggagtctcactctgtcgcccaggctggagtacagtggcgcgatcttggctcactgcaagctccgcctcccgggttcatgccattctcctgcctcagcctcccgagtagctgggagtacaggcgcccgccaccacacccagctaattttttgtatttttagtagagacggggtttcaccatgttagccaggatggtctcgatctcctgacatcatgatcctcccgcctcggtctcccaaagttctgggattacaggcatgagccacccctggcccagatctttttaaaaagtgttgtaagagactccagaggaaggcacacagtttatttgtaaagtagctctgtaagagctgctgtgccctctgcccttgcctcttgggactgaccaggagctgttcatgtgtgtgagagtgggaaccacctccttgcagcagtggcttccgcatgccccatgtgctggtgtggttcccatcacgcagacgggaagggtctttgtgcactctgatcaattggaacctctgtatcatgcggctgaattccctttttcctttactcaataaaagctacatcagactgataataaagaaagaaagaaagatcaacagtgattctccctgggtagccaattgaggtagtttggataatttagttctttctttatccacttttattgctgatcctctagtttcaaaaataagtaaatttaaaaataaaacaaaaaaggccaggtgtggtggctcacacctgtaatcccagcactttgggagaccaaggtgggcggatcacttgaggtcaggagtttcagaccagcctggccaacatggtgaaaccctgtctctactaaaaaacacaaaaattagcctggacgtggtggctcacgcctgtaatcccggcactttgggaggccaacatggacagaacacaaggtcaggagttcgagaccagcctggccaatatggtgaaaccccatgtctactaaaaatacaaaaattagctggacgtgtggcgggcacctgtagtcccagctacttgggaggctgaggcaggagaatcacttgaacctgggatgcggaggttgcaagtgagccgagattgcaccactgcactccaggctgggcaacagattgagtctccgtctcaaaaaaataaggccaggcgtggtggttcacacctgtaatcccagcactttaggaggccaaggcggggggatcacccgagattgggagtttgagaccagcctgaccaacatggagaaaccccatctactgaaaatacaaaattagccaggagtggtggcacatgcctgtaatcccagctacttgggaggctgaggcaggagaattgcttgaacccaggaggcagaggttgcagtgagctgagattgcacgattgcactccagcctgggcaacaagagcaaaactctgtctcaaaaaaaaaaaaaaaaattaaccaggcatggtggcacatgcctgtaatcccagcttactctcaggaggctgaggcaggagaattgcttgaacccaggaggcagaggttgcagtgagctgagatggcaccactgcactgcagcctgggggacagcgagacttccactcaaaaacaaacaaacaaacaaacaaacaaaaaaccaatttagtcatagttattggacagttcaggccaaaacaggtcatttggcttgaattacatggtttccttttcccagtttaattattctaccttgcctgggtgtggatcctatcttaaagttgctggcacggaaaagcaaatgagaggtaaaatgactcaattcactaagataaattcaccttggactttaactcactgtattagtccgttctcacgctgctaataaagacataccctagactgggtaatctataaaggaaagaagtttaattgactcacagttccacagggctggggaggcctcaggaaacttaaaatcgtggtggaaggggaagcaaacatttccttctgtacatggcagcagaaaggagaagaagaagaaggaagccacttataaaaccatcagatctcacgagaactgactatcatgagaacaggatgggggaaaccatccccatgggtcatttatctccaccttgtccctcccacacatgtggcaatgatgcaaactctaattcaagatgatatttgggttggaacacatccaaaccatatcaatcactttccatttaaaactatgtttataaagacaccaaagggaacaaaagtattaataatatatgtaacccaaaataagctctgggtatttatttacttttgcttgaagattatggtttacctgtgtaagcaatgctctagagataatcagactatcagaagacggaatccctatgccagtcttcctcattcattccctgggcaagtcccttaatctacatatatctaaattctctatttttttaaaaaaagatgatacatatctaaatattatatttacttttgtctattaattaaaattctgaaaacagaggcagacgtggcggccgcggctccgttggctctggtagctcccacctccccagcgctggcagcatacccacgccagcccggaggagcagaggatattgcaaaggatacagatgaagagatgcatagaccaggtatgggaggagtgcagagcttccatgccatacctaggcgccacccttcaagaaccttcatgtgttcagccatccagaagcttcctgaacctgtccttttatgtttgtctggaggattcattatggagacacgattgactaaatgattggccattggtgataaacttaacctttagtcccctcccgggactgatcctgcctttgcctttctggtgaccaaccccatcctgaagctgcctaggggctgccagccctcagtcaatcattcacaggcaaaaggcatcactgtggagattccaaggattttagtcttcatttctgtgtcgggcacagtgctaagtgctaggtgttcaatggtgatgaagcagatggaggttaccaaacttgtggaccagagcctcatgtaacaaacgtggacctcactgtagcctagtcatggcttccagctttttggatctgagcctccaaaggaggaaatgaccgttcagggttcttgctccagcttgattatggaaactgaaccttcactgggtgtgcacttaccaaggacaggaaagtttctctctttgaagggctttaaatttgtaacaaagaaaagtgatgactttatctatcagatagcagatgaaaaacattgtgaaaaattactcagaggcagaaatcaaagtccaggaggccaccwccaatgacccatggggcccatccagstctctgatgaccgagattgcagacctgacctacaacatggtggccttctcrgggatcatgagcatgatgtggaagcggctcaatgaccatagcaagaactggcagcatgtgtacaaggagctgctgctgctggactaccccatcaagacaggctccgagtgcatggcccagcagtgccgtgagatcatctttgccatccagaccctgaaggacttccagtacattgaccaagatggcaaggaccagggcatcaacgtgcatgagaagtcaaagcaactggtggccctcctcaaagatgaggaatgactgaaagctgagggggcccaggctctcaaaaccaaagagcacatggcccaggttgccactggcatgggcagcaaccagatcaccttgggcgaggctccagccagcccaacctctccaccagccactcggagcaggagtatggtaaggccaggtgtccccgggctcctaccatggctgtgagtaatggaagtgcttctcaccctttgccagagcagcagcaatgggtgacaggtgggatgggtgtccccaggcttagggagcggtggctcccgcagagcttgaatctatcctcggtactgagcctttggcagcccaggcaaattgtccttggtctggattgagtttggttataaagggacttttagccccttggctgctctggttcaggggtctctaaggccctttgctgctctgtgggtctcattctgtacatctgggcagaaggtgggcagaggcaggtcttgtctgcttcctcctcagagcgggtctggcagcaaagggttgtcctgctgcatatccaatgcggagttgactctggtagccaggaggaaacaaatgctttttcttgataatcttgtttcttttttttctgagacagagtctcaccctgttgcccaggctggagtgcaatggcacaatctcggctcactgcaaactctccctcccgggtttaaatgattctcctgcctcagccatccgagtagctgggattacaggcacccaccaccacgcccagctcttcttcgtatttttagtaaagacagggtttcaccatgttggctagggtggtcttgaactcctgacctcgtgatccacctgccttggcctcccaaagtgctgggattatagatgtgagccactgcacctggctgataatcttgtttgtttaatctcatattaaatgtctttccactgactgaaaaaagtaataaataaaaataaaataaaatactgaaaacagtaagaagcatactttctataaaggtctaaggttctaaaattctttttctgttcttcaaactctgtggtaagttaagaaaactggtgaggtgtggtggcttacacctgtaatcctagcactttgggaggccgaggcaggtggatcacctgaggcctggagttcgagaccagcctggccaacgtggtgaaacctcgtttctactaaaaatacaaaaattagctgggtgtggtggcatgcgcctataatcccagctacttgggaggctgaggcaggagaattgcttaacccaggaagcagagggtgcagtggagattgcaccattgcactccagcctgggcaacagggcaaaaactctgtctcaaaaaaaaaaagaagacttttgcttaattcttagaactccaagtagacatccttgaataatgatagctaccatttacagagtgtttacctaaatccaaccaatatcaaagtgttctacatgtattgattcattgaaacttcacaacaattctcagaggtaggtcttattattcacaaccgaggaaacaaaggcacaaaattaattgacttccctcagaaatcccctgtagtaagtggcagacttagaatttaaacagtatggcttgactccctactgttacttttttttttttagatagggtctcaccctgtctcccaggctggagtaccgtggcataattttagctcactgcagcctcgacattctgggctcacatgatgctcccacctcagccttccaagtagctgggaatacaggcacacaccaccacacccagctattgtattttttagtagagacagggttttgccatgttgcccaggctggtctcaaactcagggactcaagcaacctgcccacctcagcctttcagagtattgggattacaagtgtgagccacagcacctggccaactccatactcttatccattatatactatatcccttccgttgccacaatgcttcataatgtcataactggtattttggctgtatcctcaataaatacttgttaagtgggtctgaatataattcttaatatgtatttgagaaataatagagttgggattttcagagaaagaccttaagttgtaagactgttaatttgtggccattaatatatattcattgtgatatataatgagaatgctgtttctttggatatagttgaagagagctggccagcttttgcatgccctgataatctgaccttctcttgtccaaaaatacacaccttctttagcacattcctttatgtatgattttaaactccctctccattttcccactcttctatatgaatatttttgggccgggcgcagaggctcacgcctgtaatcccagcactttgggaagccgaggtgggtggatcacaaggtcaggagtttgagacaagcgtgaccgacacggtggaaccccgtctctactaaaaatacaaaaattagccaggcctggtggcgggcgcctgtagtcccagctacttgggaggctgaggcaggggaatcgcttgaacctgggaggtggagattgcagtgagccaagactgcgccactgcactccagcctgggtgacaagagcaaaactccatctgagacggagtctcactctgtcgcccaggctggagtgcaatggtgccatgttgccatctgggattacaggcgtgagccactgcacccggccaaaggcttttagttattaatttcaaaaataatactcaacatttctgctttagtttgaggaatcactggcacaagacctaaaactacattaacataaagtttattagaataaaccagaataaatatataaaatgcatcctagacccttcatgcttttaagcatttgagtgagtgtcctgaccaaactctctttggacaatattctgcacccacagaattacaaactctaactttccaaactacacagtaggctagaatgtgaggttgggaacatgatctttgtattagttattgcaggagtaaaatgcagacaacatcacggacacccactgaattcactgacctttaatgacatttgatactctgaatttggcagtcagcaagcaggtttggggcttcaaaaaattcaagaaaatattaacatttctacaatgttatgtttggttccataaaaaatgtgaaagaattttgaaaactataagatagcattgagacaaaaagtagtagtattaccatcatcagaatctgttaagtgtctccattttcaacatcaatagattgaaatctgattatacaattctcctttcatccatctaagtgtccttccagaaagggagagacacttgctttttccacagtctccttgcatgcatctttgcacaatctctgctgctctgctaaaggttctaaccaccactttctgtgacacctgccagtcctccccctctcctgctgatctgcatcctcctacttctctcctccctgccccacccccacgtatgcattgcctggatcctatgaccctcacactcatccctcactcagagcagtgcatccgtgagtaatactttctagaggcactctgcccatccactggatgcgatatacataggatatgatttccatcctccttctgaaagtcagagagcacttcccaggatgattctctgaaaactgatagcaggttttcttccagaaaattgcaggacaggttgaactcaatctatttaaaaaaaaaaatacacttgaagtttcaatttttaaaaagctggaaagctatatttctggctctgtaagtaatccatatctctgaactgtgtccttaaggtcatgagatattttatagtatttatccttggaaatatacatcagaaatacgaatgagatcaggcacaacttgcaattagttaagagcagtgagtaacagggtttcaaagaaaatacctaggtttatgtcaacttatataagctaaagcttttcaaatgtattgtagaattacaaattgtggcctaagttttcatcagattctgagtttcacattgactaaagatcaagaaggaacataaaatctaatattcaaaatagaattaaaagctacatgccaggcccggtggctcacccctgtaatcccagcactttgggaggctgaggtgggtggatcacttgaggtcaggagttcgagaccagcctggccaatatggtgaaaccctgtctctactaaaattacaaaaattagccagtgtggtggtgggcacctgtagtcccagctacttgagaggctgaggtgggagaatcgcttgaacccaggaggcaaaggttgcagtgagctgagattgtgctactgcattccagcctaggcgacagagtgagactctgtctcaaaaaaagttacaatattccagcaacgtggtagtctagtctaagcctgtttactgctgataatccagaattcattgaataccaaagcaaagacctaatctaggtcttagattgagttgaaacatgactcctcatgacttctagtctttttctgggttttactttccattgcgatatataaagagaatgctgtctctttggacatagttgaagagagctagctagcttttgtgtgccctgatcatctgcctttctcttacacacctttatttggtggggggtggagggcagggacggagtctcgttctgttgcccaggctggaatgcagtggtgcgatcttggctcactgaaacctcttcctcccgggttcaagcaattctctgcctcagcctcccgagtagctgggattacaggtgcctgccactacacccagctaatttttgtatttctagtagagatgaggtttcactatcttagccaggctggtcttgaactcctgacctcgtggtccacccgccttggcctcccaaagtgctgggattgcagggatgagccaccgtgcccagcccaaaataaacaccttctttagcatgttcgtttatgtatgattttaaactccctctccattttccccctctcttctatgagaatgtttttatttgcctgtgttgccctaaaaatgcaatgcttagaattgaacacgcagttccagatgaggtctgaccagtgtgaagtacaatgcaatgttctcttctaccatcttgacagtgtacttcttataatgtcatttaacaaatagaaagttaaagaaaaaagttttacagctattggaatgtatgtagctggcaatccaaaagtatttctgaatgttgttaaacgaaaagccaggctgggaatggtggctcatgcctgtaatcccagcactttaggaggccagtgtgggagaatcacatgagcccaggaatcaagaccagcctgagcaacatagctagacccccttctctacaaaaaaaattaaaaattagtcaggcatggtggcatgcacctgtagttcctgctactcaggaggctgaggtgggaggagtgcttgagcccaggaagtcgaggctgcagtgaggtataatcatgccactgcactctagcctggccaacagagtgagaccaaaagaaagaataaagaaaagagaccgggcatggtgtctcatgcctgtaacaccagcactttgggagtccgaggcaaatcacgaagtcaagaggtctagaccatcctggccaacatggtgaaaccccatctccactaaaaatacaaaaaaatgagctgggcatggtggcacatgcctgtagtcccacctactctggaggctgagacaggagaatcccttgaacccaggaggtggaggttgcagtgagctgaaattgtgctactacactccagcctggcaacagaatgagaatccatctcaaaaaaaaaaaaaaaaagtaaataaaagaaaaaaccaaaaatctaaccaaacaaaaaatcccagccgtgctaaaattacctaccttttgagagagaatgnnnnnnnnnnnnnnnnnnnnnnnnnnnnnnnnnnnnnnnnnnnnnnnnnnnnnnnnnnnnnnnnnnnnnnnnnnnnnnnnnnnnnnnnnnnnnnnnnnnnnnnnnnnnnnnnnnnnnnnnnnnnnnnnnnnnnnnnnnnnnnnnnnnnnnnnnnnnnnnnnnnnnnnnnnnnnnnnnnnnnnnnnnnnnnnnttgtatttttagtagagacagggtttcaccatattggccaggctggtctcgaactcctaacattgtgatgcacc

SEQ ID NO: 5717 - DNA, 18235 bp, Homo sapiens
tgcaagcctcagcctgattttatgattcgcacacctgctccatgggtatgacctcatccaacccctgtgaggtccctcccatttccaccccaccgcaacggaagaccccttcgcagatgagcacctgacacccagagagctgatgcttctcacaaggggcaccaggaccccgagaaccattctcttgattccacttctgcagcctgggtgaccttcaccagtgacccccgcactcccgtctgctcatgtgttaaatgaatgaatcgtcataatttactatatgctctgagctcctaacacaaactaagtcgttactcctcgaaaaactctacgaggggatcctctgattttaaggataagaaactgagacacagagaagaaaaaactcttaccagggtctcccaaaatagtaagtagtggaacagagatctgcacccatgctgtctggatccagacccagcgccctgaaacagcagcttgtctggttccagaaggaacggaggccgtggtgagactaagttagaagagggccagcacctcatggggaggcccttcgggcaccacgagtccagtcccgctccggaggtgggcagtctgcaggccccctgagaagggggtttgaggggaggctttttcctgctggggaatctcaaagggcttaaaactgcagaccgagaagccgggaccttgcccaggggtgatggggagctgcaagggaaggctgtgagcaggggaggggcggggtgatctccaagtgcagagagaccctctagggccacgtggtgaccgacaggaggctgtcctcccggacaggaggagcgagggtccagagagagaggaggacgtctgagctggagccaggccaaggggacagagaggaggggacggggcagagagaggcaggggccgaagggacaaggctggggaccgatgggctgtaggggataaggggagagatggggcaaggtcagtgccaagggcgtctggccgaataactgggtggtcggtgacgctgcccctgagatgaagaacgtggaagaacagggaaggagggtttggggaaatagagcaatgagttgggactcggtaagtgagaggggcctagggacagtggtgcagggggcgcccaggagcaggtggctgcccaagccggagttcagggtcagatggaggagacctgcgtggttggtggatgaaccacgggagttgatgaaaaactcccagggaacgttctcaggaggaggagccgggcaaaagtgagactcaggccgcggtgggcgggacccaggccgcggtggaggtgaaggacgtccgcggacacgtccaggaggacatcgatcgcgcgagcctgagccagacacagtgggcggggacggggcgccgacgtcaccgcgtgggggcggggctgcgggagccgctggctgcgcgccctccagggagccgagcgcagaccgggtgcgcgcctgggttcggcgcggcgggagcgccctcagtgtccccgtctgtatcaggggtgcttcatcagtacctgcctaggctggttaggaggaggagcacgtgcgatcgtgacgggaagcgctcagcacagacctggcaccgaggaagtcccaggggctcggctcctttccctcgtcaccaccgcgccccaacagagggaggcggctgcaggggtggcggcgaaagggcccaccgggcgttccggagtcggaacactgattcctctcccgcgtggcctctcgcttctgcaggaaccttgcttgtgctgcctcctgtctgggcctcagtttcctccgtattcagcaggaagccataaggttattaatataaacacctcacagggctgccgggagccggagtgagatcctacaaagagagcacttggcacggaggagtggcctgcagccgcattccataaacagggctgctcagctgaagcggtggcccagggtgaggcccgcagactttgagcatcaatttgtggggagggaggcaaagggacataggagttctagaatagcttccaacctggggatctattatgtctgccggtctgggcttgtagaatgtctggagacccgacgttctagaatgcatgaggtttctggggactccagagtgcccgatgttcgaaggttctagagtgtttggagctctgtggttctaggctattctaaaatcttaccttccagagtgtcctccactgccagaatgtcttagggcctgtgcttttagaatctgaaagtctgatattctagaaattccaggggcctgtagttctagaatggctgaatccttcccataaagatgatgactttccacacatggggagagaccacgcttacaacaggtcccatccttcactgggtgacctgagtgaggtcagtccctcctgtctcgggacctcctcattaattaagccaaaatagactctagataattgcttggggccctctggggttctgagacattggaagccagcctcaaatacccaaagccttgggtcatctcagtgatcatctccagcctctgggatgcagaatccagatttcaagctctagaacccagaaataagactacaggaccagaatagagaccctgggttcccagactctaaattcagactctagagtcaagattctagcaatctcagaatcgtgaaagccaggtccctgtctctcaattcagccttttaaaaatttatttacttatttatttatttatttagatttttcatagagatgaggtattgctgtgttgcccaggctggtctcaaacccttcagttccagcaatcctcctacctcagcctcccaaaggcatgagtcactgggcccagccacagtccaggttttcaatgcaaaaacagatttgaaactccagactgtatgttccaaagtctactcctgaaagctcagaggctagatccaccctgtagaatccagaccccaagcctggcatggtggctcacgcctgtaatcccagcactttaggaggctgagtcaggtggatcacttgagatgaggagttcgacaccagcctggccaacatggtgaaaccctgtctctactaaaaatataaaaattagctgggcgtggtggtggtcgcctgtaatcccagctactcaggaggctgaggcaggagaatctattgagcccaggaagtggaggttgcagtgatctgagatcgcgctattgcactccagcctgggtgacaagagcgaaacttcatctcagaaaaaaaaaaaaaaaaagaatccagaccccacaattcaaaatcccaaatctaccatttgtagtctaggccccaggcttctcatagcaggtgcaaaggtttccagcctcgattgccagattccaaacaccagattccaggctcctattgtgggttctagattcgaatgccccgggatccagaatcaaggttcacgatctgtcactcaaaggcccgactccaggatccagattccagacccccagcccaagaactcagactttgaaatccatattccagactgcaggtcattaatctccaactcaagatcctcaaatccagaatccaagacccagatccagaaccagatccggatccagaacccgggatccagaactctgccccaagcccaagaacagggactttaggatccagtttccacactccagaccccaaattccagactctgtcttttgatctcctcctaatttctgtttttgtcctcctgtcccctcccccttgaggaactgctcctggtggagaattcctctttgtggactcagacaacagcttcaacctaataaatgctcattaggccaagtctcccaccccaccagcaaccaaggcgtctctgcctgtaaacctgactctcagccacctcccaccccaccctacaccaccacacccccagacccagctgggactgggagcttataaattcaggcatcctggtacctgctcccttctggcacccaagctgccctagatgctgctggaggatctggaggaggtgagagctttgagacaagactgagggaggggcaaaggggagattcactgtgccctggtttcaaggggaaacgttgaccacgcttggagaactgagtgtcaagggcatgggtagatccacgtgtcctttaccaatgccccaaattgaacctgaaccaagaaaatgtcctggaatggccagaaggagctgcagtggtggggagggagggggatggagtggatcaggaggacgtccctgaagtacttgtatcagagccaagaacgtggtcaggagtgatcacgggttcaagtcagttcagcacaacctcccggaggcctcctgtgtaccaggccccaggtggggcagtgctgaggtcacagaaagaacctgacctgagccccatcttcaagacccccagatggagaaaagaacaggccagacctcagcaagtatggggcatctgcgctgtaatggagacagaatgggtgctgtgggattcaggggagacacctgttaggtgttggggcctcccagaagaggtgggggcagagtgtcagaggacaaagatgaatttggaagatatggggaagaaggatttcaattcaccctcaaagcttcctgaggcctcccgtgggtcgggccctgcagtactggagacccagagtggagtcagaccagctcctcggggagctgccagtctcgtaggggaggcagacaccactgagggtcaggggaggtcagagaaggcctcaaggaggaagcggggctggaagggaatggcgttggatatgcggtgggaggaatagcctaagcatgaaatggcaggagggaaaatggcagcactggctgcgtctaggacaaggtcatgggagacccagggagaggggctggaagggaagaagccacttttgtccttgaaagtgaggctggagccaggcaactcatgcctgtaatcccagcactttgggaggctgaggcgggtggatcactagaggtcaggagttcaagaccagcctggccaacatggtgaaactccgtctctactaaaattacaaaaattagctgggcgtggtggcacacacctgtaatcccaattgcttgggaggctgaggcaggagaatctcttgaacccagaaggcagaggttacagtgagcggagatcacgccactccactccaacctgggctacagagccagactccgtctcaaaaaaaaaaaaaaaaaagaaaaaaaaagaaagaaagtgaatttgaagagctggactttatcctggtggtgccaaggatccatggagggtggtgagcaggggaggggcacagccagctccagatgtagaaagaccctttggggtcatggctggagggcaagctggtggaggggactggactggagggggacccaaaaggccagataagaggttgagatagaccaggcgcggtggctcatgcctgtaatcccagcactttgggaggccgaggtgggtggatcatgaagtcaagagattgaggccatcctggctaacacggtgaaaccctgtctctacttaaaaaaaaaaaatttccaaaaaattagccgggcacggtggtgggcgcctgtagtcccagctactcgggaggctgaggcgggagaatggtgtgaacctgggaggtggagcttgcagtgagccgacattgtgccactgcactccagcctgggtgacagagtgagactccgtctcaaaaaaaaaaaaaagttgggacaggggtccttggtgatgatggagagagatccaggggctggtagcatggtgctggaggctgacaggtggaggaggtggggcagggtctgtccgagtgcctagaggaagagtaaaccttccagagatgggggacccagaaggaagcgcagagtggggttgggggaaggggataccggtggtcagaagaaatttattaacagtggatgggataagtctgtgtctggagggatcctggtggaggcagaagggtcctgcctcacctggattctctcactccctccccagactgcagccgaaccctggtccctcctccacaatgtggcttctcctcactctctccttcctgctggcatccacaggtgaggtggccccaggagggggccaggtctgtgggagcaggtgcccccttcccaagcatgtctgggcccagtgatctgccagcccctacctcacccagagaccactaaagatccttccttcaccctccacctgtgccaatgtccctaagcccttaccgtcaggtgctggtgctgctgctctggagtcgctatgttgcctggggcctctcgctgcccacgacaaggaacacggtcctggggttacacaaacctgagctgagtcctggggcaaccgcttccttgctgtgtgtccttgagggaactgcttcacctctctgggcttcgaatgccttctctataagacagcacccrcttgagacaataacagtgaggtctcaatagcataacagaggtaatatacatagcaagcattagacaagtgctgagaggccaacagcacagacagactccagcttgagtcccacrcctgccactccctgtctcttacagggtctttgaggggattaaatgtggttgtgtgtgaggcagaagcataagcctggcycaggtagtgcccyttcaggtgtgcaagccaggcacggtgcttagagcttacatacaacgtctatgtgtggtgggcaccmccgacctcatttgacaagggaaggggctgtggctcagagggacggccacaacatcaaggtcaccttgggtgtcaggcaaactccagattgaactcagctgccacacaccaagaaattaattgtaacctgatgcctctcttctggagaaattggggggtggactttcattaacgttctgccacaaatgaccctcactcctgggggcccytgagacccccacgcctccagcctcccctccggctctctctgtgcactcacctacctgcctcgcgcctgcctgctgcgcccagctggggcctccaccttcctctggcttggactggccaggtgcagcctcggtgcccagctgttcagcccgtaccctccgcccttcggaggacgacctcacccttcctttgttaagcccctygtccaccacatccgcattcccctggtctcacgggggcctttggcccagttcctgactgtgatggggagagtgtgggcatttggtctggctgtgcaaatcctgcccctgtgtgggtgggagtgtgcatggcttcaaccttcaggggatgcatccacattgcccagtggagaggggtcctggtcctgtgaccttgaatgtctctaatcatgtccttaagcataatgccattctgtgtgtgtgtgtgtgtgtgtgtgtgkacatgcacgtgtgcagtgggtatacaaggccctgtatgttcacatcctctccacatgcatgagccagatccccatatgtgaaacccaatcagtgactccacagatctggcttgggggctgatctagagatggataaatatgtcctgccctggctgcctctggcttcagctgcatgtctytgaccttgaatgcccagccccgtgtctgggtgctgccccagacagcaagtccacatctgagtgttggccttctgggttggtgtctgcagctctaactctacaaaatgtcttgtgggtgaatcacggttttaaccttgacttttttttgtttgtttggttttttttgagacggagtctcgctctgccgcccaagctggagttcagtggtgcaacctcagctcactgcaacctccgcctcccaggttcaagcaattctgtctctgcctcccgagtagctagaattacaggcacgcaccaccacgcccagctgatttttgtatttttatttatttatttatttattttttagtagagacgggatttcacgatgttggccaggctggtctcaaactcctgacctcaggtgatccacccacctcggccttggcctcccaaagtgctgggattacaggcgtgagccaccacacctggccaaccttgactatttattataggtaattctgtgcagatgtctgacttatgttggccatctccaggatggacctgaactttcacacgtatgtccctrtgactaaatccaggtgtcatttgcaaaaaacaactaatattattaagtagctaccagggctaggtatcactcaccatacatacacacatgcacacacacacatacacattcctacctcatccttacaacaatcttcattttacagatgaggaaacagaggcacagacaggtcgaataacttactcaaartttcacagctagtacattcgaacccaggcttaaggacccatctttgtccagaccctgtatgcaagtgtctgtgacactggatgccaagactcacactagagatgttgaatttaggtctgaacaatatccaattctgtgtgtgtgtttgtgtgtgcatgtgtgtgtgtgttgtattcatgtcttaaccatccatattcatatacacatatgaacatctgtgctgtgattcttttttttttttttttttttttttgagatggagtttcactcttgtcacccaggctggagtgcaatggagcaacctccgctcactgcaatctccgcctcccgggttcaagcgattttcctgcctcagcctccagagtagctgggattacaggcacccgccaccatgcccagctaattttttgtatttttgttagagacagggtttccccatattggccaggctggtctcgaactcctgacctcaggtgatccacccgcctcggcctcccaaagtgctgggattacaggcatgagccaccgtgcccagcctgtgctgtgattcttgaagctgcaacccatgtgcatgcaagtgaatttcagcttccagtcctgtccatagctgtacctaagtgtggaagctggatgtgcatgtatgcatgtccatgaccttgtatagccacatctgggactcatactgcacactgaatttggctgacatgtccagactctggggccaaggctgggtcacacatactgagtggccacatgcgtttgacgtctgtgacaatttggtgaccgtgaatgactggtttcaagtgaccacctgtctgaacctgtatccagtgcccctgtctccacccccaaccacagaggacttcttgccctctggtctgttccccttsctctctctcccagagtcttatagcaaatggggtgggggctagagttctggagaaaacaggcagcggttgtaaataaacaacagggcaggcggagcatggtggctcacacctgtaatcccagcactttgggaggctgaggcgggcagagcatttgaagtcagaagtttgagactaccctggctaacatggtgagacctcgtctctactaaaaatacaaaaattagccaggtgtggtggcgggcacctcagctactcgggaggctgaggcaggaggatcacttgaacccaggaggcggaagttgcagtgagctgagatcatgccactgcactccagcctgggcaaaagagtgagactccgtctcaaaaacaacaacaacaacaaaacaaaaaacagggcagggtgtcttgagaagttaggggaaaggcataggcatatagtagttagggcagggtgcaaggaaggtgtaggaggcaatgtaaacgtccctgtcctcaggcatcctctaccccttctcttagcagcccaggatggtgacaagttgctggaaggtgacgagtgtgcaccccactcccagccatggcaagtggctctctacgagcgtggacgctttaactgtggcgcttccctcatctccccacactgggtgctgtctgcggcmcactgccaaagccggtatgaaggcaggggctcarggtcctgagggagcctggttcggggggaagagctcctakatttgggggaagacggaggcagacgccasaactcctgggttctgaaagacgaggaggccggatgtcaagcccctgggttaggaaggagtgtgtgtttcaaagccttcgatctctgaaggaggaaggagaagactagttccagcttttgagcctcagttctagggatgtgagaatcctggattcggggacagaccaggagggggctgggagtagttggaggggatcgagttctaggagtgtgcctgacttcagactcgttggtccttgaggagcaggggctggaaccattggcttcagggtcttgggaaaaggtaatgggatgtcgagatttctaaagggtcgggagacctcgggttgcccactctttgatctttctgtcctctacttgcgggtaaccactggcccgcactccactggcgggaaaaccactcgcccscacagcttcatgagagtgcgcctgggagagcacaacctgcgcaagcgcgatggcccagagcaactacggaccacgtctcgggtcattccacacccgcgctacgaagcgcgcagccaccgcaacgacatcatgttgctgcgcctagtccagcccgcacgcctgaacccccaggtgcgccccgcggtgctacccacgcgttgcccccacccgggggaggcctgtgtggtgtctggctggggcctggtgtcccacaacgagcctgggaccgctgggagcccccggtcacaaggtgcgtgaaaggatggagctggatgcgaggcctcaaggaatcctatgctccagggctcttgggcggaggggacaagggccggaatttatggatctgctccaagtccactgtcttccccagtgagtctcccagatacgttgcattgtgccaacatcagcattatctcggacacatcttgtgacaagagctacccagggcgcctgacaaacaccatggtgtgtgcaggcgcggagggcagaggcgcagaatcctgtgaggtcagagcctagaggggccatcaggcggaagaagagggatggggacaggtgtgggagtccggatggggttggattttctttgctttgggccagagaagatgctagggtkaggcttggagatggagtaggaagagaagttagaataggggtgaggttggagttggggttataggtggggattgcgttgtttgaggtggataatgtgatagttagtttgagatggcatgggttggggttgagaatgggaatggtttggtttgattctgggtgggaaatacgtcagggttgaattgggatgaggtagattttgtttggaatgcagaagacatgaagattgagattggattttgagatgggcatgggtttgatttgattttgaatggtgaggatgtgggctgagttggatttaacttagtacagttgcactggagttgcatgggggtragattggatataggttgggtgagttgtattgagctgtgttgaattggggttggggttggggttgggttggctctgtttgggataaactgggctgtattgagttgagttgggttggggttccctgggatggggatggattgggtttggggtgagattgcaaatggtgattaggatgaggatgaatccaggaggtttcactcaacctgagaccccctcttttccccacagggtgactctgggggacccctggtctgtgggggcatcctgcagggcattgtgtcctggggtgacgtcccttgtgacaacaccaccaagcctggtgtctataccaaagtctgccactacttggagtggatcagggaaaccatgaagaggaactgactattctagcctatctcctgtgcccctgactgagcagaagcccccacagctggccagcagccccgcctgacatggaacagaacggagccatcccccaagaccctgtccaaggcccagatgttagccaaggacttgtcccacctgaggacaaagctggcgctcaaggtcacctgtttaatgccaagataacaaagcgctgatccaagttgctctgtaggaatttctgtgacttttttctggggtcaaagagaaaccccgagacactgtacactgttccttttcacccaccaccccgatccctaggtgaggagaagcggcttgaagcagggctccattcattcaacacacatgaccacccgtgtgatcttgaacaagaggcccaatctcacttcgccttggtttccttatctgtaaaatgagaccatcttattgctgacttcaaagggctgttgtgaggattaaatgagatgattcgtctgaactgattaaaatcgtgtctggcactgagtaaataccctctatctctggatcccagttaaaggacctaacagacactagattaccaagaatggctttttctttaaggtttagttctgggccgggcatggtggctcacacctgtaatcccagcactttgggaggccaaggcgggcggctcacttgaggtcaggagtgcaagaccagcctggccaacatggtgaaaccccatctctactaaaaatactaaaaaaatttagccgggcgtggtggcacacgactgtaatcctagctacttgggagggtgatgtgggaggatcgcttgaacttaggaggcaggagttgcagtgagccgagatcgcgccactgcactccagcctggtgacagagcaagactccatctcagaaaaaaaaaaaaaaaaaaaaagatttagttctgggcttcctggtagccatggcaaaaaggcaaatactgtcctttccttagccaggtccctgatatacagcagaggctggaactctgagctgctttgattttaccaaaaagccaagacaacctgttggaagcctatgggtttaccattgaggctgcaggaatctagttcctaattatcttcagagaccacaaaatgtgatgttcaaggtcgctgaatgttgaagtacatgaacctggctcgtgagacctaaatattgtactggtggtgggggggaagggtcattggaatctgtggttagcctgatcttgacctgggagggaaggttgtccagatctctgggactttggaggacaggacgttgagcacccataactgggagcaagaagtgggaggctcattgagaccccagcattgtttgggagggacactggattttgtaatgctaaagaacttaccctgggagacccctgaaacttcacattcctggatctggaggcactaggaatgtggtgatgtgtaccccaaaattttattatgaaaggaacagtagctttggggacctaggtcctgggtctgggagtgcaagaaccagggcattctgaaggccaaggcttatatttcagggggaactggcagctgagatgctagtatcttggctccgagtggtgcagggaatcagagccctaactgctggtgtttgagggcaccaggtctgggggtgcagggccttaattgagactgaggtatatggggctttgtaccaggggtcactgattcctccgtcttcctgtttctgcttcccctcagtccccccttgcctcactggctgctccccagagcaaagccccagagccacaggccctgccccacctggcttcaaccccaggaatgcgtccagcgtgatccagggcctgcagaacaggtgctggttctccctccccgtctacagctctggggatcggaggggggggggcaattgtccagcccccaggcaacaggggaagggccttggccaacatctgggtgccagcagggcaggggtggggctctgaggggataagggcttttaaaagcctccccagggaggttccccagttcctccacctgctggcccctggacacctctgtcaccatgtggttcctggttctgtgcctcgccctgtccctgggggggactggtgagacagtggggggatgtgggagggggaacgggccctgattctcttgctggcctcacatccccccccgataagaccttcccctccaacaccccaccctcatccctctggcccacagtctatcctagtccggggtgccccggctcttatctatcttgcgcggccccaccctaaacttccacccccgctcctccatgttgtcatagtgctcactcccacaccagattcctgctcctcccaggaagcctcagtactttctcctcttccctagccaacgccctgtcccaccgctttaccaaaggggcagattctgggccatctctgtctctctctggaggaccccaaccctcccatgggcttcccccaccccacaggactctgatcatcccctcctgccccctagttccctgcggccacctatttggctcctgagtctacaaatcccaccacactccagtgactttttccatccagctgtccgctctcaactgtgtcctccagaccctgacatctggtctccccagtccttccagggtcccccaaatttcaccagaaaaccctgcttcccaaactggcatgtgggatcccccatctggtatgggggggggtctgcaaatgtcccttcccacccagcacccccagctctcccaggaaaaacaccacaccctcccaccacatgctcctttccttggggaagttccatcccgccccaggccccagcccttctctgcctgaattgttcctacacagctctggttttctggaaccccacgccaaggatcctgaatgccttctcagccagcgcttctgccctggcctcccccaagtcagtatgtgattctacaacctcacatcaagtgggtcctgcattgcattcccacagctgcttggcgcctgttctcaccacttctccaatcctcttcctaggattgcctccaagaggaccccatatccttccagtaccctcagaccatgaaccccatccccatgagaaacgaagatcccatccttcaccctgtccgagaaggactgccactcacgcctccctcctcctgagccccgtcccagtcctgaccgcaactgtgttctcagggccccaacctcccctcagattgccattcctggttcacaggaaggaccccaaaacctctcggaagcccacctctagccttaaccatagccctttcttttaccctttaaccaggaagccctgaaatctaactgtcccagccaagctggccccttccaaccccaatgtagggaccccaagtcacccccaaactcttcagtccagatgctcttctttacctctcagacctggttccctaaagctgcatcctttcctgaacctcaaaagcccaacccaggtcctgtttccctagcctaggagccccttagccctccagattcttcctcagtgagcctctgatcctgtcccacccttggcgccttgatccctggtttccagaatccctttccactcccctaacccaccacctcccatcccccagccccagaccccaaatgacctgacgcccagatgcagtgtctgctccagacactgtctcctgtctcctaccctgatccctggaggctgctctactgtcagagcacaaaatctccccaccaggtccagccaccactccaaaagcccagggaacagtccagagtcccaccccttcccaacaccccttgcccatgtccccaacctccagccctggtcctctacccgcaatgtcccttcagacccacagcccagctccctctcctagccttgtccctggcctctcctgccaaccctgcccttcctgacccagcaccgcctctgcaggtgctgcgcccccgattcagtcccggattgtgggaggctgggagtgtgagcagcattcccagccctggcaggcggctctgtaccatttcagcactttccagtgtgggggcatcctggtgcaccgccagtgggtgctcacagctgctcattgcatcagcgagtgagtaggggcctggggtctgggaggagggcatctatgctgccacaggattgacaggccagtggcattccccttggataacctcaggcaagactggggggctgaggcagagaggaaggctctggcgcaggtcgcctggcagggcagagctgggctggacacccctctccaaggctgcctgggtctcttgggatctggttctgcttgtgtctctgtgtgactgtgttctggtctctgtcttcctctctctcctctgtctccttgtctctgcatctcccctgtctctgtctgtctctgagtctctctgcggcatctctgtcactgtgtctcaccctccatctctctacccatctctctctctctgggtctctacctcaccgctccctcatccctactaaacacacacccagatggacctaagggaggccccagagtaaaggaagggctttatccccaacttgtgtgcctgggagggggcgcctctccctctgtccagctccccgccccacaggatatccctccactctggagagacacagggaagggctggtttcagcgggagctgggtggggcaactgagggaggaggaaggaggaggcggggcgagaaacgcgcgggagggtgctgggaagggaagggggcctcgaccttggacttcaggccaggccacctgcccctggggagcccgcaccacagccccagctgcagctgagccgctctcaggcctcccctcctccctacctgcccccaccctccccacctgcccccaccctcccccagggcctccctcccttttctctcccacactcggtcactcctgcttcctctctgcctctgtttctagttctcactctgacgtcccgcgtcctttttcatttgtctgcttctcgctcccttccgtgttctgttccctcttcctccctcttccctgggcctgtttctcgctgtccctgtcttttatccttctcatctgcctcttttttgctcaccctgtttctcactgccctcccctccgcctttctcacccctctgtccttttgagctcttttttgctctgtctcttcatttgccttttgcactctcaaactctttcatcttcccattcgctgtctgtatttctccataactatatctttcttcctctgtctccgcccacccacatttttctctttccctttctctctttggggaccctcccccatgctcccctgccccatccccttttccccttcccgtcttctcatccctccattcccatctttccccagcaattaccagctctggctgggtcgccacaacttgtttgacgacgaaaacacagcccagtttgttcatgtcagtgagagcttcccacaccctggcttcaacatgagcctcctggagaaccacacccgccaagcagacgaggactacagccacgacctcatgctgctccgcctgacagagcctgctgataccatcacagacgctgtgaaggtcgtggagttgcccaccgaggaacccgaagtggggagcacctgtttggcttccggctggggcagcatcgaaccagagaattgtatgtgggggcagactgtgtagcccaaggcggggatggggactcctgcgtccaagggagaaagggccagggaagcaggtgaggtcgggctgcagccctttttctcccgggttcgtagtctcatttccagatgatctccagtgtgtggacctcaaaatcctgcctaatgatgagtgcaaaaaagcccacgtccagaaggtgacagacttcatgctgtgtgtcggacacctggaaggtggcaaagacacctgtgtggtgaggcagccctgcccccagggtctggaagggctgagggaggggactcagcctctgaactggcttctgagagctaaccaggcatctgcttcactgcttcccagctagctgtagccactcgccccatcagtgccccagctccccctccttcccccgcccatccagggacaactgcatctcaccccccacaccagagttcaccgttcctcgtggtaatgtgttgttaccgtcgagtcagagagtagtcctggagaggtggcctctgcgatgtgcccgcaggggcagcgtcctgcagatggtcctgcccctcctccccctaacctgtctgcaggcactgtccacctggaccctgccccatgtgcaggagctggaccctgaggtcccttcccccttggccaggactggagaccctgtcccctctgtgggaatccctgcccaccttcctctgggagtgggcactggaggccctgtctgcgagctggggctccccaggcagaacttgggccccgtagacctttctcactctcccctcccaccttgtgctcccagggtgattcagggggcccgctgatgtgtgatggtgtgctccaaggtgtcacatcatggggct

SEQ ID NO: 5718 - DNA, 19986 bp, Homo sapiens
tgtacctgttacccaagcttagtgattaataacgtgctctttcactctataaacagtccccatctggaggataacgtatatggttcacctgcttacaggtcctatgtgatctggcacagctgactcctccagctccacycagcaatascccacacactggcacatgctcctttctcgcagcatcactgctatcagagatcacaattttcttcactttgcaaatggagagaatgacactccaagaagttcactggttaaggtcatatggcaaattaggatggggagcagaggtttaaatggaagctgtgatgcttactctgctcatttccactcatctgcaaggcttagactggactgcactgggattccagactcacatgctgcagggacattctacaaacactgttcctacctcccagaacccccatctggctcactgccacttccccttcaggtctcagttgagccgtcactgacagctctgcgacaccccaaatctagctgtgcacataataccaagtgtgtcccctactgaaacactwacacaatcattctgcacatatttgttcacaacttggtatgtgtcaggccctgttagagtggctggggacacatgtagggacaaaatgccagccctcatggagtttcatgctagaggaaaaaagagacagaaaggaaactagcaaatataaaacagagttgcatgacattataaactgatacaaaatagtacaaatatctcatgaattcatcacaattcattataatttcctatttgcctgaccacatctccctgtgggttttgcagcacggtgtgtgatctgaggcttgcaacaaaggcctggtgaattcaatagcagtttccctttccattctctccattgtcctgggaacttgtcctgctctgataacatacaaaagataattatatctgtaactaatcttctaaaaagcatctgtcccacacattcagggttattaacactgatgccatgttcactttattctcaacaactactcatttctgaatcataaggttcctcatggaggtggagataaccctacctaccgggacattctgtttatgttttagggactgtcctttccatggcttccctagtccctcaggtgctgtgtgagttgtatttcctccattaattctacactagaaaaaggtgtatatgctcaagctgggataggaaataaacaatgaactcaggagtagcatcagcccagagatccctgccattgggcattcaatgattgggtaaaaagttaactatcagcaccttacaccaattagaaaggctactataaagaagatttttaaaaaagcccaggtgcggtggctcacgcctgtaatctcagcactttgggaggccaaggtgggtggatcatgaggtcaagagatygagaccatcttggccaacatggtgaaaccccatctctactaaaaatacaaaagttagctgggtgtggcagcgcgtgcctatagtcccagctactcaggaggctgaggcaggagaattgcttgaacctgggaggtagaggttgcagtgagctgagatcatgccactgcactccagcctggcgacacagcgagactccatctcaaaaaacacaaaacaaaagacagcgttgctgagaatgtggaataattgggaccctttctaccactggtgggaatgtaaaacggtccagccactgtggaaaacaatatggcakttcctcaaaaaattaaacatagaattaccctacgaccccacaattctactgctgggtacataccccaaagaattgaaagcaggacctcaaacagatatctgcgtgttcctcttcacggcagcattattcacaataatcaaaagatagaagcaaccatcaacagatacaaggataagcaaaatgtggtatatccataaatggaatagtattcagacttaaaaaggaaggaagtcctgtccaatgctgtcacatggatacagcttgagaacactatgctaagtgaaataagacagttacaaaaggatggatactgtattctgcttctgtgaggtccctagagcagtcagaatcttagagacaggaagtagaagggtggctgccaggggctgagaggaaagacggatgaggaacgaatgttccacgaggacagagtttcagttttaggagatgagaagaatcctgtggatggatgatggcaatggttgcaaaacaatgtgaatatacttaatgtcactgaactgtacgctagaaaatagttaagaagttaaattttaagttatgtgtattttaaccacaataaaaaagttaactggtaggtcacctgggactgcggtttaaagcaaatgcttgatggttagactaatctggatggtccaactaacctgactctaccactgactggttataagacctggacaaggggctctactccttgagcctcagtttcctcatctgaaaaactggaataataataatatctaatttataaaggcttttggaggttaaatgaagcagtaatgcctcttacatataaataaaattctgagtatgatatacagcacataaattctaaataataaagactcaaaaccatatttcattggttttgttgatgctgattattattattataattaatactattagcttaattcaaaagctaacatcaacctacagcaacctgcagaaagatgtcctgccaaatacttgctaatttaatccaggagcaaaaatctatgattctgggcttgagtgagctttcctaattttaaaactctgatgctcattttgtccccaagaatgtgtttagatgacagagcaatcagaatttgacatgtataaatgcttggcatgttaaaataatgaaagatattttcaccattgtaaggaaacagcttttaatccatctctctggttcaacatcacatttttctatagtttctcatgacttcttccttaacaattggaataggtatgaaaaagctgagctgaacacatagctgcttagaaatgagctgcttaaagtgttaaaacaacagaaacagcaagcatgagtttaatgctatgtatgccgtcacaatactaatttctctattttaaattacagattacacacacacatacacacacacacggaatcacgtctatattgctgggattttcattatataacaatatatcattttaaatgatttgaggcaaattattgaaaaaaattaaagactgaactccataaaaaggaaatcacctgaaatcaaatataaccttgttaacaaaccagcacattagcaacatttttaggggcaacaacataatcagcaactctaagacatcaatcaaatgcattaaaaacaggaagtactaactctaattcctaatttccagaaaggcaaatataccataattaaataacacgttataaggagatttgtctgtgtaggtctacttctgaatccccgaagttacatacttgtaccacaagcccatactcttgaaagaaaattctggacccagtccacatggaattttggttaaaacatctaattcattgcagagaagaatttagtcttttccacggaagagacagcatgtgttagaatgagaatactttatagaaatgaccagtgacaagccggctatgtaagggggcttctgatgcctggcgttaacaagagacagagagtattattgttgaaagggatctttgagattacagaaggagctgaggtgtgaataatcgaacaccatccccttgttgcctgaaggagaagtgagacagcaaaacaaatcaaatttccaggagctgcaccgtgtatggtgagcgaagacgcaatgaggacatgtctgtaggagaacagaggtagaagttagctcctcaagtaacagttgccatcccgaggcaccacagcacaagacagtagcggaaatgaacatgacaacgcggatggtgggtgacaagagtcttgcctggatattgacatttttaaagtgtagaagaaaatcgcaggtcactgaaacaaaggctgatggtgcccagcaggttactcttgaaatcagaaacagaagttcatgagaggcaagaagacagaaacaacaacwgaaaaacttagagtggatcgctaacttgcaggagctgtgcagctttggctttgcaggttttagaagctctccctacgccacgtctttaaatatatgtatgttcaatcagcaggaggaagggactaacaagagccttctgcggtaagcacctgcatcaaacaatggcactgatctcagagggattttaaacagctgtgcataaacttcaamagtaatttgcaaccatattagtaaatgtcactcttcttcccgctagacacagcacttttaaaagagattaagcatccgcagtaagcctgccattttacaagggttaccaaagataagttagggaaaatatgaagatgatgattcacaaggtcggggtgtggggtggggtgggggacccaggaccttaggaatagggcttgtctatcacacagcctcgggcaagaagggcccagtggggaccatggcttctagggagcaaaccaagggaaaagagcaacggagtggaccctccaggcttcttgcctctctcacggagcctcacgaatcccagtggtttagaattttctttggcaaaagaaaaggtcaaagaggccggagttgacagaaagcatgggcggacttctcagatcttgtaggtggttcttaaaagaattcagcaggcttraggtgtgctctcaaagggcaactggaacgtcaaggacttggacaccaggcacagatggttcatttcccatggacargaagagggcacggagtgctccctcttccctccaccttctccagcctagtccccctcagcctgtgccactcctgaatcatcttttatagcaccacrtccagcccgcacaggggcaggacagcccagggaacaaggcagtcctgtggcgctctccttgcagaaatgaccggagtctcccaatccagccagcccgtggacctctcttcatgcccacgggrgagtgcacacgcctgtagcattcaacagtcactctcccattgataacggtggctctcgaaaatccaataccacaaagatactttattgcacaaactttgcttggttaacctggccctcaaagctggggaataacctcacttgaggctacaggaatgagcacgcagatttttctttttttttttttttggtatctttcaaagacctgcctccccctcccccaggcccttgaccagaaacttggcttgtttagaagcctgagcaatggcacccccgtccgtgctccaatacattcccagaaaaggggttatgctcccctgtggacaggataccayctccagaaaacatgtttcctcacgcatttttttttttttttttaccaagaatacaaaaactttccaccttcttccctccccgcaggccccctttcgttcaggtgagaaggaaaagggagaagaaaggaggaagcgcccccaggccggcggcccccacccggctaaggtcgccagcatcccgcatcccgtgcgacctgcgtcccagaaacccagcggggaaattcttcccggtgcgctcttgcgcccgcttggttccatttcctactccgcctgctcacccggcagccctcaccccttcccggaggctctccgaggggcctgggtagcccttctcgccacgggtctcggcccctccagcccgctccctcccggcggcggcgcggggcgcggggccctacctggagcgagcacggcgccgctgctgcccggtggcgctgggactgcgcggggactgcgcggggactgcgcggggactggcggtcggggctggcggggctggcggggctggcgggcccggcgcactgcgggtgcgcctagaaggcggtgcccgccagggggcgctcgccagcctccccgccagcccggcctcccgggacccggcacctctagccagggacgcgcgctcggtcccccgccgtgcgcccccggtcccgcgcccaggctcccgcccctggcctccttaccagccacttgtcgcccagctgcgaactggagcgggaggcggcggccggagggcccaggacagccccgggagggcggcgaggcggagcaggagcgccccggctccggccacattctcagagtcaggaaaaggggcgagaggccacatgtctccctctcgcccaactgaaaacgaaacggcgctccagcagattgggtggaaagagctgggtctcttttctctgtttttcacgctagaaagggcttgtaaacattgttccttttaaaatgacctaccccaggcatttgtttgggcacacttctgtcctggggtcatcgttcctaggtggcttcggacctgggacttttcctgtatctgcacattgtcgttttatacacaattgccaaggtgggactgctttcaactttactgtgcttgaagctgcaaaggtaatgttgccgccgtgcgtgtcattttaggactttttatgccttgcgggtaatactaatgatggtcacagggaggataaacggggtggtttctttttctatactccatgtaactaatttctcattcaggttagaaaattatatgtctggttactaatattcttactgaatggtttccttgcaatgatgacaccaaataattaaaacgtacttgattaagacttttgttgctgtagtgtactaagatcagattaatctgagaagtaaaatagtaattttttgtccttttttcttttcttgttttgagagagacattaaaaacgattaaaacaaaacaaaacaggccaggtgcggtggctcatgcctgtaatgccagcactttgggaggctgaggcgggtggatcgcttgaggctgggagtttgagaccagcctggccaacatggcaaaatcgtgtctctcctaaaaatacaaaaattagctgggtgttgtggcacgtgccagtaatcccagctactcagaaggctgaggcaggagaatcgtttgaacctgggaggaggaggttgcagtgagctgagatctcaccactgcactgcagtctgggtgacagcaaaactctgcctcaaaaaaaaaaaaaaaaaaaaaaggtttaacaaaagccaaaagttgaattagcagccttctgatcatgggaatgtaggatgtcaactaaaaagaacctcagaggttgggaaggcagatgaaaaactgaggccccgaagtgtttcaagacttgattaaatcactcaggtctgcactaggaagcgagttatgatgatgcccctaatctatatgaacccaaataaagccaaaacacacacaccttttaaggataaaactrtattccattaaaattagccccgcatttgtcaatatctaacagcattggactgaccctcaggccagaggctgtagctcttggaagatcctagccaggaggtttgagagtggccagtacctcggaagtgctggctcactctgacatcatcagaacctggcatacagtaggcgctcattgggtatttgctatggaaattaggcaggaaagtgcgtctgtgtctggaaacaaagaggcaaagcttaagcagtgatccccatgcagattctttctgcaaactacaaaacagaagcttccctagttcagactgccatccatctggctctttctccaattgtttttcagcggatcctgttacagtgcaaagaagaaatggcaaacggataacagctactgtgcctagaagatggtagattcctcacgctccatatctgggtttctcattgacaattaggcactgaaaggaagctcatatgtcctgttaatttaatcagtagttagtggctttagaaaaagtttcatatatacaccaggtatgataaggacttttttttttctttttgagacagagtcttgctgtgttgcccaggatggagtgcagcggcgtgatcatagctcactgcagttttgatcccccaggactcaagttatcctctcacctcagcctcccaaatagctgggactacaggcacacatcaccatgaccaagctaatatttaaaaagatttttttgtagagacggggtctcactatgttgcccaggctggtttaaaactcctgggctcaagtgatgctcctacctcagcttcccaaaatgctgggattatcggggtgagccaccatgcccagcctgtgatgactttagacgcactactcatataatattcataatctgatgtgatatgtatcatcatcattatcatctctctttaacagaagagactaacaaggcttagaaaggttatgtacctcgctcaagatcccacaattactaaagtaccagaaccaagattcaaacccaggtcaggctggagccaccatctcaagagctgctgaataattaattctccttttttttttttttttttgagatggagtcttgttctgtcacccaggctggagtgcagtggcacaatcttggctcactgcaacctctgccttctggattcaagtgattcttcctgcctcagcctcctgagtagctgggattacaggcatgtgcctgccaccatgctcagttaatttttgtattgttagtagagacgggtttcaccatgttggccagggtggtctcgaactcctgacatcaggtgatccgcccacctcagcctccgaaagtgctgggattacaggcataagccactgcgcccagccaattctccattcttacatcgtacactcagttttctctttctttctcttttggacaactgatctttgaggactcttggctactcaattgtcctataatcgtatagtcctacaacaggaaacccgttaacctgaagatcagatcttttaaaacaacatccatcatatatctacaaaattgggatttttttatcgtaaaatttcatctaaaacaaaaaattcacatctgttcttggtatccattaggtgtagyggacacctctagatattcttgatgccagcatcctgtagacccgccatctcctttcccaggccatggggtgtttctgttttctattagacactgtctcttagttatataaacgtggctgctctcagaagttctccacacctttgtttcctggaagaggaaatggcatttcctggaggggatgacacgtgggcggtgaggttccactcactacgttaaacacaccctaactttcagctgtgtacttcttttcctctttcaggttctgccctgatgtttcctggaataatgctgaggactgcctttcgggtagccgccctattcmgttcacttcatctcggaaatacctgaccyctgccttggatccagcggccctcctgagagctgaggaaggaggaaatcctatgtgtctgctcccrgagctgccacaacccatcttcccacaactcggaacttggaaaaaggaacccaggacacgactttgcttttcttttggacctagttggtgattatactctgtctcccatggagaccacgtcttgcatccttccttctatatgggatttaggatagaaattaaaaagaaaacatattattttgagtcttgatttggagaaaggtagtattcaggaggaagtaggctatgatacacatagaaaatttgaggacagtgttacttaacaaggacatttctgtctctgcagaagtcacagcttggaggaaaccagtttgcactatttgatgaggaatttggccaccaaaccactgatactttcccaaaggtttggcagaaattgttttttgagtggctcaccagagtacccagaagaatcagtatggaattagaggacagtggcctaccctaaataaagacatgagtgatgtataaagtctagtgtcaatttattcagaaaatatcaaaattattctgggagctatgggtcaaagttgataggcacaaacaaacaaaaacgaaaggtattttaaattcacagcttggataagtaaaagggagatgttgtcatttctcttcttcaatccaactttagattttcaagccggaaaaagggtaattagaagttagaaattgttattgccagaaaatagctctaaaccctgaaaaaaaaaaaaaaaaaaaaaactgaccctcctcttggggagtgataaacctcaattactgttgatagtaaaactgatatcaactcttcgaaaccagtgaaaggtgaatggaaaccttaccctaggttaaggtttaaaaaatgttcataatatatatttgaaagttccattatttaaaatattcattagacatgctttgtaatgttaagttacttcaaaaaatcttacacaagggaagggaagtatgtattattccttcatttaagagaaagataatgtgtgaatattagttaatatttatcgtacatttactacctgtgtcgaagcgtagtgttacacacttaatttcaattatttaatttgattctaacaatgaatcccctgagatggataatatcctcttcattttacagatgagacaattgagacttaaaggttaaacaaatgatttcctaagctcattcagctaataaacggtaggggactgcttgacaccagtccagttgaccctcaaatccatgatttctgccaccatattcacagaaacaagacaagagctgaaaatatagcctgactcttgaaacagtcaaagaattgtgtatgtttatgaaagttctgattaataagatattctgaggacaaaagacaaggcatgggtagaggggcaatgtgtagattagaatgtatcacaatgcccactaaatagtaaaaccatagaaaatgaaatttaatccttactgtgtagaatatttagagtagattgttttttcctcggtgtcaattactattacaactatcaaagaatgaaattaaacaagaaacggttcctttggtttttttttttaaaggtgggagttataaaaacagtatttgccatctggttttagttatggctgtggaaattctatgggtacaatttgttgtcattgttgttaccactaccaatacagagatgctaattgtaacatcagtttctaaatcagatagtgaataattacattttcaatgttttcttaacatagatacaagttaacaggatatgcttctggcctgtttctggattctaagggtagaaccagcataaaactagtcagtccaagtatttctaaagatccacagacacagttctcctggatttgggaagcctagagatattagcacaataattaaggcccaagtgagtataaaattttatctgaaatcgaagagatattgattagataatccacagagactactttttagtgattatcttccaccagggtaaaagcaacagcagcctgaaaatgcaaaagaccatacattttaatggtaagtcctccccaggaaggattaataaatctcaggaggaagatttattatctgtaaatccaggaggaagaaatcaagatgaaaactatcatatttataaatttgattgttgcaattttatagtttgacatagtgcaattgctttagatttgaaggggaacttactttagagtaagtcactcaatctcttttttggaaaggcaaatgccacacctgatcctcatcactcccttctcctttgtccatagcctggctttattctgccattaacacacacacacacacacacacacacacacacacaaattgggaagaggatttctcattttacagaaagtatgctgggctacacaggatattctatcaggtttcttccagctataaaattctgagactaaatatcaaattaaagaaagtactaattgtcagcgatgggggatgtactgctatttgcttctagtggtactcactgctcatttcctatattcactggtataaaaaaatttcaaacaccctcaaaaaagcctatactggtggtaccaggaaaacgctgaaaatcattactttctgtgtggtgtccagctcttttggttacatcatcacttcgaccattcacttttaaagaaaaacttttgtggaacaaaaatataaagatttattttttttcttggtggcttagcacagtggcctaatgtggctgaccatgtgcacctgttgtgtgagtcacttagacgtgctttgtttcttggtcacagttgatccctcaactcaagcatctcaccctcaaaatgtttgtttgggacccaagaggcaaaccttgagatgggttatttctttcaccttggattggctcatctgctgggagtggagccaagctgacatttcctttcctttttgtctgcctatcactacgtagaggcagcacataagagagggaaagccatgcgcgtggagtccagcacatcacccagaaggcagatgttctatctccattttactcattaaaacaaacaaaaccacacctggattgcctggtacttaaataaaatgcactatgatgattgaagaaaaatatcttatatttaaggaatagttttaatagcttacatctgtatttctattagcttccgtttctatttttaatatttgtataatattaaaagtaattttaaaaatgaactaatctttttacatctcttatgagaacttaatggagatatgatgtttgaagatcaaagatacgtggtatttgaaatcagaaaatgtgtttgcttttctacacagattacaaatatcatgcattatttcacaaactcttctcaaagtgttgattttaaaattagtaaaaggagggtatattcatatcacatcctggcatttttataggcaagattgagcagctataacctctaaagtgctttgatccctataagcctcaagaagagaatggtgcaatttgaattaataactacccattatagagcatttgtatcacagtattttccaaatactatcttatttaaccctacagcaatcctatgatatggggattatgtacacattacagatgagaacttgaggctcggagaaagtaaataacttacacaagatcacaaagcaagtgactgccagagccaggatcagaacccagacaggcttcattaggagctctgctgaactctgtctagagaattctcaccacctgctgcaaaggctaaaagaaagggtcatattccacatgtagattttgagaaatatttgttatttttcttatgataaaggttatgcatacacactcacacacacacacacacacacacacacacacacacaactagaaattacagaaaagaaaaaagattagccagaatgtcaccacctaaagacagataatattttggtgttttcaaatattcttttatctatacttttttgaattattttattttaaaaataacttttactggttgcctgattatgaagtaataaatattcaccataaatattttgaaaaatataaaactgtctataaaagaaatttgaaatgattgctaatctcaaaatataaagatacctgtcagtactttggcattttatcctccttgtggctgaggtcacatatcttgagactgaagcacaaaatttctataccatacagtttatagtttaggccacaacatcatttttaaaattgtttctttggtttttacttgatttgctgatgttttattttttagaaaattgcagatgtgatttttaggcagctgattggaatgttctggttgctctgaataggactarctactttgttttttactgaaggacaaatattattcctacacacataaaaaacctcaaagaatgagtaatgatactgtttaaatctgcccttataactccaaagaatgacttcaaattttctttcttccaaagcaacttttaaaagcctttccactgcacagtgaaagaaaaccacaaactccttgtttaataagtgggatcacgtgcttttaacacgaggaaaaggtcaatctgaagcaactgatatggaactgccagagtaggtacgtaaatttaggagttacatcaatttgggagggctgcagaaatgtggatcagattttaatcacactgaggaagtttctttgagcaaaagacgtgatggttgttctctagaacctttctgtcctgtccgttgctttgccaagggagctagaaaagaaataaacatttaagaacttaaaaggcttctggataaaactcagcttggtgcaacacattttagctatcacagctttactcccaagcttccacctttcctaggagcgcagtaaaaacctgagccaaagaaaccaaacaatagaactgaaattctttaaacttgagttcttgaggttatagtctttgtgcactccataaagtcaaagccctaaaaagatttttagaaaacaaaacacttgtatctgtatctatttccccaaacctctctacatttacttaccttttgcagactcatgctttctcttttccttgtgattgcatttggatagaatgaagacctctcctacagttctcaacttaaattctttcttttatttcttagctacgaaagaaaattcaaaaaattcaatgctctactttgtaactccctggacatagtgagtccattatgtacatcatgaggagggagtggagaaagtggaattcttatgtaaattcatacagctttggaaaatggtttagcagtacctactaaagctgagcatatgcaaaccagtgacccaggaatgtcatgggtacataacctacaaaaatgtagacagatgcgctaaaagacatgtacaacatgttcactgcagcccagttcatcatcaccccaaagtggaaacatctcaagcgtccaccagctggaggctgcacaataaaagtgtggtactttcgtcggtagaaacatgccacagcttgaacacacgctgaaaacataacgtcaagtgaaagaagccaggtcccaaaaaaagacatactgtatgattgtatttacattaagtcccaaaacaggtaaactgaattcatgcaatggaaagtcatgagagtagctactgcatctggggaggcaggtggtggagtgccagggaaggagcaccaggatggctcatggtgctatttttatgacttgatgtaggggataggtaataggtaggtccactttggaaaagttcatctagctgtgtatttgtgacttgcagtcttttctgcatgtgtcaattccagtaaaaagattacttgaaaatcaagtataatattattgtatttacaaagccctttctacgtagccagaaacagggttggtttcccaggtgactgagaggtcgtcaggagcttagtgagtggagggcaggggacaagtgtgttcattctctctccctctctctctgctgttctgtaaggtgacaagttaggcttactgccagtgtgaccttaaataagccatgcatgctttctgaatccttttttcttatttggtgagtgacgtgctagttaaaatggtgtctccagccctttcccgtcctcactgctgtgattcaagccccctccttctctgtggggcttcctccgacctctcgatttcactgtcacctttctctcttcctctctctcctgcttcctccctgtccacccccatctctgtccccccagggccgagtttgttttatatctcttttggtatctcctctggttttctggcaccatgtcttacgtagagcaaataataatgctttaaaaaattctcgataaaggaaaaagttcagtaaagtgtgaatttcacattgtagtcagtggttaaatgcctcaaacacttaaaaagtagaatttatctcaacctgggcagaaggcagtccatgccaatttctaaatggaatccaatagcaagaatgcacaaagaacaagcaggagtggtgaggatttcctcactctgtccctcagaggtggcgcgtctcatctgtgaggtgaaagtgtcatcacgtcattgacataaagtataagtacagggaacataatcatctgggagattttaatttgagttaataagagataagattttcaggctaaaagtcttggggctggacaaagaatatttaaaaggagggttggtggataaagaaactgtggtatatttatacgatggaagactacttggccataaaaaggaatgaattaacagcatttgcagtgacctggagattggagactattattctaagtgaagtaattcagaaatggaaaaccaaacatcatatgttctcactgatatgtgggagctaagctatgaggatgcaaaggcaaaagaatgatacaatggactttggggacttggggggaagggtagggggcggcgagacataaagactagaaatatggtgcaaagtatattgcttgggtgatgggtgtaccaaaatctcacaaatcaccactaaagaacttactcctgtaaccaaataccacctgtaccccaaaaacttatggaaaaataaataaaagagggttggatgataagaatttgtcatcttgttttctgaattgttcaattgtacttaattgtacttctttccttaaggagttgaaaatcttcctaaactgctggaggatacacctctgatagcttgagacaaatatcctcttgatcattgtttcaccatatttgtctttgctcatggagaaccattttgatccgtggtttagcctcccaggtgattgaacaataccggtgatctgaggcagaccctctgtgacggataacaggtgagtctcttgcatgtttttgcatcatgtactgattacccagacaaaactgagttggtacagctgctaaatccaggatcaagtgctgggatagtagtcattcaaggaggaggtgtcctgaggggctcatccctcagtagccagctgtgcccagagcagagaggggcacagggtgacagagtgaggcaggcagaggaagccgcacatggccaggtgggaatggacatcaggctcctgactgctctcctcacccagctacaccttcagcttttcactggcagacacctgtggctgctgagataccatcccctccagtgagtcggctggcaattagcttatggtcctaaggatatttctggtgttgctgagaaagtcagagaaatagaggaaaatgtcaagctatgcttttagaaaagagtagatgttaacttgtttggcttctgactctcagccttaaagaaacatgtcaccttcttcctcacctgtaacggcaacaaatcctcgtaacaaacatcttccattgatacttgaagaacatgctcacatagtaggtgctggctagtttgtacaacacgcctctgcttgtatttatctactcacaggtgagaatgagttgaaataaaacgtggaagttcctaggaagcactcagtattgcccctccctgccccttttctgctgttatctgctgtgggagcaggggagcagggcagtgtgctgtggtggcagatggtggacttcagagtcctagaactcccagattcatgatcatgacaggtctgggctccaccactgacaagccatgaggacttggggagtcccatgatctctctgggcctcagtttcctctgctgtaaaacaaagcaatggatgagataacatttctttccacttgataaatccataaagtgcaaaagaacctaactctgacaaatatttgtataatatttttactccagcaggatgcatgatttgtattcagctgagatggattgactaaaaattacaccttctgctcactctaatttattgctgtagaagaaagaataagtgagatatttccatttctagtgacaggtggctggcactttgaaaccttccatttcattactcaccttaatgttttcactaaaacacatgtggttttcaaacacaggaaggaaaacatggtaacctgtggttacaatttccactagaaaatagaaaaggtgtaggtcagaaagaatgtttgtggggtgttccttttttactttaaacatgaaaacccatgtcagaagagttttctcttgagaagaacactgttaattgttgcaattttcaaaagttgatgaaaatggggcccagtggcctctgttgttgcaaccagggcagttgtggttgaagaactctgaaggctttagtgccagggatatttttaatcttccactgtgtcttcaagcagtctctctcttctcttttaattcaaattctgggaagcctaaagaaaatgtcttttcaggcagtccttctcatacccaagtagctctaagaatcccttttcagatcccatcttgaagcaaattagcttgttcaaatagcatttcctctgtagcaattaccttcacagttattttcagctactggttccgtagtttgctgtgatcagttgaatttacctgatacctaaaattaattaattcttcaataaatatttggagagcaccaactaagtttacgacatgcgcacacatctgagttaattggttaatcagaaagaaatgcaaaacacaaaagaaaaactcttttgaattttctaaattgtaaacatctacaactactagagatatggagtaagttttaagtaaattctattttcacaagagactggtatttgaacttcggaagtcctctttccagatggccggggtacctagcaggagggggtgggaaaccactccaataaatgttatgcattggttcaagaaaccagctgttcaacctgcaagagaaaaatgtgttaacggagtaatacatacatagtagtttagatttttttcttctaattgctttactgatgacaatcaaataagaatatgcgtagagctcttcagggtatcaataaaaacagatgcaagtcatgttcacgtgcaggttcagttttaaagggaagaaccgcagcatacatagaacaggagagcgggactgagctgttctgtaccaagctcttatctgccagacaagatcttatcttacgtatttatacacaagcacagatgtgcatggtgaaacatgcatttgtatcaatacaggatagcactggggaggactcctgatgggtgggaggactcctccagtacttgttccactgcagcctgccctcggcacaagcagccagaaagattccctaacagcagagtcatacctgccactctgtcccagcccccagggcttccttctccctacaggacctggccagtccctaggccccagatccgcctctgattcatcttccccacccagctccagctgcatcagcccctgtttgcttcttagcatgccggcaggctggagcccagggcacaagtctccatgtttggcttgaacatcaatttctccaggatgatttccctgatgactctgttttaaatttcaggccctctgtaacccctgtccacacatacacactagaccctatgctccctttccctatctccctccccatccctcttcccagttggcttcacctttctggaatagaaactctatgcaagcagggattttccccgtgtatcacttattattgtatcccaacaactagagagtacttggcacatagtagacgttcaaacaacgttcgttcaatgaatgcatgaattaaatgtaactaatcacaatacattcacagatatatgaaataattcacttacttatgcagaagaattgggtagctatggatttaattagtcctttcacgtcttaagaagtatttaattcatttacaaatataaacaaagagcaaattctttacctcacatggaatatcctcttttggacagctggcatcaaattggctccgtgaacattagtcataacacaatggtcatctttctttattcattggtcatcattctaacagtgtagagtcagagtccctatctttcagatagggagctgtattggttttctacaggtgctgtaaaaaacctctacaaactaagtagcttagaaccaaaatgtattgctgcacagttctgtaggtcagaagtccaggctcactcagttgactk

SEQ ID NO: 5719 - DNA, 398287 bp, Homo sapiens
  misc_feature (1)...(398287): n = A,T,C or G, or insertion/deletion polymorphism (see Tables 1-2)
tttttattttaatctaacctacatggcagtttccttttttttcaaagtgtaaatcctgccaagaactattcaatatcaattgcatatttgatttttacaaatttcataggtaatcttacaagatagtactgtctactggaagcatgttgtgttatttttattgatcccttggtcagttctgaattatatagtcgttttatttcttagactttacaacccaaatatatggttagaatcttttagagaagtcatattctccatacttgggaacaatttcatttaaagcaaaataaaatcattgtaatatgcaataatcttgtgatttgaaaatcccacagaagagatcagaacagttttaatgaggtgataatgatgtacaaatattttggaaactgagcctttctctaaatatggatgtttctaggtcagtagtcatccaagagtatctcagtgtcaattttaagcttagtgttagatttttggaaaataaagctacatcgcataataaacgactatttatttatgcatctaaatgcttcacttggccttggtccaactctcctttgggtaagcatgtggtagtctatcatttggtatgttgctggccttgcttaatttttgaggctcttgagatgagttcaaaaagcaataacaaaatatgtacgctttgcataaattacattatagtacactgcactcacagacatgtaatttattataagaaaatgattccagctacacaaaataatgtcagactagatcgttagattctagaacaaagtgtaatttaaaaaaatccatagactttggtttctttccctttaaagctacaacaggccaactttgcattcctcataaaaatgatatctcgtttttctttaaaaaaatgatacatttaagcttcttttacaattttaattcatatcaattccatttcatttcacattaatatgtttatttctatttttggtatcatcagatatgaatttcatgtcctttgaggacgcagctaggtattgcttttaactgtccacatgctgtttctgtattcacaaaataaatatttagattagcttttatggtttttggtcaaaattcaatattgaaagtaaaagcatcttgtcattttgcatatacacatataaccttggtgtccatagctttcctttaaaagtaacttggtataaggaaacaaacacttggcttgtagtccagagaattatcagaggcaaaggctgaagacctcgatgtgcagtccgggttatcccacggaatctggatctaattgatgcccaaactgacatcttgacctctctgtgaaatatccatgttcaccaaataattgttaacccatcattgtgtctgggattgctgtgctcagagaattccatgccaaagagcaacttaaatgtaacagtgttttgttcaattaaaaaaagtaataacaggattcagatacaagattttccagactgtttatttcatcttgtctatatatatttttagaaatctaaaatgttacaatttgtttgaaaattttttcttctaataatgccaaaaagcctttctaaagtatgtgatccatccatgcatttagaatctaataaaaaaatactagttaagtgattataacttcgtagtatcatttacttaaggagagtctaagacatgcaacatttccagatgtaatcacgatgttgagtaccgtccagggacaagaatgagaatgctaccagctcaagatctgccttctgatggatggggataagcacttgttcattattgatccaactgagaaatttaatggtgtgcaaacaatgtaagggattgtgatacattttcaaactttatttgaaacaatgcgttaaagtaatggtaataaattactatgctggatgaacatggattatggctgtttaagaacctatgaaaaatgtactagtaacttcagagcaaatttatcattgaattatttccaaaagctgatgactgcatacacaaattaaatattacgatgttcttaaaatgcattctgttataatgtaaattttgtataaaatgggactattgtggacctcaccaagaaggtttattactagaactagattgaaaatggaaataaagtcacagaaatctcctgtttaattgtagacaaacatggatgcttatttatttactttaatagttaattcaccaaggctaatgctatggaatagagctacttcaaaataatatggaacagagcctacttcgaaataatagattatgaataaattattctgaagtaagatcagcaacatgccaatttgagttcaggtgcaacttgtaggtggaggatttgcagacagaaaaccacaactagagtcctgctagaggggctaatctgttgaaagaaaaatgagcttctgtagaaacaaataaatgcctcatacttgtctttaaaagtgtaacatgcaccactacaaaactgaaaactaatggttatagcagctgttgtttcaacctcagaagctgtgacagcaatgaaaacattataccaatgtctggtccaataaaactcttggtttcctgtgttttgtgtgggtggacaaagtaataatagcaaagaaagagaagttgtatcactttagcctaaacacactgtgtaaatttgttgttgtttatttgtagagataagatattagtaacttaaaaatgacctaaaggaatcccgaagagttctacagttcattactcatggcaagtaaaactaaatactcaaccttatgaacttttaaagctgaaaatccaagatacttgtagaatgggaaatggacagagatgatggtttaaattttcagtggcatgtccaagccatgagtgtaggtagaaagccatgctgaatcattatcaatttattggggtagaaatgacacctttaatgttaattttatagctaacatcacaaaataagactgatcatagatatctttgaatctgaatgtgagcctgaggactattttagagaagtatattctacctctatgatggagtttgtgtgaaatattataagactcaaaagtaaacttaaacttttatcctcaaatacagatatttattttaaagagacctttaagaaaattgaatatcaacattcaagactgaagtcaacaaagcattctgtgatacttacaaatgtgaaataagtagttataattaaacttttaattaaaaagctgcctcgtcactatcaaaacattatgcatatcggtaagaaaacagtggtatgaataacatgtccttttacgctacaattatgtgtaaaattacctactgaaattgctctcccattactttgccttctccataaagaagttaagtctagagaccttttagtttgttctggtcttttctctcccttcaggaacttccattagtacacaaccagctaggtatcttcctgttagaaatgaaagtgtgatgggcagtctttagtaccagcttagccagttttccctagtcttaaaatttgattcaggcttagtttgggcttaatttcacagctgcacccaatgattcacatacacacatgaataacttaattctttgaatagttcttagaatgtccatcacgaaaacttaaaaatacattgagaaaacccctaaaacaatatagaatatactttgtactttttgtttatcctctaaccttgtgaccacatggttaatactaatcatggtattattggttgcaaaggaaatgaaaataacagcccacaatattctatataatttatgaaaggttaaggtatcatatatgaaaactgagaactcccccaccccaaacacattttggattttttgcatgtcagtaatgaagttcacttttcaccacctttccagttggaacatataaaatgtatgacctctaatgcctaatacattaatgatctattgaactaagttaacccttataaagttcatagaagtgaaaatgtggtctagaacaacactgtttgatagaactttctgtgatggaaatgttgcgtatctacactgtgcaacagagtggccactaggcacatgtagccatcaagcctttcaaatgcggcttgtgtgactaaggaactgaattttaaattgtatttaattttaattaaagttaaatagccgcatgtattggattagcagtctaatagacccttcaaacattcaagtaagtgttggaaatggaaggtccattataggaaatctaggaatcttaaattctcaccatcgggtttaaaactctatcattccttcagtatgaacttttccagaagtttcagattttcaaaagataaaactcaaaccaaccaaatcctttagggtgcttttctgtatgaatcatctttctgcaaagaggtgtaagactgtctttattgccaactctgccccctcttctacagacagaactcagtgattagattctgcatttatttaggttattcgcctaaaaaacctggtttccatactgcaaataaatgacaggaacttttccactagattatcccagacagcacaaatgttctttccaaaagtggagcctggaaccacagccccctcacattgcctgttacatctgtttatgcttatagaagtgacatccacttcgtagacagagaatgccaatttcttgggaaaggacccagaatttggtgatgcttaaaggaaaaaaaagcccttgctgcttaaaattaaaaaatacatagaactgagtattgagtagttacaaaatccttctgaaatgaaaagattttgctcccagagtatatagaatttgtgtacggacttgcctgggttcatattcagccataatcatttactattaatagccaataaagaagcgggtaagttacaaaacctaaaccttagtttttccatcagtgaaatggggctaaaaatagttatgttgggaaaacttgtgaaagactttgaaatgagcaaaagattactgtttgtcctttcaatggaatgctggatgttatctacaggactccggagtgttgtgaaatttacagtcgtctgcaccttacttagactgactttcactaggctattttactactcagtaagctgtagaaacgtttggtaatgtaaatgagttttatctacagaatgcaaatttgttactttacagatacaactggttaccgccctgtaaagcagataataataaacattacatttcagtgctctatagaatagtaagcagatttgcctcttcttgcctctatgtctactcttcacagtctcacgtgaatgggttgcagtatcttgctggggttcccttcctaattaaaagagttataaaaattttgaccaatgttcattttatatttctaccattgtcatgtttttaccttcttgaaaaattattttttaagagttcctgctccctaggctttttggaaggattggtttaaacatctgtattgacagtcatgatcagttttatatcttgcaggaaggtggtaacacttccggtacttgggggtgtaagagggagtactgagcctttagaaaagggcggggttcgggggggagtgagctgaaaaactctccctagacaggaaaggtagaagacctcctcatccctttctctttggcagtgagatcttaaggtcaaggtgagtagtaggccaggcgcagtggcttaggtgaaggccacaccagacttgggcctacgtcttggccttccaggtcagcagagtggcctgggacttggatgccttggggtcacggagttaactgcagactcagactaagtggggccccagcagcggtcagccccagaaccaagttccggagccaacacccgaacaggaaggggccttgccccaggccggagaggcccctcgcccacggccgagggggtggggcggcctcgcctcgggccggtgcttttcgcccttccttggccgccagaggctccctctctctccctctcccgggattttgctgccgggctccctctctctgcggccctagagttaatcccatcagccgaggtgaggcacctgttaccccggccttcctcacccccgcggcctctcctccattacaccgcggccgccgaaacggcccggcgtggcgaccgcacgtgggccaaaccccttccccggccggcacccctggccccaggccggcccgagcgtgcgggcgcgtcgctgctcgggccgccgcccgcccgcaatggcgttggggagcgcagcgcgcctcccggggccgcccgccgcgggcagggagcgcctgggggccgacgcgcgagtggaagcggccgccgcagccgccctacgcgctgcgccgtgaggagcgggttgcggtgtacccagcgggccggcgccgagccgagccgccgcgtccaccgtggggcggggggcgcctgcgaggagggggtgggagccgcggcggcccgaccctccccgcccgcggcgctcccgctcgggtaagggggaggctgagcgcggggcgaggagttggggagggtggagaggaggaaaaaatcggcttgtacaaaggctgagttgcaggctgggggtgggggtgggttgtggtggaggagcaataggttgaagatcggaggcattatcagtgggatctattgtttcctggcacattgggaggaaaaacaaagggatttattttcattaccctgtaattttttttcttttctatttttttaaatgtggccagggagctcgtctctctccgtgtcacagtgggatccgcctggcagccgccgggagctgcagccaatgtgttaggacttcaggtgcttcttggcacaaagctagactgcgacctcctaccatagcgcttggcgtcacctgctctcccggtcctgccccagggccgagggattgcgtcccgaaccgggcttgggaatcggctgcctctcaagttggtgttatttatgtttgtcttttgtgagggcaggttttgaatcccccggcggccccatctcccccgcccccgcctccttgggttggaattggcgggggagggaatggggggtgtgtgtaggggagaggggagggtgtttgtggctttaaaaagaatggtcagggtaaaaggagattgtcgatgctttacaaaaaamgaaaaaaacaggcaccacactccaaagcctttcttgtttgtctgcatgggccatgcatgcgtgctgggccaggagccgagtttggagacggtttaagtgaaagtgtgtgcctcctcagctgattgtgcgtgagggtgatgtggctcggtctaatatcaaaacaaaacaaaaataaaatgaaaaatctttagaactgcctgcattgtctgctcctcagcatatcttgaagtatttgattgctggcttattgatataaaatcctgctgtgggcttaaagagaccagcaagcatgcattgcgttgcgtgttgaactgtagtaagttagaggcaagaaagaataaacaaatcagggctgtgaaaaggggtgtcacagtatatttgctttctgattgtcacattcttacgcatttattcccttggtagtctgcatcccactccataattaataataaccactgttaggaaacttccaaatacttgttataactgaacttagtgaaacttattgctattcaggaactttttttctccttgttttgatctgaaattgcattagtattgctttggggatgctgtagatgagaacattggaccaaaaaaagtaaaatatgccgctgtaggcatgttttggagtttgtaaacatagattccaaacttaattgtacttagaaagaataagttctacctaattgtggagaatcctaaatgaagttgattttctggacagtttgatgatttcttaaagatcgatgaactgctggtttctttttaaagggcattcacaaaagygaccaaaacttgggctaaagtattgctttcaaatatacttakgtgtagcttgtatttgtgagtgtgtgtatgtgtttgtgtgtgtgtgagattttgataggtatctccaaattgtgtttggaacttttttttttttttttttaccaaagaccaatcagaatgataacttyttgacttttaacttcccatttcaatgagtartctcttctgtttgccacgtggctaagccatttggaaaaaaaaatgtatgttatttgactagacataaattcaaataagtaaatgaattcagaaattcattcttttctattgcagatgaacctctagtcttgctttgaaaaaatcattctgtgtaactcttgactgtgactaagttcctaatacacctgttgggacgatcactgacaccgtataccatttgagaggtacttttcttgacccaatactggtgattagagaagagaggtatcttggtttttggtttttttctttgatcattatgaacattggcttttcacccctgaagtgaaaatgttgaaaactgagtcttcaggtgaacgaaccactctcagaagtgcctctcctcacaggaatgcatatcgaactgagtttcaggcactgaaaagtacctttgacaaaccyaagtcagatggggaacaaaaaacaaaagaaggtgagggctcccagcagagcagggggaggaaatatggctccaatgtcaacagaattaaaaacctatttatgcagatgggtatggaacccaacgagaatgctgcagtcattgccaaaacaagggggaaaggtggacattcatctcctcagagaagaatgaagcccaaagaatttctggaaaaaacagatggctcagttgttaagttggagtcttctgtttctgaacgaattagtagatttgacactatgtacgatggcccttcatattccaagttcactgagactcgaaagatgtttgagagaagtgtgcatgaatcaggacagaacaaccgctattccccaaagaaagaraaagctggagggagtgaacctcaggatgaatggggaggttccaagtccaacagaggcagtactgattccttggacagccttagctcccgaactgaggctgtctccccaactgtgagtcaactgagtgcagtatttgagaacactgattctcccagtgccatcatttctgagaaggctgaaaacaatgaatactcagtgactgggcattatcccttgaatttaccatctgttactgttacaaatcttgacacatttggtcacctgaaggattctaattcctggcctccttcaaacaagcgaggtgttgatacagaggatgctcacaagagtaatgcaactccagtaccagaagtggcttctaaaagtacctctctagcttcgatacctggtgaagagatccagcagagcaaggaacccgaggactccacatctaatcaacagactcccgacagcattgacaaagatggtcctgaagaaccttgtgctgaaagtaaggcartgccaaagtccgaaatcccttcaccacaaagccaactgttagaagatgctgaagctaatttggttggaagggaggcagcaaagcaacagaggaaagaacttgcaggtggtratttcacctctcctgatgcttctgcatccagttgtggaaaagaagtacctgaagattcaaataattttgatggttcccatgtgtacatgcacagtgactataatgtgtatagggtgagatccaggtataattcagactggggagagacaggcactgagcaggatgaggaggaagatagtgatgagaacagttactatcagcctgatatggagtactcggaaattgttggattgccagaagaagaagaaatcccagcaaataggaaaattaagtttagtagtgctcctattaaggtaagtgtgttttctccattttgttttctaaatttgtttttagtactagggcctaattgtatgtagaatagacttgacaactagtaggagtttttgtaagggattcaagattgttgatacctttaaaatcacctgttgtcaggtgattttaaaagttcagagtttgagagatatcaattacatttcttaaatgtgctttataatggcatacatcaatagtgagtaatattaaagctgaagaagttcgggaattgtgagatacgttccaatgaactggagtatgagtattgtgagtactgaaaaccaggagtgttagtttgaaatgtaattactttagttttacctaaaattattcataaataatattttctgaatgtacacactttaaggtatgaagtataatgtacaatgggagagttttggtaatctgggaataatattcgatttactttcttaaaaaaatctgagttattaagtgtaagtggattgtgaggaattttgttggaactttttttggggggtactgctagttggtggtgaaaatttaatttatggaaatatattagctgacttaaatactttgaaaagctttgactgtaaacagtctgagttcaaaatttgttacatagctttaaaatgaattttttgaaagaaataacattgatttgccattcatggatttatttttacctcttaaaaactggataaatgccaatggaattcacatgctctaatgacttcacttagttaacatttggtatggaagaatagcacaaagtacatcagcagtgggtggtagaatgttattagtggataatggcaataggggcaggaggtggttggttgagtaccagaatctcctggggtgctttttcaaagtgtacttgcccacagctcagtcctgagatgctggcatgctctccttggggaatctggaaggttatggtggcagaatgtgtagttttagaccacattctaggggcttctagcttacacagtgtgtatatatgatagacttggaatttgatatattcctgtaaattttctcctcaaaatctaaaatcactgtctgttattttcattttgggaccttccatataaggctctaaaatataaatttacatagaaatatttaaagagaaatctgacattgttctgattatgaaatactattctgaaataaagtaataatctatgaaattatttacagatgttagcaggcagactttcattttattagtgtaaggcagaagttctgggtcagaatgggtcatgttaagttaaactgtagtttaaaataaactacagatgtcaattcagtttgaaagtaagtttctttgcagtgctttaccaccttcctttgtgattatctcctcctgccttcctattcctccccaacccccactgccctactctagatggtctttaaaggtgcctttcccccaagcctatccagtgagctcctaaactttgccattcgcatcccccttgaacatcatctttctaccctttaggaagaaagcaataagattaaatcgtttcacattgagaaaggcaggaataactgaaatgaactcttcaaggagttgttaaacccagtgactaactttttaatacaagggatagcagcttatgaaaatttatcaagtagaccactacccagtcaaccaagtgggacaccagcctgtatttgggtcctgtgctgcacaaaacataactgtgcactagttggtttaatggattttaaaggatttatcattgaaatgtgtctgtttatatgtgaacaaaccagctttttgggaatgatattttgaagttcaactaatttgtgctatgattgcttataacaataagtattttgcctcttaattttcatataatgacaattttatctagcaaataatgaaacattacctacatttaatgcatttcatcaagaataagatttctaaaacaaattagatcaagcataagacttgtgaaacaaagataatgtattgcatttgattgggcagttaacaggacttcttggagtggattaagtttgcaaacagaagattcattcttagccctttgtaatgaataacacaattactctttcttgctgcttccattgttaaatatgcaagtggattcacttggaaaatttgagagctgctttctactggtcatggtrgtggccatagtgtttaggttattctccaattaagattttttttgctgcagagggtggtaataccttattagatccaattaaagtatttattgaaggcttatcatgtgtgttctctcatgctgttagctgaagaagacacaaaaatctgtaaggttacccctttcctctgtgagtttgtagagtcaattcttaaacacattgtatttaaaatccataaaaaacagtataaaaaactatgccaaaatttttaatgtcctgtgagtcctttagtggcacttggttgtactaaatgcatatagtgaaagggatttgatagattatttggaaaggaatacatgcaaccattttctatctgtgtttctttattcttttcataaaactttatttatggaatgggaagttgcaattcctaacctcagtcttttcctttgaagcttaaacatacttcctcttaaagaagcaacagggaatgtattctttaaataaatgatttttagaacttttacattcttttcctggctgtcactttattctgtactaggttaaaaattcctagcacctttagttttttgttatagatcttatttatcatctttgtatgtgtaatattgtcctcagtgactacttcagttctttttatagatgttttacatagatatttccataagatgtcttaaatctggacttagaaaaacatcagaataatagttgatctttcctgtgtagcatataccttgtacttgtacatataccttgatttttaaaaatggtcagactgtattgccagccatcagttagtatgactttcctatctttcacagacagttatttcttattagatagattgttatgtttcatagggtcatgaaatattagaatgggattaataatagcaaattaaaatccaactttgagatatggcatgggagaatgttatggaccatgctaattcgagatggaattatgccttcattttcaggaatttttcaaaatgaaaggattgaattaaagtaaatttgtcttagatgaatcaaaacaagagagggtgacatgtcatttttttctactaattcagaacatttatggagcccctaatatgtgtcagggacaatgcaaatataacaaatacaacaaatacataaaatgaggagctgatgaagtaaggagctgctggtcggtgggacgtgtacagcccattaaggaagctctcaggctgttcccaactctgtgctttgatgatctttctaaggttgctgcagcctcattaaggaagtcacaacctttctctgtttcttatgtcctttggattggtatttttttttcccctcaaatactattgtgttacaatggattgttattcttgaaacagcatatctgaaaaagatttttctaactcacagtaagaaggatattgcagagttaatattgaggtacattgtgctatattttgtgttttctcaaatcatatggagctttacaggattagaattcaaataatcagcaagggcaccagagcttcttcaaaccttacatgatagttgttgaaaatggatcttcttgtattctctccctttttgggggctccgagtcatagttagggcattcatggatatatgaagtttttttgttcaggatggttttcagggaatagttctgttgagatccarctttttgtctttgcggaggcttcctttataacagttttgtcagtgcttcttaaactttaatatgcatatgaatcacttgggagatcttgttagcatcaagattctgattcagtaggtattctatgggaaattaccttgatacaatggttgagctacaagtacaccagcaggcaagctatctcagaggttatggaatagaagactcagaaaacaaattaaaatgcttgaatcacatgatttaccaaaccagttaaacacaaatccagaagcaagaggaaagctatggagtaagttaacacacttcargttcaaaccaggttggaaggaccacgctacctgtcctggataaacaatgttcctatgtcccatctttctttcacataacccttccccattaatgatgtggttatgaggaccagagctgatgtttgagccaagactccatagactaatgatttcctgggtcgatgatacacacttgttctgttgaagagatgtgacaaatacacttaggtacagccgtagctttgctagtttgcctgctgatgagccatgggaccatccttggtgtcttcagtagatgactgatatggaagtaatgtagctatcagtccaggcataatggtgacttggtatttccactgctttttgtctataagtaaatctcattcattttatcataatttctatttattttattgttgtcatgtcttactcccagcttacctatttattacgcatctgctgactgccttcatttcaccagcttgcattctcattatcaatacttggcccagcctgagtgttgcctctgtctcataagttgttagtttatttaccatctatgattatcacttcttaagtgtttcatccatcccattagttttgtttacctctataatagaatttcatattctgaaataatacaggaaaaccacgttaacagtatgtctggaggggaaccttagattttacatttctaacaagctctcaagtggtgccgatgccgctgatcaagagatcactctttggaatatgaatttgaagtacaatcttctggcttctgaaagtggctggccatagcatgttagggaagcaacatgtaataaatttcctttccagatgggctgctatatctggttgggtggaataatattctctgaagatgaaataaggtataatcttgtaaagtgcatgaayactctgtttctggatcccaaagtggattattatccttaactcaaggcatttgggtcattaaaaagtcacatcctaggctctttgtgtggtttaagtttttagttataaaaagttgggaggaagaagtttttaatggaatcagaaatttcatttctttcattcttttgcaagtgtaaattaataaacttagtataagaatggtcatatgatttaacttgcttttcttggataactttgatggtacaactttttttttgtttgttttttgttttttgttttttgagagggagctttgctctgtcacccaggttggagtgcagtggcacgatctcagctcactgaaacctccacctcctgggttcaagagattctcaggcctcagccctctgagtagctgggacaacaggcatgcacaactattccagactaatttttatatttttagtagagacagggtttttaccatgttggccaggctagtctcgaactcctgacctcaagtgatctgaccgcgttggcctcccaaagtgctgagattataggcgtgaaccactgtgcccagccgatggtataacatttaaattggatttccttttaaatttttatgttttatgacctrtgcttcataaccaggtaaatgaaatatgtcaaatattttaatatactttgtaaaatcaaataatgaagatttgttgaatgaaccccttttctaaaatccagaggtatagctatacttttaaactgaacagtgatcatttagtgtttaaaaagggattcttttgacagcagattatttcagatgtttactggtatttatttgtaatagaaatatttaaagtttcttgttttttgttaatttaattaattttttttgagacaakgtcttgctctgtcaccctggctgtagtgcagtgatgcagtcatggctcactgcagccctgacctctggggctcaagtaattctcctgcctcagcctcccatgcagctaggactacaggcaagcgccaccatgcctgttattattttttttttttttgtagagatgaagtctcactatgttgtctaggcttgtcttgaactcctgggttcaagcgaccctcctgccttggcctcccgaagtgctgagattaaaggcatgagccactgtgcccagcagttgcttgctttttggatcatacatactttgtgttccctctaaactttctcacaaatgacactaattgttgggttcatgtacttgaaagataagatgccaaatttggaggaaaatcactttgtgttatgttatccatgtgtcgtttaccttgttaacccagttaatatgcccattacaagtaatttgattgaaatctcatctgcattagatttttttctaacactttctctaccacttgaaaacaagtttaggaattttcatagagaaatatagttagatgtgggataaattctgtataaacaaaacaaacattactatagattgttgctttttatgctgttatctaatttacctgatatttttcttgattttctatgctctcatttggacctattttctttttgttcttttgcttcattatattctatagctatggttttgaaaaggaagaaaacttttcaagttatgctttatagtttttcttctggtcacttttacagttttctcctggttctcatctctttagtttgtgacatagacatttagagatgaaatatacttgaaggtaatctagcgtcatttcccagtcacttcaggaagcccttcagtagcatactcctgacagatgatgtttcagcttctgcttgaataattctaccgatggagrgtttattactttggaaggtaaaaggaaagttagaaggaggggcatgctggtgtgtgtagggaggtggtgcactcactcttctttttatttaattttaatttgcaattttttattaagataaaattcaggtaacaaagttcaccactttgaagtgcacaattcagtggtttttagtatattcacagtgttgtgcagccatcacttttatctgattctagaactttttcatcatcctagaaagagaccctgtgtctgtgaattgtcattcccaattccccttccttcttcatcctctggaaagcagtaattgacttgctttttctgtagacttacttctggacatttcttacaaatgcttttaaaaaagaatataggagacttgaagaagaatataggagtatggcttggaatatattaaatttaagatatcaaaaggatagcacactacaggaaagtctagagagcaatggcataaagaattttcttctggttggtgatatggtctaaaagttaagtggcatgatgtgggagcaacaaatgctatctgccattttatgtgtttcatagagaggaagaacacatgaagctgaggagacagtaggattcaagaagaatgaaatgtataactgaggaagaataggtttatgtggctgagaggatggctgaacaactcccttgcgtgggacaccgcacttctcttaatgtaatctaaaattgctacacatgaagcatgagtgtttgattcagcatagggtttctttatttccttttagagacagggtcttgccctgttgctcaggctggagttcagtggcacgatcaaagctcactgcagccttgaactcctgcgcacaagggatcttcctgccccagcctcccaagtagctgggactacaggtgtgtgccacagtgcctggataattacwttttttttttttttttttgtagattcagggtcttgctatattgtctaggctggtcttgaactcctgggctcaagtgaccctcttgcctcaccctcccaaaatgctgggattgtaggtgtgagccaccatgtcctgccaacatagggtttctttaaaggtacaagtggcattgatgctgagtttcatctttacattggtctttttatagcgtgaaggaatcctgttccttttctaataatctgatgcttatttctatcctacttctcttatattgtcactttccttattcttttactttgattggaattgttcacggacagcttcactactttaaaattttttctcatccttcaatatttcgatatagatttcctgtgcctacatgctattatctgtactgtaaccatctataagatgagtgatttgaagcagatatttatttagtttactatgtattgtctgttggagcatattactatatagtctatattactawtaaatatcattaactagtaataataatggtaacatcgagaggtacttgatattctgtcaggttggacaagtgtgcctcttgaagccttgaatttcttacctgtaattgaggctgtcttacttgtaatttatcactaagattgtttctcggctttaccatcctgtaattctctgtgtcttaaacatatttgtactataccataatcataaatatttgtgctatgatttcaaagagaaaattctggacatcttttgttgaaatatcaaaatgaaaaatttatgttaaattgttcttgagaacaataattctatagattatagtagaaaccttaaaatgagtaaaatattaagtccatgggagcacaattttatagagtggatttttagagcaacttgacttttgaaagtatgggtttaactatatgttaaaacaccctgctgaggaaactaagaataaagaaagaaatgttttgtaatatagttgctgacatattaattgcttcactcacttttgctctggaaatagcttcatagcacagttcaacatgattgaaatattgataatttttttttttttacagttcccggttttcagcctaacttactctttctcatgcacatatccttacaaagaagacagcgaaatacagtatgaagatatcaggaaattttatattttaggaggaaagttttgttctttgcttacttaatctatttcattggtatttttaaaaagtatttgtggagttaaaactgttcaccaagtatttatggataatggtaaatgaaactgctcacagatctgttagtctcctgccctcttttataagtcagatgagttttgtgccggggaaagctaatcttccaagttgttttccatgccagttgaaatatatagggctagattcggacatagagtggttggcaagggtcaaaaaggtgaatagagtcatgaccatgaaggtttctttacaggaataagcagtgagaatcttgcggattaggtctttggtatttctgtcttgatgcctttgaactggcatgaccctatgaaactgagtgacctgcatgttgagtctgttgctgtatagtaagatggtcttttctcttttattcacctcggatttctcctccaaaaatttctttttactcctcctcttttaaaaatatgtaagtatacagcctcatggaggctacattcatatcagaaaattgtctaatcttcaatataacaatcttaaatagtactcacagtcagaggtaccttttcaggcttgtgaagagttttcttttcatggttagggtccacagaggagagggaaaagcaggtttattggttagtttttaagatctgtttttgaggccgggcgcggtggctcacgcctgtaattccaacactttgggaggctgtggcgggcggatcacgaggtcaggaaatcgagaccatcctggcgaacactgtgaaaacccctctctactaaaaatacaaaaaaattagctgggcgtggttgcgggcgcctgtagtcccagctactcgggaggctgaggcaggagaatggcgtgaacccgggaggcggaagttgcagtgagctgagagggcgccactgcactccagcctgggcgacagagctagactccggctcaaaaaaaaaaaaaaagatctgtttttgagtagtgttattttgatggattcctttacgaagtacttgttttgggtaaaattgatgtgcaaaattgttttgtaaaggaagagaaagacataaatttgcacttttcattgttaattgatattatatatgtataaaattattatttttttaaataacccatttctcagggggaaaggcaaaacttattgtaggatgtttgaatgacaccttatctaccattacctagaatgtgtttatttttagaagtttattctgtaggtggaataataaaatacagtaatttaaattatacaccaggtgttatataatattctatgtccagagcatctatttccttttagaaatcttatcattgagcactgagcactaaaacaaacaaacctgtaagtaagtcttttgaaaaataaaggctggctggaagattgaggctgcagtgagctgtgattgagccaccacactccagcctgggcaacagagyaagaccctgtttcaaaaaagaaaaagaagggctgggccygaaatctatgattttcatatctgtattatatacagtttcttgcttagcgtctagaattacctattatttaggatagattcctaaaaawatataattttattaatttataatattatttataattttattaaattatatttaaattaattaaaaataaaattattttaaagccctttatatataattcagaaagggtgaattatattgttattgccggaattgttattcagaaagggtgtattagtttataatcagcactgcattggaatagttttctcacaatccctgcgccagtacttagttttatttatatgctttgtagttttcagtttggtaggtgaaaataactgttataatttctacttgatatattgttgagattgaagattttttatgtgcttataggcttttttgatatgacttctgagtggtttttattactttctaaatcagtgtttgttagtaaagactacatcaatgtgttatttaaatgagttggtaaaagttaaagcaactcacatatccagtaatagggatatggttaaattcattacgataaatgcatatagtataataggataaagctgtattactcatgttttctaagattacttaaagatgtaaatacttcatagtaaaaagtctggttaaatgctgaatatgcatttctgtcatatttttactttaaaaatatgtgtatttgcacctaggacaaagattaaaaacacatacatcaaaatgtcaactctggtaatttctggattgagagaacagtgataatgttaaatgaatgtatacttttctgaatttacttaattttctacaataagcatgtattacttctttaattacattaaaagatagtggtgggacacaattggaatgatcagcaataacaacataaggaagttaacaaaaacactttttaaaatgctgccccaaattctaataattagtcttttaatgtacttttatttggaggacaacatgtcacagaaaaaaaatttggtttaatagtgtaaatttatgtaacactgaagaaggtgttactttaagaaaatggatgaacttttgacagttgaattcattaagtgcatatttcttaaaccttggtaaaattgatcccacatttgtggctaaccttgtaagtattatggggaaggagaccctccaattcattttaaattgtgattatayrgcatttgcataggcctgagatgttttccttaagttcgactattgtgtatatgatattctaatgtgttacttaaaatatgctttcaaacactgggtataatgaatttgaagtgaaacatattttaatgagtagtcttactaaaaataataaacatgtacttaaaggaaacttaaccattttcccatgtggcataatgtctttctgatgtcttagattattgagcctcaacaggcttgctctctgtgaaggtgagacagtggagatgtcaagttcattatcttgcttatatataatcctttgaaaaaactcatgtacacacccagttaaaaataggattttgagttctaggcctccacagaatccatttgaatatgtttcctgtcctaaaacaccagccaatatgtggtttcctgttgttcctcttaaaaaacatattagttgaaaagagattcatttgatgtatggttagactatatggtagtatgttatatttttagttagagtcaaagggtcagttcctctcatctattgggtaattttccacctttgaaaagctttggtagataatgttgtagtatataaatgatgacaaacatatttttgttgggtggcagagttttctgaaattggaagtttaaattattgctttttgtttaatgagatgagcagattactctgatcttacagttttaagcagttctgggattttataagttctggtgaagtcctaattaaattgccttacaatataatctggtgtttggattatcactttttgttaagtattcttaaaccttactacaatatggttgataaattctgttaatattttattgtatactgggtttctagtagtgatatatagatgattgtatataattataagaactatttaaagaaaaagaggcaacattaacagacaaaccatgtaaaattttgactcttttctataaaatggttacactggaaaaagaaaattggagttcaagaaaaaaataatttcactggttgtgattttgcatatttatgtaaatttgtgaatgatttgaggcagtgatatctttttttagttaatcatgtacccaatcaagtttgagacgaggcttatgtttttccatagagactatgacacttgtggaatttttatcttgctggctccttctctgtataacgagttctgtgagtagtagcattagtgaactggagctccctcaggagattgtcccatttgcagatgtggcaatcagaagagttttagtttgagttactgggttttgactcttattacctaatacaattctttatttatttagttttgagatggagtctaactctgactgcattattagcatttttttgagacggagtcttgctctgttgcccaggctggagtgctgtggtgtgatctcagcttactgcaacttccgtctcccgagttcaagcgattctcccacctcagcctcctgagtagctggaattacaggcacgcaccaccatgcctggcttaatttttctttttttmgtagagacggggtttcaccatgttggccaggctggtctcaaactcctgacctcaggtgatctacccacctcggcctcccaaagtgctgggattacaggagtgtgccactgcgtctggcctaccaaacgaaattcttactcttaatctagaatgagaactattgagagttcatccattagaacccttgaagcctgtccctcagatggttgaaagtctgtagctggaggacggttgaaataaacagaatattgatatgaaatatttctgaaggtatcctttttccatatcctatatttaacttagctggcatattagagttgtccagagaaacagaaccaataggatgtgtatatatacagagaaaaatgtaaggagttggctcacaggattatggagactggcaagtcaaaaagctgcagggtgggttggcaggctagagattcagggaagagctgacattgcagttcaagtataaaagccttttgctggaaaattttttttttgcttgtgggggagtcagtctgttgtcctattcaggccttcaactgtttcaatgaggcccacccacattatggaaagaaatgagctttcctcaaattatatttaaaaacacccccacagaaacatctagaataatgtttgattagatatctgcgcaccatggcccagccaagttgacttataaaattaaccatcacggtcaagctttcttgttttgattgccccttctgaagctgtttcagggaggaaactcatttttccccccacatgtcttagtgggggagttggttcctctctccctctcattcttagaaaatttgctgaagggattccctctgttgggcagtgtgttgtaggagaggattatatgtttggaatcagacagacctgtattcagatcctgcagacacctgatcttttaagaaagtttgtttaaattttgagggcagggaatttgttttatggttgtgtctctaggattgtcacaccgcttggcacattgtaggtacacagttggtgttaataacctgttatgttcatcatctctgccctttctccttcctcttctccccctccccccacctgaaggtccaagttgggatgatattaatattattatttttattatatttcgagacaaggtcttactctgttgcctaggctggagtgcagtgacatgatcacagctcactacagcctcgacctctgggctcaagggattctcctgccttaggctcttgagtagctgggattacaggcgtgcgctgccatgcccagctaattttttttccatttttgtagagacagagtctcactgtgtttctcaggctagtctggaactcctgggctcaagcgatcctcccacctcagcctctaaagtgctgggattacaggtgtgggccactgctgggctaacatttttatatgtataatgcttgtatgatttatttataggtaaaatccttcaggttagcagttacaaatgaaagctgggtgattccattacagattaaaatctttcctggccactgctctggcttgctgaagctgttgtgctctctttcgtttgggaaatctcaatctattgccctgtaaggtaatgacagttcataagtaaccacagtcattaaaatatggttgtttgagatataactatggaagctgaaggggagagtactcattttgccttaactttatatttactttgatcaccaaagcttgtaattagttgcaagaaaatctaaaaattgagattccatcagaaagttgtaaagctacttatttagaggttgcagtaacttgcctcacctttggtaacttgagtatgtgagtgtatctatattctgaaaatgaaagttatcaaaaatttaattaactaaaaaatttgaattatttcttttactatttagtctttttgtcttccttttatttcctgacttgtttactaaaatgtggtttcttttgttttttttcagtggttagagaggaattacttttttggggtcatttctgtccccctactcccttaatattgattttagaaatgtgcttggttttaattccatagctaagttataattttgtaattatttttgtagtcggttgtctcattctctaatcaagcttttgctgactgtgaatttgtttatccagaaaacagtttttcattttcttggtgacttgtaattagtaataaattgcatgggaccaaataatccaaggtcttgaaatcgtattttttgcctggatgtttcctccgtgaattacattatctggaaaatgtctgacagttgttattaagctgaaatatgaaatagctttgcttgttcatgcaaatttgtttatgtagaaacaagtttttcctaggcagaaatagcttttgatagcatcctaaggaagagaatggttaagctgttttctgcattttctttttaaatgtacaataattttttgggggggttatgtatgtttttgcagatacgtaaaaaccatgttttgtaaaatgcattgtagacattgaagtagaagaatcttagtattttcagggcccttgataatatcctctttatttaaaaatgtaactataaaagttattgtttttccatttctaaaatgaatttaataaaagcaccttttagcaggatgttggtaagaatatatgacttaatatgaaggttcattatattatttgaatgaattgagctactatgtcagatgtgattttgttactgctgtttttcatcttgagattaatattataacattttataattactatataggcattagtcaaggctgataaatcgcctattattcaagtgtttataaataagtggttatgctacagctatttagagaagcattgtcttctgagttgattgataaaagtcaacaaacattgaatatgtttaaaatgtgttgatttcgagctctgctgtgtagatattgagataaataagacaaaccttttctccttgagactatagactttgaaggagatagagaagtaaacatttgtaggatagtgtgataagtgctgtgatagaggtatatacatagggtgaccatatataatttattgtccaaactgttgagaaattcagtgttctgattattattactgtctttaaaaataagggcacagaccattgtttagtcctctttggatcatgcaatgtctagggtgaccattgggatttattgtcaaaattgggacactttttgagaatgaaaggggatgttatgaatacttacactggggcagcagacataatctggaactgacccagggaagccagtacacatgtcaactttgatatagcagcttgctgtggtgctcctaagcaggggagtctacctttatcaggaggagaggaatcattagggaggacttctcagaggaagtgatgcttgagttgaagctttaaagatgaataagaattaattaggtagagaagtgaaaaatcctaagctgagggaaaagtgtgtttgagaaaagagtaaaccagaacagttggaggaacatgaagggggtgtgtgtgtgtgtagtgtaagaatgtaggcaggtggtagttcaaggagggacttgtatacataggagttggaaatgaaatgcaaactatggggagtcattgaataatttaaagggatagatgacatcatcactttgctatatatacctctcctatttgttggtggttatggaagggtggagaagatccattggtcccccattttttctctctgttctttcagtaaacatttatcctagaagctttcaaccaacttctgtttattcagctttctggattaactgatgtcttccatttgctggataggacatgctgactgatgacctcacagactgttcttatgccctcactactcacctcaccacctacagtcataggctgactaggagttggttgtgtacattcctaaacctttttgccctctttatttgtctttctaagtgtgtattcagtactatgtaaattgataaaacatgagtgtgaaaatatttttttttgctataaaaatgtaaattgaattctttggggaagagctgataaaatatgtcacttaaagatcttgttaaattagatgagggagatatagatgacagaaactctttcaacaaatatctaaaaagatgtgccactccaattattttgtgagtgtcttcaagtttttgtcccactttaaagaaaaccaaactggccatcatagccaatgaattatgcaggaaagatactgtggatcattaatttgcagacctaagctcaaagtaaaggtgttggcctgatgtcaaaagattggtaaatgaatatacttctaggtgtcttacattaatatagacctattaaaatatacatcagtttttatgatttctaactttaactgccattttcaattatcggacaaattcttagtctaaattgcttcttctaagagagcatctttttgtaaaaagtgtctgctttaagctaggcagtatgctaatcacctgaattacatattagaatacatctcccaaggagcttgaattcgcttgggagagacggacacgtaagtcacaatgtactgagagttgcattgcaatagaggtgtgcacaggatgctgtgagtgcggagaggggacacttgggttctggaggcaagttccaggaaactcctgggagaagccaaactctatctgagtttcgaaggtttaataagtgttggtagaaaaagggacaagtgtgcaacctaacagcgaggcacagaaaagagaaaaaaatgctgtcttttgcagatctcagagtatgatttatttataggcaaaatattgttggtacatggtaaggcatgtaccacaaagtttaatattgttggtacatgttaaggcaagggcagattaagaagcttcctttgtgctagacttagtttgcacacttttctgaaaacatactagttggagggggttttgagcatggaaaggcatttttagatttgtatattagaaaaccactctaatagagagtggagatagatagaaaggctaggtgtggggtgggaatgcagcagtcacagtgaacacggatgagactgatgaatgtttgtcagaatggaggctgaaacaggcaaagggtaaactgggcaagctggattaggcagaagatgataagaggtgctattttgtgtgaaattaacttttaagtgcaaaaatcatatgtgactattttttatttatccatgtatttttcctactctccccacaaaggatcttgcctagtgcttggttgataacagatgctcagcaaatgagagctaatgtaggaattaactagacataaacagggaattgattgtctttgatccaatagttgcaaaatacgagggatgaactcataggggccttagagccaaggctgtggatctgagtgttagatccaggtatatatgtcattgggatactgtgaggagaggaaacatgagaataaggggtaagacagcaggagagtgttgggaggcagcatgatgggggagccccacattttggagaaatagagtttgagaaatagcgcttcagagaaagtttggagaaaaagattagaaagattttaagaagcataaaggttgctaaacattttctttctttttttgagatggagtctcactctgtcaccccagctggagtacagtggtgcaatctgagctcactgcaacctctgcctcccaggttcaagcgattctcctgcctcagcctcccaagtagctggcattacaggtgcccccaaacaatgcctggctaatttttgtatttttagtagagacggcgtttcactgtgttggtcaggccagtctccaactcctgacctcaagtgattttgcccgcctcggcctcctaaagtgctgggattacaggcgtgaaccaccatgcccagccctatctttatacttttatagagatgggttggtaggtgaagtaagtaactctgaggaaagccaatggtatatgtggattgagactggggaaagagtactgcacatcaggaaggggaaaggagttacagagatacaaagatagagacttgcatttatttctggtaaagtaggttaacattacctatttagccatttaaaatkagccatttaaaatatgtaatagtaacttagagctgtgcacaaggtcatggcagatttggaatcagagatgaggtcctgaaagaaccagtgctrggcttagctgtcagttttgcaggttaagctagactgttagcgtatccgtacaaaatagttatgaagattaatgttgccttctgtagaatgattttgcctggtcagctggaagtttttctttttttcctttgcagatttttccagctgttgttttgccctctgaagtactgggtctataatgatcttaaagtcttcagagaaatatacatgaatattattcttcatcagcagtagaatgaagtaatttctctttcaatattaatttacactgaaaaaagaagtgctcaccagtaagaggttttatgttcttttctgacggcaggtgaacttcagataatgttctggtaactcctaagttacaggaacgctattgacccaattgacccagttgatttcaagtaatagacttgacagctcattgtaaattaaaatccctttcctattggcccagtgtcgtacagtggtattttgtttccggaaacagatatcatattataaaaatactacaattagtcatgaaaatgaataaagagaacttacagtgtatatttatgcaaatactaggtatactaaccaacatgataataatgtaaatgctccttttagggattttttttctgcatgaattagactgactggattctttcttatttttatttttttgagaaggagttttgctcttgttgcccaggctggagtacaatggtgcaacctcggctcaccgcaacctccacctcccaggtttaagtgattctcctgcctcagcctcctgagtagctgggattataagcatgcgccactacatccggctaatttcgtatttttagtagagacagggtttctccatgttggtcaggctggtctcgaactgccgacctcaggtcatctgccaggcttggcctcccaaagtgctgggattacaggtgtgagccaccgtgcccgactgactgtggattcttaaaatacagtttctatgtgtgtctcagagtgtttggatggtaaatgcaggggagtggctgtttccatggctatttcttcttcagtgaatttttgttgctgagtcttcagtgacctggctctgggtattagcttcacttgaagtaggtaggtgatggaagagtcattagccagttttaaagacaagtttagttttctctgctgttatatagataaattggcaagtggttgtgattgagcctttccaccttaggggtggtcagaaatccattaacttagtattgcccttcttagaaataatggattatgatgatgatgatttttcaaaacagatgagtacttaccagccaaaaggcttttgtgtcattatattttgctttatgattttgtaaattgtgtcaaaaagattgaattggtgccagctccatgtttgaattctctaaaaaataagtgctggtttagatgatctatctagataaaacatttcaaacatttattattgaattcttcttaatatgctacataaatagtcagaccccttgtttttgtgaatgttattttgaggtatgtattcagtgtttgctaagtttgttagaattgaggcagagttttggagacccttggagtagagctaattctggaagttaaatttttacctatcttaaaattgagagagtatgtattcatggcatttgaccttgaaattatatgtaggagtggtggagaagggaaaggggtggtggaactcaacatcacgacagttcatgaattaaattaactacctgctctaccaataataagtatgatacatctttttcatatgcctctcttcatttacaaagatggtgctgggcattccaatctacctgaagcattttttttttttttttttggtcaggagaggtaacagggtttgaacccatcttcattccactatgcattctcccgtgtgactgctgtcacatacctgagagacagatggttgggagtgcagtaaatatatgtggaacagagtgaaccagcacaatgtgactaaagatgtgactatatgataaaaagtcaggaatgaattaactttgtctataaataagcacacacagatatagattttctctgacaatttaggcatacacacatctctgcatatatatatwcacatatttagtgtcatatatatgtatatatatgacatatatatacacagcatatttagcgtcctatcatcatgtaggaagatttcagtgctgtaattattaagaacagttacattattgaactacaaagctgaaagaaattctttgggaatgtagtttgccatgattccacttgaaatgtgcaaatttacgaagagattaaggaagataaatgtattatggtttagtttttaaataaggcctgctacttctctggaaagtcagaaatacaaccaaggtgaaattaacatattctgaactatttgcagaaatgctgctgaaacatgtaaagtatcaaagtgcttcttaagtcatgactgaatttaggtagacaggcagagagatcagaatagaatgtgaagtgggaggcattctcctccctctctcaactgtattggagacacagctccagtgtgattaacactgtgaaaaggaggtatactcaattacatgcttctagtgctaaggacgaatggcatctttttacctcagaagaaacaaagcttttgttttgttccaaaatgataatgggacattatcattttgatgatgataataaaatagataacattcaccataccaggcaccaagtaaagggctttatttatgctaattaacttggtccttacaatagctgatcactttttagcagtggaaacccaggcaccaagaacttaagcatggagtccacagcttatgaacagacccagcatgcagcctaggtagtctggcctgagcctgtgtttactgatgtaagagtcaggttttagaataggcccttcatgataagctatcttcttgctctatttttatcccatttggaaaatccctttaatgcttttaattgaatttgaagcagactgccattgaataacgtgatcaaagtaaagacgtatgttctcaatttgggacaaataaaactctaacatttttagtttttttgttaatgttattttatttactagtctttgaaaacttttgtgaaatagttcatatttaacagatgaggaaccagaggcagagtcttaaatccacaaaatgagggtaaagtaagaggtgacccaggaattatttgaatgtagaattttgtttgggcaatattttggcctttttactgtataaaatgcatatgagcagaggagagcactagatcaggggtcagttaatgtgtcttccctgtatcagactcacactgacagttcagaaagtaattgagtcacaacagcacacctgtaacaatttagacatcaaacacttgctttgaacattttgtcctttgtttcatctcctttaatgtgacctttcaagatctctaacatgtggtatgaatttgagagcttctcaacctttattgttgagatctatcctgagttttatcacccaagtattatccctcatgtttatagaacattttttttttttgtcaaaaagatctggcctttgaattcagatcagattcagtgtagttaagaaaatatgtcaaaacaaatatagtcagaaattcacagtacctttgtgttctgtttaggctattagctgagcctttatttaccatttttggtgcttttgttatcgatgttatgttttaaaaatatatacatgtttctggaactayatatatgtctgtgtgtgtatacgtatatgtacacatatatacgtctatatacatatatatgtgtatatatttgatgttaaaagcttttatcaaattgtgtgtgtgtatgtatatacacacatacatgtatatgtacgtatacatacacacacacacacacayatatattttaagagatgtgttgcccaggctggagtacagtggttattcacaggtgtggtcataattcactgaagcttcaaactcctgggctcaagtgatcctactgcaccaagccttcctagtagcttggastacagttgcgctccactgcacccagcttataattttttgattaacarcaattctaagagaatattatgtaatgaagtgtgagaataattagtgcagtggtttgaactttaagacatacgaattttatgttcatgaataatgtacattgtgttttcatacattgtctatggagagtcattttcactgcctgaaattggtcaccttcaattccttctcatctctccgccaaagtatgaaaagaagattgcagggctaagctactacttaaatattattccttttcataacccttcatatagcaccagtgaaccaaggactttgtacagtctagagccaaatgatgacaacatgtggcctatgccaaagataggttttagtagatattagggagcattgtgaaaaaaatggttctgtggttgaatatgtttgggaaacttcataccatgcccccttcttagaaaatcataaagctattaacgtatgcagggcccctgaaagaccacattgttacattttttaaaaagttctcttcttgccttgttttaaatgtgatattatttaacattctgtggcttctggaacacagttggataaaaattattgttgtacagttttaaaaacagaattattcttttgaattgcgtttcataagttcagttcttattgcctttcccacctcaatgattatcccagaaatctgaamattttataataatgaatgtaggcttatgataaagtggtttcaattaacaaaagtattgctgtgataaagtagtttcacctttgagtaaaacttgttgattgcactaagtagaccatttttgccatttcattctggaaaccagagattgcggattttaaattttcttttaatctcctgaatcagcctggattataacatgctgtattttctgtctcatgataaccatattgctgtaaaatatgagaaaattataaacattgttttgtttaaataattgatagtagtaaagtaaatattttaggctatgtttacatttgtaaaagaagatttgagcagtaatttcatcccttagagaaagcccatttgggtaatcaagtctaaattaaagtaattttcctcaataattaggtttaagtgttgatgtctgggtaccagagaagacaatggacttggagtgtggatacttttagactttcctgtctgtgttttcttagtggtaattatttgttatgggtgatctttttcctctgggcgccagtttcctcttctctaaattgaaaaggttctattagatgatctaagatctgtttgagctcctaaaatcagtcttctttaattctgtatctaaacaataattctagttcttatttctgttttgcccaggaaagcttttaacattaaatcaggcttctgccagtagtagtctttgctctttagcaatactggaggtccagggataaaggacatctctgttttcatcttaccatttactatcttatgtcatgttctgtattccgtattctaaagggacttgagtattgtaaacaggaaaacctgagcaaagattgcatgaaagaaccttttaaggtactttgccttcaagtaatgttaaagttgtttaaacagtgtactaataaaacctttcactaagtatggggagactgtgtagggggtgtgtgtgtgtgtgtgtgtgtgtgtktttgtgtatatattttttccctccaaaagtgatctaacaacttaaataattaagaattctaaacatactggtgggaaatgttaccaaatggtaaaacattaattctgtaatatgttttgtttagtaaatgaccagtccctggtcattaattgcttccttgactttgggcaagtaatttctctagttgttaaaagactctttagctcttgtatatacttagggtattctgaataaatttatacatattaaagcaaaaataggaggaattttttttgttttatccctctggcttttttcaattggtagtatgacagttgacaggcatgtaagaccattccatgtccatgtattagcatttttaatagctcygtagtataaatgtgccctaacttattattcatcctttctttattgatggatattagattatttccgatgtttttgcttctatgaataatgctgcatcttgatatattttgtgtacatgtctgagtgttgtgggataggctcctagaagtagtgctgctcagagccctttcttgtcctccaagctctccctctcctaagctccctgcaaatccttctagcatgtaatgaaccatattttattgaaagtatgaggctgttcccttcactggaagttcctaggggacacagattgtcatttattcattgttatatcctyagcactgagcacacggtagttaaaaataaatttgaactgaacttgaaacttgaaaatcaatatccaatgttttaattttaaagtcttggcctgtcttttacagacttcttcaatgttgcaataatttttttccctagtataattggatcataacatagatctcctgatggccacagctatcaacatataggtaactcagttctttgcaacttacatttcagaagcttgtcatgacccaattacacaggcgtagtttcttacagaataaatgttttccaagtctcttgagataattctcctaattagaaatcaggggtgagaacctttatgtaatcagcattgtggtagattgaaaagaatacaggttttggagttgatgtttgaaagcatcttctctgtggtattctatagccatttacttaggctgagtttactggtttatgggagatccagttttttcctctgtaaaatgaagatagtattctatattaagatagggcactggaaaggctaatggaggtcttgaatgtgaaatgtttaatgtgggacttggtacaggtacgtacttgtgaaatattagttcccttcccaggtaccatcagagttttcaatcttgaggggagctgggctgacaacatattcactatagttttctatatcagtggggtactctggtagagtagaacaggggtcctcagaccctgggccgtggtctggtaccagtctgtggcctgttagatactgggctgcatagcaggaggtgagtggtgggtgagtgagcattactgcctgagctccttctcttgtcagatgagtggctgcatttgattcttaaaggtgcatgaaccctattgtgaactctgcatgtggagggatctaggttgcaggttccttatgagacctgaaactatcacctgcccctgaattttttgtggaaaaattgtcttccatgaaaccggtcccttatgccaaaaaggttggggagtgctggagtagaaggtcataactgataagtacttcagagattttggacaattactgttcaattttttgccattcagacatacctgatgctttcagaaggttttcttttttttttcttagtatgagtatgttgactgtggcactgctattactaggaaaaaagtgttcctaatttaccagtgttaatcatttcatgttttcattgctagctcttatcttttttttctgtcatcttccttaatgtggtttatttaaaaaatttctttgactggtcctgtttcaaattgaatgattatgctgtwgaaaagatcagaaatggtcctggctctcatctttcttgggcaagccaatttttaaactaatctgtaaatttcattaaaccatgtgaacaaacagtaaaactgctttcaaaagcataagctatcagagatagaatcagttggttctcctctaagttcctttttggggggtagaaactgaaatatgccatgctgtacgtagttstgaggattgaaagagttcttgcagtattttctcatataatcttagacacgtatcgtgatgtggatacgctattcctgtgtttttaaagggagagataaatggtgttttttccctcaaattgtggaagaggatgaatttttataagcaaatatattagtattatttgtttactggtatagagatgctcagccaggaattcattactgtgtgatgaaatgaatctcagtggaggcactgagaaggatgatggatttggaacaagaagatctgggtttgagactcagctctggtgcttactagttgtatgactttgtgtaaatgtcttcccagcctcatttcttcatctaggaaaagggataataatactttttcacagtgttgttttgggaattaaattaatatgtcaagacactttctaaacttaaaagcattattatttacattggcagatacctatattgttgatagatattattatggcagcacttacagcagtgctggtagaaagtgagtctacaataactacttgctgaataaatgaaacagagtaacactgaactggaggaatttgcttcttagcagaagcattcagattacccctttttattttctttcttctgtatgtttcaattcaagaaaataaatattaatccaatatagatttttcatagaggcaaggttttgataataataatgagttgctgagtattccagtggactttatatagtgctttagtcagcaaaacagactaagcatacaaattattcatatcattgaacagtttatgtaacaaatattttttgaacatacactatgtacttagcacttagtgacttaggtgaacattgactgggaggataccatgtgtcccatcccagaagattgtataatgttatgacagggacaagattatatatatatatatatgtatatatatgtatacatacatgtatatatgtgtacacacacacacacacacacacacacacgtcccaggagattgtatagtgttatgacccaaacttatagacacctaaacacactatctcttcattccttaccttgacctgtgctaatcactgattgcatgctctacaagtaggaggttttatgtcattcacttctatgaccagcacttggtaggcccctaggacataataactgctcagttaatatttgttgagtcatgaatagatgaaagttctgatttagcagtatttctatggaaaagaatttgaaccataataatcatgatggctattattaattaaacccctataatgtgtcatgctctaggctaagtaactttcggacagtaactaatccttttataacatcttgaggaggctgctgttactattcacatttgacatttgaagaattggagtctcagagaggttagataatttgccagtgtcatataaccatctctcatattttttttccatttagcaggatcaagtataatgtagggtgtcctttttctttttcttttaatttttttttaastacagctcattggaacttagcctatttcatccagatgtgtaacatcctccttaatactatttttcttcttattcccagttactctgagaattctttccctttcttcactagatctgtgagccaaagatgatgctaatcatagctcataaacatgagtttggtattaatattatatgtttgtataataaaagaaaaggaaaacatttagccttaaagtaaaataagttggctctgttagcctctagagttcttaaaaataattataagtctcttcrgaatccctctaaatgtcttcatctcctttattgtctttatctgcttaaaactgcttctcttgaaagaccagaatgcaagatcaaaaaatcaaatattatatataatattgatttctggtagattcatagaatttcaaagctggaaacaatcttattttattttttagaataggaaaaatcttttgtaaattagaacacttaaaaaataagttaggacactggaagtcttagggaattaattctgccaaaatacaccttgcccarctcccatctttctgtaagctataaggagttgttcataatgaagaaacagacccctttaggcaacaacaaaatcagagaagagctgaagatttggggaatacattatgcacagttactgtgtgtcttcattttgcagaaagaaaagtatactctacttggtttgatattgtctgtgaaagactaatattttttaaaattcagaagtcgcaggacagacagtaatatagaagagatgaaaataaaatgggagtagagaggggaagaagttaaaagaaaaagcagtggcatttagaagctgttgcagagatcaaacaggacaaacaaggcttagagttagtaacaaatggacaaagcagagatcagttttgccttcaaggggtgctgtgatgagagtatgtgtaagtggtaagacaattgcctaaacctcagtaagatatggaattgtatctttacatgcatctttatccctagtaattacaagattggaattgtatctttatatgcatctttatccctggtaagtggtatctgtacttctgcatatgtgatggtatgattcattgataatttgaacctcttcattgtactctttttaagaagggaagaaagtgtgtttgcatactttagaaaggagtttatctaaatgctcttaaagtatagtttgatatggaaaggtttcaactctcaattaatcagcaactattttttttttttggcctaggctgacccgtttctcaaaattaaaagccactcatatttgggrtctgataaataagtgtttgtgggctggcaagtgtgggaacctaatgtccatttaaatcttgatttttgtataattaagttgtaaattatatatgtcttacaaatgatcttttatgatttgatgatgaaagttggagtcctatttttgaaatagacaagagaatgaaaaaaaaatcattgaatttttagagaaacaatgtagttaatggaaagagcaattggctatgtttttgcatctttgtgaccttaagccaaagtttcttttttggtccttagtttccttacctgaaaagtggaataatttctggcacatatggtttggtacatcacatgaaatatatatatgaagkgcccggttttgtgtctaatatatagtgctgactcagaattttataattcttaatgaggttaggaaaaaaaagaaaagaaatttaatgattaaatatctaaatatcatttctcccacttctctcttctcagtcagaatatatttctccaattcttagtcacttggcctgtcactcagaagccataatagcactaaagtcaattttgctaggctctagagaatttaacctgagcttcaaattagttctccttttgtattctgcagcaggaaacaaccacttcctagacttgggtgggagaataaatattatgaacttgtctaggaataagtcaaccctatcaatgaaaagatcatgattttaactgagtaatttaggacagaggttggcaaactatggcccctaggccaaatctagacctctgtttgcttttgtaaataaagktttattgaatacagccatactcatgcctgtaagtattgtctatggctgctttcctactgtaaaggcagagcaagtagttgtctgccttcccagcactttgggaggctgaggcgggtggatcacctgaagtcaggagttcgaggcaagcctggccaacataatgaaaacctgtctcaactaaaaatacaaaaaattagctgggcatggtggcgggcacctgtaatcccagctactcaggaggctgaggcaggggaatcacttgaacctgggaggcagaggttgcagtgagccaagatcgcaccactgcactccagcctgggtgacagagcaagactgtctctcaataaataaataaataaataaataaataaataaataaataaataaataaaagtttgccaactgctgatttagaaaattgtgatcatttctttaggtgaatattcctgacaaactggtttaaaatcatgtttaaatatctgcaaattttctcattaaaaaatcaatctcataactttcaagtgtttgctacaatgattctgggtgagctaaaagatggtctggaattcatagatctcatttcatcattcatggactatttagttattttgggtagaacatgtactgtttactgttcttcatatgttttcttaaaatttcagaagttgtttcaaggttactaaaattgagtaaactgctgattaaaataatttcataagtatttttatttatattatgtagacatctgttttcatctctctgggataaactataggccattaaatatctccccagaggggtatagctttctgtcattattaaagctgagctttctaaatctctcctaaaagattgttggcacatcagttagaatgtaaacaaaggctttctgaaatttcttcctgtaaacaaatgctttatattttcacatggagatttcctagcttgtgccatttaagctctgtagaaatgtttatcagtgaatgaatgagttcaggttcttaggcaataaaatgggggaaaaagtaaggtaatatttactgaaataagtcaactttgattaggtctgttactcagagattttgctttgccttcccaggcaaattttatagctgtctaaaaggagaggtcttgaggaagtcaagcttatgattgcctctaagtcatctactgacatgctttgaactatcaaggttcaaggcagtgtggtagaccttgggagatgggatggagatattatttattatgtttcagatacaaaactaggtctttgttcataatgatatttaaaacaaataaccctcatttctatgcatggaaaatagtgatagcttatgaaagagtttagaaatggatttcttgcagtggagagtgatgttgagaaaatcagtgaaggacaaattgtgacctacattttagcaaaagtaggttatttgttttaaaaatatagtcagttttctaattactgagtttgttattccctttgtttgtaaagtacttacctcatgccatctgtgtgagtgtcctaccaaacttccaagtccatttcttttttaaaattgatatataatagttgtatacattttgggggtatatgtgatattttgatacatgtatacaatccctagtgatcaaatcagggtaactgagatatccatcacgttatactttcatctttccttgtgttgggaacattccaattcttctcttctagctattttgaaatatacaataaattattgtttactatagttttccaagcttatgtctgatgacacttcctcattgaatttttcctgccttccctgcccttctactctaacacatatcccctttgatcacctgttctttcagacacctcctatgatatttacataaaataatgctggagtttatcaccagtagtgcttagcaccatgccccttacacactcactaaacatttagcgaagtagtttgtgactatagtagaaatatccacccccccaccccccgattaaaaaaaaaggtcattactatctatgcctgggaagtgagtcatcgttctttagatttgctaatttttacttaagggggaagagggcacctcgtttcttataaaactgtagagttaaactgactaaaagcagagtgatgacctagtgatcagaaccgtttctttgacagatttgttcatttgtggaaatcccaaacccttttcagagcagtttttgtaatcactttttgtggtgtttgttggattctcagaatctttttctcaaaatagtagatgcctggatttgctattccaggtacttctgaaaagaagattttgagagatactgtagaattttaattgcattggaggtaatgcttttcagatgtatatggaaagttagattccaaggattaaaaaaaaatgaaattcttaaacaaattttggattccaagtccagattcaccrgctagttccaatgggtttgaggggatgacgtataatgtctgtgtttgataagactaaaagctttttgaaagtgtgtgatagccaagaggtaaacttttgctcctaaggatctattgattaccttgatttcatctccttacatgagatacgtaccttttagctttcatgggccatgaatataccctgtatatgtttatatgcctgtatatatgatatattcatatatatgtaaataaaaatcaagtatgatagtaaaaggatttgtgttaggtctctcagctcttagaagtttgaataatctcatataagttgcttaacctctggtgcttttctttccttttaaaaatgagggtgattataccttcttaagtgaagtttatgaggcttgttttcatgacatatacaaaagacagggattcttaaggtcaaatgaatacagctagggttaggttatctggataattaaagctgaaagcttggagaaaaaagatttcattgggatggagggacatatattagggagagtatttaaataatttaacttgattcattgtggatgtccgggtcattgaaaaattaccagtctttcattttgttttgtatcaaattgacatgaaaactgtagtcacttcatatttatgcccagttcacaaatatctccttgctgtttagtcacagacaaaagataataatattctattacagtgtatcagttgaaataggctaaatatttatgaatatatgttttgaaattggaagcatgttggaagaaaagaatcaataaagatataaacttgttttgctaaaacaatttgaaccttttaaagattttcttactgatctgattatttgacatgcccaaagcgggatagaaacaaaagaatttgttaagaggcttacttatatacttatgtatagagtttaattcttggattttattttatgagtttgaatattaattttaatatactttactagatcagtaactcacacactattcattctgggaatgtttcatcttcagataactaatatgctaaaaatataagagattccaaaaaagttcaaaattacacatgaaaatgaatctgtagattttaagctttgattagaaagatttgaaaatttattgtgattaaagataagtttaagtacttagataaaacactatggacagatgaaaggaaatctaataggatagcaaatatgtagaacacattggtatttccagcattttatattttagtgtcttcagtttccataggtaccattacttaaataagagtgatttttttttcattctctaaaatggggaatagataaaaatgtgtgaagcaactggtttcttctgtctgatttgggcttctagatgccatgcctggagagtttgtagaagaacatagtattaggacttgccttttttgaagtgtaatttagaagtcaatataactaggaatcttagttggacaatctctactttgttatggaggcactgtgtagagtgagttgcatctagcagtcaggtgaaaatcccatagtcagaatcatggtttagggatataacacagtggccaattttaccttacttttttcaggtcatgtgtctaggtggtctcacttcagttaattttacaggaaattcattaatactcatttgcatattttatttctttttctttagtcagaaaacacttaaaataatttatatattctttccataggatttagcctgtgtatattgactgtcagacttcaggcatacattatttggggatgatggaatacaaagacccacatgattgattatgtaattcaaatttactttctgcgttctgaagataccacttcactgtaccaacaatattttgacttgatcttagttactgtattttaaatgcttgcacaaaatgcaaggtaagggcaagatgtctgtttactgtttgaactgttgtcatcctaagttaaatatgtggatttttggctcattttttgtataactgcattgatctgatgtgtcctacctcagagaactgtgtttatatctttgcatcactttcttatgaattttgcattctattatttgtatccttttattattgttattagtaaatactaaaagcccaatggtcagacattctatctttttaatttttttctttgaggatttggcacagtacttgaatatggttgttacttttaagtgaaagttgttactttatagaaaagtcggcttgcaggccatggagccaggaactgatatgctcaccctctggagctggtcaggtgaagacatatcacccctgcttccagggacagacattggcttgcattgcctgaccatcagtgctggacactcctttatcaagctccagaattgctgcctctggaaacggaatgtagttttgccaccctctcctgaattcctgtggtcctagcttcttctcatccctagcttctgttgaaaatctgtggacccttggattagttggctgggcctatatcctgagcctaagtcctagctacaaggaaggttgagcagagccgtatgtggcattttctacagctacagtgaagagtgagctctgcctcatgaagtaagagattcttcaaacacagaaagtgggttcagatgctgggtactgaacagtgctttctctgggggcagttgctacattcccagagagctgtaaagtgacatgctagaagggacaagaaactttcagaacctgtactaccatagtacaggtgtcacttatgttgagaagagttctagtatatattttgaaaggcagattggtgctaatttatagtttttgctgtgtttaatgttttgagtatatatgatagtgacttagaatttgtaataagtttcatgaaaaaacaaactagaaggtgaaacaataggggaaaatatgtatgctaataacaggtgcaggtcaaaacagtaagatgaaagcttgtttcaaaaatgtagcctcctgataggattgacacttatagccaagtagtcaggtccttttggctggggtttggggaggcctgagtgaaatattgagtctggccatgtgactaagtctgttttattactcaaataatggacccatccacctgatgctcagctctgtatacagtccatctaggtctcctgatgtcgtgttctccttttcccatgccaccttgtaatcccatggtgggttctccttcccaagagcaggtctttcatattcagtatgggtccgtaggaatatattggtatatattataataagtaatgagtgaattaattctaaatttggaacatgatggtcatgatgaattagaaacctgtcacttagttggtacagtggtggggcaggagcagggagggacaggccaaatgtgcacattagagttatctggcaaactctaaccacttttactttatttaccataatggggtggttttgtttttacattttccctcttcattcctatgttttccccattcccccatcactcccattcctagcagctggaggtttctatttgggtatcctctaagtagctagtggtcatatgcctgatgttggtttgccagtcattgggagggggcagaggggtgtgtaccatgacacattttcccaaagatgctgatgatttagtttccaggctagcctacagaagcttatttaacttattatgtctctgagatatactaaggggtagaaaggaagtatagctagctttcccctctctttccaagttacatggttagtcccaagcataattttgaagtaagtaaaatccatcttttgcatcttgtaacttctctttgtgcatcctggtaatccttttgtcattctcctggcatttatagcatacttgaaacttgggactccatggwctttcagaacttttccaggtttaaacagagagctctggggacaatgtatttcccaagagagagaaaggctaagtactccaattattattattcattttgtgtcaagggtatatatcactacgccaaaaccctggggctaacttgcaacctttatgttccttagaaaactttggccttaacattctggtccaagcatggcctaatgtttttacctttgtttccattaagcacacctgggataagccagaattttcaaaaagaaattcttaaataccaagggagaatggtaagaaaatactttttaaaactgacaaatgtattacagagctttgcccatttctatccagttttgattagtctaagcagagcaggtttgtgggattttgcctgtgtgtgagcttggctgggcttacatggagctgactcaagggctagcacttgcttttgggagttgaaatgtcagttttctcaaaactctcatatgccttttggtttctacactcacagatttccaccattctcccacacatgcagggaggaggaataggagcaatgaaaggtgaatttcatgaggactattgttgtattaagaagtgtaatactcaaatgtcttgctggtctgacattggaggtatgaagcagggaatgggatacttaggtcaggtcaaggagggcataaaatagggtcctcagaattggatgcaagtgttgtggcccccatataaaacaaaaatgggatttacccaaaatagaaggctactctgacttactttagagactatgaagcctctattgggctagttagcagctcagacagtggtgggaatttatctaagtatgctgagccttttaatgacagtgctatgacaggacacacagctctggaaggcttcctaatggggcaggaacctcacctgggggagggtggggtggtgatggaggaaacaagttagagagcgcctaggggaggtgaatcatagggtgtgatgttgagatagtttgctcctttccactgagtgcttctctactaaggttgtcttctggctagtaaaggaggcattccaaaatggttcatgcttcaaaatgacatgttttctttccccagtaaaacagttcttttttttttttttttgaatggtcactttttttttgaacttttctgcttttcttattttttcagaagcagctattctcaaactttttggtgtcaagacccttttacctaaaaattatgaaggatcccaaaaacactttgtctaggtgaattatatctattgcacaagaagaataagttaggattttatggaaagtaactgtctctactgttttgcctgtttacatatcttcagtaatgtatacctttttcctctcaaaaacttgagataggatgagtgagatttctgtcattcttggaatatgaaatttatatatagtttggtatagttcagagacctgaattgcttagctgggaatagttgactaggccagctctttttttatgttcatttccatgtaagcaggattctgcttctggggtctcttttctgtcatgatgctttatttgctttatttctatgtcacaaactgattttgtcaatttttatagttttatacgtttggtatcatatagggcaagttttctcatcttgttcttcataagagagctcttcttagccctttgttcttctgtgtaatttagaattagcctgtgcaattgctcataaaacatttttctttcagtttgattggaatttcattgaatctgtagattaaatttgagagaatgtttaaaataatgaattttccggtccttggctaagatcatacttttctatctctttgggtcttctttaatatatttattatataattatacaacttttgtttaaaacattttttgctactgttgtggatagtgtcttctttttgtccatgaawtaaaaggcaattaatttaaaaagatcattttttctgagacaaggtctcactttgttacccaggctggaatgyagtggtgcaatcatggctcactgcagcctcaacttcctagacttcagtgatctttccacctcagcctcccctagtagttggggccacaggcatgtgccacctcactgggctaatttttgtacttttggtagagatgaggtttcgccatgttgcccaggctggtctcgaactcttgggctcaagtgatctgcccacctcagcctaccaaagtgctgggattacaggtaatcacctgtatgattaccatgtccagcctgaaaggcaattaatttttgatactaactttcttagaacttctgagttattatcaattttaaaaatttgcctgcagatttcagattttctaaataggtgattgtatagtattccaataatgatagtttatttctttgttagaaaagaaaaaaaaatgcttatacttttgttttttttcttctttgtcttacttggacctcctttaaaatattgaccaaaggtgagggtagtggacatttttgtcttgtttctgattttaatgttaaagattttaatattttattattatatatggcatttggtgttaatttttgttaggtatatttgatcaggttaaggaagttctcttcaattgccatttatttatttgccatgtgttaaaaaattgtgaatggatattgagtttcrttgaacttttaaaatacatctatatagatataatcatataagatttctcctttaatgatattaataggtacttttcatgttaaaccacttgaattcatgggataagtctttgttgtattttatgtttttattcactggctgatcatatttgctaatatttttttcagagttttgcgtcaatggttgtgagtgagatagacccataattttccttcctcctactgtccttctgggttttggtataagggttataccagtctcctagaatgacctgaggaatgttttcacctcttaggttttctgaagcagtttttgtaatactagattggtttgttctttgagtgcttcattcagtttcctctaagaccatttaggacttttttttttttgcattatgagttttaaatttttcattcaacctctttgaagactatagcactctactttaaaaccattttttggagtcaattttggtaaggttatattttctttctttttaaattattattatactttaagttctgggatacatgtgcagaatgtgcaggtttgttacataggtatacatgtgccgtggtggtttgctgcacccatcaacccgtcacctacattagatatttcttctaaggttatccctcccctagcaccccacctccaggccccagtgtgtgatgttcccctccctgtgtccatgtgttctcattgttcaactcccacttatgagtgagaacatgcggtatttggttttctgtccctgtgttagtttgctgagaatgatggtttccagcttcatccatgtccctgcaaaggaaatgaactcatccatttttatggctgcatagtattccatggtgtatatgtggcacattttctttatccagtctatcattgatgggcatttgggttggttccaagyctttgctattgtggacagtgctgcaataaacatacatgtgcatgtgtctttatagtagaatgatttataatatcctttgagtatatacccagtaatgagattgctgagtcaaatggtatttctagttctacatccttgaggaattgccacactgtcttccacaatggttgaagtaatttacacacccaccaacagtgtaaaagtgttcctatttctctacatcctctccagcatctgttgtttcctgactttttaatgattgccattctaactggcatgagatggtatctcattgtggttttgatttgcatttctctaatgaccagtgatgctgagcttttttcataagtttcttggccacataaatgtcttcttttgataattgcctgttcatatccttcacctactttttgatggagttgtctgtttttttttcttgtaaatttgtttaaattccttgtagattctggatattagccctttgtcagatggatagattgcaaaaattttctcccattctgtaggttgcctgttcactctggtgatagttccttttgctgtgcagaagctctttagtttaactggagcccatttgtcaattttggcttttgttgccattgcttttggtgttttagccatgaagtctttgcccatgcctatgtcctgaatcatattgccttggttttcttctagggtttttatgggtttaggtcttacatttaagtctgtaatccatcttgagttaatttttgtatatggtgtaaggaaggggttcagtttcagttttctgcttatggctagccagttttcccaacaccatttattaaataaggtatccattacccattgcttgtttctgtcaggtttgtcaaagatcagatggttgtagatgtgtggcattattgctgaggcttctgttctgttccattggtctatatatctgttttgggtagcagtaccatgctgttttagttactgtagccttgtagtataatttgaagtcaggtagcatgatgcctccagctttgttctttttgcttaggattgtcttgactatatgggctcttttttgcttccatatgaaacttaaagtagttttttctaattctgtgaagaaagtcaatggtagcttcatggggatagcattgaatctgtaaattactttgggcagtatggccattttcatgatattgattcttcctgtccacaagcatgtaatgtttttccatttgtttgtgtcctctcttatttccttgagcagtggtttgtggttctccttgaaaagatccttcacatttcttgtgagttttattcctaggtattttattctctttgtagcagttatgaatggaagttcactcatgatttggctctctgtttgtctattattggtgtataggaatgcttgtaattttggcagattgattttttatcctgagactttgctgaagttgcttatcaacttaaggagattttgggctgagacgatggggttttctaaatatataatcatgtcatctgcaaacagagacaatttgacttcctctcttcctatttgaagaccctttatttctttctcttgcctgwttgtcctggccagaacttccaatactatgttgaataggagtggtgagagagggcatccttgtcttgtgctggttttcaaagggaatgcttccagttttgggccattcagtatgatattggctgtgggttttttccttctattttactttttttgttgtttttcttattttgatgcttagctcattaattttcagcctttttttctaacagaagattttaagactaaattttactgcttagctgcatctcgcaagtttttatatttgtatgtttgtcattagttttgtgttttctgatttctattgtttactcctttggccatgaattatttgtaagtattaatttttttactgacagttttttactaatatatttcaaagctctttgttaagtatatataagtttagacttatgtcttcctttataattttaaaagtcattctttccttatgtacttatatgccatttccttatttctacttaagtctatatgttggatgcaaatatagctaaattggctttccttgaaggcctcttttaaagtcttttatttgcaatatttttgtgtccttattttttaagaatgtcttatgaacagcatatcaatagatttcttaaaaattcagacttttaaagataacagggaatttggttcacttagatttattataattattaatatatttgtgattatttttagcattttaatgtaacatttccatttctgttggttttttttttcctcttttttggtgatttttttgagtttttccttctcatttgttttgtcccctccactagcagggagcttagttatttttaaaattgtttattctgttattttaraatatatgtttgtaaatatgcgtgtgtgtgtgtgtgtgtgtgtgtgtrkatatgtatatgtccacatatrtttgtatttatatatgtgtatsttaacaaagtctacagttattcaatattcttactctccttgtgaaccatttaggtcatttttgttattctgcttcttgtgtttacaaaattgctcgtatttagatttttaaaaaaactttctgaatcagataattcttactgtcattaatacaattattatttattttcatttacatacctgtttttcttttcactgtttattcatgtatcatagattttcctctagtattagtttcctttttcctgaagtgtacatcttttaataaaggattattaagccctctcatttttttgtctgaaatcttatgcttactcttaagcaactgtaaatagcacactatctgattcctgttgttcaaaagaaaacataaatagtaagataaacttagtataaaattttacttcttaaaatatctatcaaagtataatgatttgtgtattatctattgctttgttttatccatactcctatactgttcttgcgacatggataatcaagaataacctgtaggagattcagaatctttttttttcctattacaaaattagtccaaaatagttctcctatttctttttattcccactggatagtactttcttgcttgctctaattgctgttctgttctaaaaaaatgtctgaacttgacttgtgttaattttctttagttcccttaactgtctgggcactgaaacgggtatagctattctcaatgcattctcacttgtcacaaatttgttattttgtatggtttagaaaatcagtgcttatttgaagcagaactaggacttaggagttcttcatttgcatatttgtagttgtcacattgtgataacttgaatgactaagtgtcactaaagtctaccagtatcctataagattgcctcattttctgtgtcagtcttgatagagactttggggccagtattgttagagttggggaagtttaggtcttctgtgcccctgttgtaggatgagagttcctgtcttgctttctgtgtttggttacctgccttcatgattacctggacaactttaactgggatctcgctatctgctgccaggtttgcctgcctacttgcctacctgccagcctgtacctgtgacagtgttgctcactctgtcctgttgcctgacactacgttctccagttactgctggcccctagcttggttggatttttttcatcagtgatgctggttggacagacttccaaggaaaacatttctgtaggcatgtttaattttctcagacagcccattttgttggtagttgaacccttggctctaaagtaccggtgagcatttcagaaaggacacaagctttcaagagaaaattagctgcaattaagaaccttctttttattgtaaacatattgagtgttaatattctttggttctagtttatttctaaacaaaaacctgygtgccatagaagtagaattttagatcttttattttctatgtaaaggttgatttcttaactttattcatgttgaatttcatattattctatttaatttatctaaacaaatggattattttcctacagtactgaaatactacctcattgatttatttcattttctggttgttacctggtgattaatttctgtaaatcagcagaagtaataggactatactgtaatatcattgtactgtagtcatagatacttggaaagctgaggtaggaagatagcttgagctcaggagttggaggctggcttaggagttgaaggctgcagtgagctatgattgcgctactgcactccagcctgggcaacagggtgagaccttgtctcctaaggaaaaaaaagtggtatgtagagatggtcagctccccgaaggcaaatcttattattatttttaatttcacagttactggctcagtgcctacccatagtgcatagtcagtcttccattaatgttttgaatagaaatcaaccagatgagctagcattaaagtttggattcagaattttcatttatcaattgcagaaatataggtaattataagataactgcatmctgaagtaatttatatccagatataaatgtacgtgatcagtttgatcagttttccttttcacaaataaagtgttaaacatcaaagtggtttttagtataaatgggacttatgaaatggcagagttctctgccataatttcacatcttattttggaacaagtggaagatttgtttccttgtgttctttattttaaagctacactacagttttatcggttaataatagacttattcttaaggcactgcatcagatagttgaagggaagacatagtttttgcctcagtcactcatgtgctgtacagtttaaagccatgggacagcctggacttcagtctagctgcttgggtgtcatgcttgacaggggttaaaacttgaagttccttatctcttaaacatttttatgtttctgagttcaatcctgttaagattaytgacaacattcttggaagactgtgtcctaaggaaggaagaattttgaaaataaatgattttgctagatagaatgggagaaaagaaattcttggagtacatatgggaggatgaaagtcagaattttagggagttatcaggaagcaaaagtaagtgtgactagattggcagttatggttagaactgggttccaaagcttagggaagggagatgattttaattccttttccaaatgctgactgttacctttgaaattataggatttgggagcaaacgttcatcttttaacaaaagaaagaatctgtattattattctttctgttgatttcatggagatatacaatgcctagctttggaggagttaaaaattggtgcctgagatatcctacttagcccactttactgtacaacccctttcttcacacttctttttgtaggaacgacaggaatagtaggcagtaagccatactaactaaagcaattttaattgtttttctacctttgactaactagttatgagaaagcaactatatatttgagaggcctgctgtcatgatttctgggtagaaatttcataagcagctttctaatctactcatttttagattagaaagtggcttagtggtaaggtactagtgttagacccttattctttattaatcattaatcagtttcaaatgtggattataagtgccctttgaggacaagacatactttgtattttgtgtgcaaaaaaagcctaaaatgtggttgttggtctcagtagatccagcacttgcctagaacttaataaaactagttaaattttgtgaatgatttgccggaaggagtttgtgtatggatagtttctcacctccaaaccacttgcctaaatatcacttccttggagacctcccctgttctgcagtttaaattggcttctcaggctctatcatatcactctttttatttccagagtgtaacttatcattacttgatgtttcttcttcatttatttttctcatattagaacttataggttccaggatagtagagcccttgtctatctcattcacctctttatccccagtgcctaggccactgcctagcacaaggcaggtacagaaaaaatattcaccaagtgaatgggtacattttcttactctcaccttcttttttcttttttgcttacttttatttgttagagttattatgttgttatttgttagagttattatgggaataaataataggtgtgccctaaaaaataatgaacagccttatcaaatcagggctctgaggtaaatacagtttcattaagtcatcagcaatgttaaattaagctttgagattgtattcgctctcttgttacattgattatatatttattttcattcattaaaaattgtaacttgggtaaaatcccagactgtataaacaattcctttttaaaatggatttggttattttcaaagaaaagatacattttctgtattaatgcttaaatttccytaagagcttttatgataattaagcttaaaataccaaagatggatatggttacatattttgctgatttcaaagtttggagaatagttaatgaacaactactagaaagttaatagaaatagttaatggacaaccacttgaatgtaggaataaaattttcatttatatccaaactaaatccagcatatgataatggaaggacaactcttgacttagtttggatgtaaatgaaaaagcacaaaatgttgcaagattagtatttcattttgcctatggaaagaatcatttacttagatttatcaagttacttagttactcggtatttaataactacctatagttggaggattctatgaattcagattctataaaagaaatagtcacttctaaaacctgtcattaaatttgctttatttaatgtgatgtgtttggtgttttctgagcaatagtggttgtggacataaaaaaatgaaaagattattttgattttaaaaattaatattaaatttattaatgttacagattcaaacacctagttttatctttggcttctaagttctgtttataaaacacattattcttgttataagtatatcaaattttaaacatttaagggtttttgaatgatacttagtcatttataaatttaaccacattaaaccatttaaaactctatacatttaatatatttgatttttaattacttttctgagaattgaaaaaattttatgcatgtcacaaattaaacttacaaatatagtgactgtaatgttctcttaaatatgtcaatactatgtttagtgctagtaagatttctacttataatcacaagtctcaatcagttattcaatttttaattttaatcagaactacaaggaattattgtcctgtcactctaataggtcatattctcttataagttacacatacttaaaatatgattggttttgttattataaaatgttaacagtatgaatttgattctcctaaatatttcatattttaaatctcctcagargtatattatcccaagcaattttctcaattatttgargctgcgtgaagaatttgagcaagatgttcatcagatttttgttagttcatttaagatatatcaaactttatttattgataacaggcatgtaaaaattaatttctgcttcaccatgtggtctatacccctattctattcatttgtagaatgttgtctgtaatacttgattggattttctatttctttggctgttaagataattaaataccttttcaccaagctttaaagatccttgaactatatggacttctttctctctctctctttttttttttttttcttcatgttcttcctatctggcagaagcacagaaatcttactgttattaaaatatctgattgaattctggcactctcttaagactgttcagttataacttacaagatgattctactgatcctaagtaaaactgatcagtgaaatcttttagtcctttgacccttcttccagctttgtgtgtgtcctctatgctgagggagggagggggaaataagagttctcttaaaaagtacactgatactaatcctatagtgtcctttatgttataaatgatagtctgtgttcctttcagttgaggtcaaaataaaatgaagagaaagctcctgaaaccctttttgaaagtaggggtagaaaaaggaaataacactaaatgcctacaccttagcagatgttttgcatagactatttaatttaaattgatttcattcttaccataaacccccaggtaagtaatattaatccctcataaagtttatttacacataaggagactgttattcagtaaagttaacaacttttcaggggtcataaaactattaagcaaaggagccaaaatttgaatctagatgtgtttattttttttaaatccagatctcttttttttaatccagatctccttcgtcagaagataaatgacaataaaattaaaattgtgttcatttaaaagatgtttcttgtggctatgtttcttttcatttgcttgttttccctgcagatgtatttaatagaaaagcaaagttccaatgtgctttctaaatcatccctattggttttgtagacccatttattggcagggaagatacatgttctatagagctggcatctgcttgcaggtttctatagcctttcctctatgtaaattagtttgaataggtaaaggggagaattgagtagtgatatgatgtatttagtctggaaggaaaattgtaaattcactaacttcctgactcttttaaatgttctcttctccttcctctgctttataagaaaacaagactggttaataaaaaaaacaaaacttataaataaatgacacatttgcyttaaaagggaaacttgaacyttaatgaggggtggtttattttttcagataacttgggtgtcttttggttgtattgaatgttttgtgcttttcaaaatcatatcatgaataataatattagtattattctaataacccagtaggttgagtatactaggtattattcccatttcattaataagtaaataaaaaaaactgatagcctgagtcatcgggccggacaaattcagagccaaaaatctataatattttaagcaaaaggttatgtttgaaagactgtgaggttccttatatgtataaaattggatagatttaggagttctatctggttatctttataggaagtttaagtattcagagttaaggttatttttagaaatgactgggtgcccttttgcaaaaactgttttgaactatttatatgaattgtagtatcaaatagtgccaaatttggatacaaatrtccttttaggcagcaaagtactatttaaagtatgaattaaagtatttggaaaatgttygcccttatcgtttaacacattcatgttttactcgtgaattaagcacaaatcgtagaacagatttgtattggtacagccaatgtatttgagtggagcccaagtattgatatgtcagagggtggtcattttgcyttatttttttaatcaatattgttgactattttataaatatttcaatgcctactatgtgcctaaaagtattctatgagaaatgtattgaatctactttttgaatcttcaytgggtttcgggatagaaactttagagtcaaatgaattttctgggattcactgtacatcaactaatcccctagtcttaatttaaatcttttcaacatcaggagtgacaggtttttttgttgcaggtcacctgtgaatgggtcctttatatagaatgagactttaaaaaatatttgtttatgtctaatccatcctcacattaactcatggtatgtttctgggtagtttgttgtctccaaattttataaaccacaaaaatgtgytgctgctgagatgtcagtaattaattatttttataaataatcttttgtcaactctggtgccttagctgttcttaggtttttaaagaatatcctgataaagcaaagttctcatatattattatattggattgtcagttgaaattagtggtttttttaattaagaaaaagccactcagaattttgtaaaatattgtaaaatattcaagggttttccccatgttgtgaatgtatgacatatgactctaaattggatttctttaacctctttctcataaaaaaaatctcacttttctgttaaaggaatgcagaagttattccttataaggaaaacatcaggagttctatttataagcgtatagtattcaatcaaaaaactcatgttgaaaattcagataaatagctagcaaaatcacacattaaaaaatacattgaaatgatgtatgtgtaatctaaaaaaaattaatatacgtgaaatgcagtgaattccaccttaattttgggcttgatcttgggagtctgagtgactacagtgtcattgacttgagcatgaaaggactaagtatattcctgctggagtcaagctcgcatattaacacagctccctttgaatttctgtatctgtgggttttggtgtaggcagaagacttgccacagaataacaggataattcacagtagaactttcctttcctggatttgcttcctgttcatacatgctttatcagtaaaatgacttacttttaaatacatgaagtcacagaattgaaaattcaaaatagaaattgcttaaatacagcaaaaaaatctagttattcaagatacttggggaatcaggcatttgggtttatgaaaccacatagccataaaatataaacaaacaattctcaaaatattaaaatatatttaatatggaaacttctttgaataagtagtttttgtgtaaatgtgacattttaggaatttgaaatgaattttgggtttaccagttatgccacacttaacttggattggtgaagcatggaaatgaaaaccctttcttaatgagactttctaaattttaatatgatggataactcaattttaaagtatagtttctattttttatagcagctttattgagatataattcayataccataaaatttttagtatacttgcagaattggtcagccacaatcaattttagaaatttccatcaccccatccctggctcacattagccacaggcagctgctaatcatatgtttttttctggattggcttgttctgtacattttatgtaaatagaatcatataatatgtggtcttctgtgtcttctacctttcacctaacaatgttttcatccatgttgtagtgtataccaatatttagttcctttttgtagtcaaataatattcattgcatggatatacatgttgagtttcccttttcagaaatgcgtgggaccagaatgttttggatttttgattttttgaagttttgaatatttgcaatactttatgtattaggcaagcctttgtgacatattcaacaatatctttacaccagatagtagagaataagcagaaaaaccacaatragtgatgcacataggtcttggcctcatgtgggggcattgtggggaacctggcattggcatatcccattggcatatccacctgcacatgtgccattttattaccctttgtctgagtgtttgtgtaggagaataagggcatgtaggaaaatatatattccaactgaagagggttggaggggtcttttttcccttggggacactgactaaattgtttattgtgcgcctgtgttctgaatgcaacttgtcacaagaagtcaggtgtggaattttccatttatggagttatatttgtgctcaaaatgttttgaatttctgggttagggttgcccaaactgtaccatattttatttatccatttatcagttgagagacatttgggtagtttcctcattttggctgttattaataatgctgctgtaaacattcatgtggaaatttttgcagggacataggctttcttttttttagataattatctgggagtgtatggttaatatttgaaagattaattttacttttttaaatttatactttaagttctgggatacatgtgcagaatgtgcagtttacataggtatacatgtgccatggtggtttgctgcacccatcaacctgtcatctacattaggtatttctcctaatgctatccctcgcctaaatccccaccygctgacaggccctggtgtgtgatgttcccctccctgtgtccatgtgatctcattgttcaactccaaattatgaatgagaacatgtggtgtttggttttctgttcctgtcgtagtttgctgtaaatgatggtttccagcttcatccatgtccctgcaaaggacatgaacttatcctttttatggctgcatagtattccatggtatatatgtgccacaatttctctatccagtctgtcattgatgggcrtttgggttggttccaagtctttgctattgtgaacattgctgtaataaacatacgtgtgcatgtgtctttttagtagaatgatttgagtatatacccagtaatgggattgctgagtcaaatggtatttctagttctagatccttgaggaatcaccacaatgtctttcacagtggttgaactaacttacactcccaccaacagtgtaaaagtgttcctrtttctccacatcctctccagcatctgctgtttcctgactttttaataattgccattctaactagcatgagatggtatctcattgtggttttcatttgtatttctctaatgagcagtgatgatgagcttatgtttgttggctgcaaaaatatcttcttttgaaaagtgtctgttcatattctttgcccacttcttggtggggttgtttgtttttttttcttgtaaatttgtttaagttctttgtagattctggatattagccctttgttagatggatagattgcaaaaattttctcccattctataggttgcctgttcactctggtaatagtttcttttgctgtgcagaagctctttaatttaattaggtctcatttatcaattttggctttcattgctattgcttttggtgttttagtcatgaagtctttgcccatacctatgtcttggatggtactgcctagattttcttctagggtttttatggttttaggtcttatgtttaagtctgtaatccatcttgaattaatttttgtatatggtttaagtaaggggtccagtttcagttttctgcttatggctagccagttttcccaacaccgtttattaaatagggaatccattacccattgcttgtttttgtcaggtttgtcaaggatcagatggttgtatgtgtggcattatttccgaggcctctgttctgttccattggtctatatatytgttttgggtagcagtaccatgctgttttggttactgtagccttgtagtatagtttgaagtcaggtaacatgatgcctctagctttgttctttttgcttaggattgtcttggctatatgggcttttttttttgtttcatgtaaaattaaagtagtttttttctaattctgtgaagaaagtcaatggtagcttgatggggatggcattgaatctataaattactttgggcagtatggccattttcacaatgttgattcttcctatccatgagtatggaatgtttttccatttgtttgtgtcctctyttatttccttgagcagtggtttgtagttctccttgaagaggtccttcacattcctttaagttgtattcgtaggtagtttattctctttgtagcaattgtgaatgtgagttcacgtattatttggctctctgtttgtctcttattggtgtataggaatgcttgtgatttttgcacattgatttttttatcctgagattttgctgaaattgcttatcagcttaaggagattttgggctgagaccctggggtttctaaatatacaacatatacagtcatgtcatctgcaaacagagacaatttgacttcctctcttcctgtgtgaatacctttatttctttctgccctggccagaacttccaatactgtgttgaataggagtggtgagagagggcatccttgtcttgtgctggttttcaaagggaatgcttccaatttttggccattgattatgatattgactgtgggtttgtcataaaaaactcttcttattttgagatacattccatcaatgcttagtttactgaatttttagcatgaaggggtgttgaattttattgaaggccttttctgcatctattgagataatcatgtggtttttgtcattggttctgtttatgtgatggattacgtttattaatttgcctgtgttgaaccagccttgcatcccagggatgaagctgacttgatcatggaggataggctttttaatgtgctgctggatttggtttgccagtgttttattgaggattttcgtattgatgttcttcaggaatattggcctgaaatgttctttttttattgtgtccctgcagggttttggtatcaggatgatgctggcctcataaaatgagtttgggaggagtccctctttttctgttgtttgaaatagtttcagcaggaatggttactgctcctctttgtacctttggtagcatttggctgtgaattcgtctggtcctgggctttttttcgttggtaggctattaattactgcctcaatttagaactggttattgatctattcagggattcgaattcttcctggtttagacttgggagagtgtatatgttcaggaatttatccatttcttactagagtttctagtttatttgcatagaggtgtttatagtattctctgatggtagtttgtatttctgtgggagatcagtggtgatatcccccttatcatttttgttgtgtctatttgtatcttatccctttttttctttattagtctggctagtggtctattttgttgatcttttcaaaaaagcagctcctggattcattgatttttttttgaagggtttttcatgtctctgtctccttcatttctgctctgatcttaggtatttcttgtcttctgctagcttttgaatttgtttgctcttgcttctctagttcttttaattgtgatgttagagtatcaattttagatctttcctgctttctcttgtgggcatttagtgctataaatttttctctaaacactgctttagctgtgtcccagagattctggtacatttgtgtctttgttctcattggtttcaaagaacttatttatttatactttaattttgttacttacccagtagtcattcaggagcaggttgttcagtttccatgtagttgcgtggttttgagtgagtttctttttttttgttttgaggtggagtcttgctctgttgccaggctggagtgcagtggtgcgatcctggctcagtgcaagctcttgagtgagtttcttaatcctgaattctaatttgattgcactgtggtctgggagactgtttgttgtgatttccattcttttacattttttgaggagtgttttacttccaattatgtggtcaattttagaataagtgcaatgtggttctgagaagaatgtatattctgttgatttggggtggagagttctgtagatgcctattaggtcaacttggtccagagctgagttcaagtcctgaatatccttgttaattttctgtcttgtttatctgtcaaatactgactgtgaagtgttcaagtctcccactattattgtgtgggagtctaaatctcttcgtaggtctctaagaacttgctttatgaatctgggtgctcctgtagtgggtgcatgtgtttttaggatagttagctcttcttgtcgcattgatccctataccattatgtaatgcccttctttgtctcttttttttttgagacggagtctcgctctgtcgcccaggctggagtgcagtggcgggatctcggctcactgcaagctccgcctcccgggttcacgccattctcctgcctcagcctcccaagtagctgggactacaggcgcccgccactacgcccggctaattttttrtatttttagtagagacggggtttcaccgttttagccgggatggtctcgatctcctgacctcgtgatccacccgcctcggcctcccaaagtgctgggattacaggcgtgagcgtctcttttgatctttgttggtttaaagtctgttttatcagagactaggattgcaacccctgctttttttttgctttccgtttgcctggtaaatattcttccatctctttattttgagcctatgtgtgtcttagcacataagatcggtctcctgaatacagcacaccgatgagtcttgactccatccaatttgccagtctgtgtcttttaattgtggcatataacttgtttacatttaaggttaagaagttctcctggataatatcctaaagagtgttttccagcttggttccattctccctgtcactttcaggtacactaatcaaatgtaggtttggtcttttcacatagccccatatttcttggaggctttgtttgttccttttgattcttttttctctaatcttgtcttcatgctttatttcattaagttgatcttcaatcttggatacgctttcttctgcttgatcgattcggctattgatacttgtgtatgcttcacgaagttctcgtgctgtgttttttagctccatcaggtcatttatgttcctctctaaactggttattctagttagcaatwcatctaaccttttttcaaagttcttagcttctttgcattgggttagaacatgctcctttagcttggaggagtttgttattacccatgttctgaagcctacttctgtcaattcgtcaaactcattctccatccagttttgttcccttactggcaaagagttgtgatgatcctttggaggagaagaggcattctggtttttggaattttcagcctttttgtgctggtttttcctcatctttgtggatttatctacctttgtgttttcatgttgacctttggatggggtttctgtgtggacgtcctttttgttaatattgatgctattcctttctgattgttagttttccttctaacagtcaggcccccctgctgcaggtctgctggggtttgctgcaggtctaccccagagcctgtttgcctgggtattaccagtggaggctgtcaaacagcaaagattgctgcctgttcctgcctctggaagctttgtctcagtggggcaccttccagatgccagtcagatctctcctgtatgaggtatctgtcgacccctgctgggaggtgtctcccaatcaggaggtacaggggtcagcaacscacttgaggaggcaatctgatgcttagcagagcttaagcactgtgctgggagactccctgctctcttcagagctggcaggcaggagtgtktaagtctgctgaagctgcgcccagagccaccctttcccccaggtgctctgtcccaaggagatgggagttttatctataagcctctgactggggctgctgcctttcttttggagatgccctgcccagagaggaggaatgtagagagtcagtctggctattgtgcctttgctgagctgtgttgggccccacccagttcgacctttctggtggctttgtttacactgtgagggggagaaccgcctactcaagcctcagtaatggtcgacacccctgcccccaccaagctggggtgtcccaggtcgacttcatactgctgtgctggcaacgagagtttcaagccagtgggtcttagcttggtgggctccatgggggtgggatccactgagctagactgcttggctccctgccttcagccccctttccagggagtgaacggttctgtctcacaggcattccaggtgccactggggtatgaaaaaacactccagcagctagcttggtgtctgcccaaacggccatccagttttgtgcttgaaacccaaggccctggtggcataggcaccaaagggaaactcctggtctgcagattgcaaagaccatgggaaaagtatagtatctgggctggagtgaaccgttcctcactccacagtccctcacggcttcacttggctagtggagggagttccctgaccccttgcacttaccgggagaggcaatgccccaacctgctttggctcatgccccaccctgctttgtctcactgtctgtgggctgtacccactctctaaccagtcccaatgagatgagctgcgtacctcggttagaaatgtagaaatcacccatcttctgtgttgaccttgttgggaactgcagactggagctgttcctatttgaccatcttgccagccacctttttttttttttttttttttgagatagagtctctctctgttgcccaggctggagtgcagtggtgcgatttcagcatattgcaacctccgcctcctgggttcaagcgattcttctgcctcagtctcctcagtagctgggactacttaattttacattgttaagagtaaacagggttctgtattctgtatataaagaactgacataaggaagcatccttgagtagtggaaatgggttttctaaccatggctttagtatttaaatcttctgtacctctaatttcttacatagtaagtggaagttcaacaactggaagatctctgtggtctttagcgtcctcaccctctctctatgctttctcrttcagcaaacatttgtcaagtgtctactctgtggcagaatttgtgtaagaacttggggatagtctgtcttcagatgagctcagagtctagtaggagagaggggaaagggacaaaagagaaaaaaaagcaatacttgtaagtcaaccgttagaagccagtgtggtgagtgcctcaagagtgataatcacttagtggtggaccactgaggagcctcccactgggggtcagggtgcagtgggggaggtctaggaagatttcttggtagaaatcacatttaagtaatcctcaggtagtcagccaagtgtattaatgggcaaatggcattttatgacaaaagctacttggtaatcatttcatgcttgaaattttggataaatgaattgctaaagatgaccaagcaagaaaagactgcaacgctttttttctttattacccatggccagatttcctagttattttctcattgcaaaagaatgtgaaacaaactgattaagtgtaaaataactcttaactcttatttagactatcrtagtcatcttcaaaactctttgagatcatcttgagaattcacagttttctattctttttgttgctagcaggtgaaattatgtacctttggaaccctctgtatgggtcagtctgtggtactcacagtagtctttatataggagtgtttgcatgtgattgcaggtcagcggagaagcaaacaaagcaataaccaaaaaaggtgtgctgaaagttgctgtttcaactcatagacatagtaatctagttgaagtattttaacaatctcttcagtgctattcagaagacaaatacattgaactttgttaatctattgagattttcaggatttttaaattggttaggatataagaattctttcttcctaagtttttccctttgctttcatagtcatttcctttaaaacctgatttaaagctttgtgttgaagaaggcttccatcattacaaactctccttatgcaatttatttacatacttcagtacaacttattacccagtttgtattctcataatgagttgattctaaattaaaatacagagatatttctgttatggccatgatgacccaggcacacatagaaggtggctgtgggatgtgaataataatgcctaattttaattcataaaagcagttgtctgttttttcatacaaccttggtattgtactgtacttattactggtcttttgtactgtgtatatatggtcttgttatttttattaggtagtttatctaagttttagttctagttatgtaagtggataagattcacattgattttgactttcatgatttattacattaatgcaaatcaaacattgaccagagagaaaagcaacaacctttcttagatgaaacaatgcattcctaacttatgctgttaggaccaattttttttttttttccctgcaaatgtgacaggcttcttgttctctagcagtgacctctaccttggccctgactcagctggtatgatggttctttgtgcaaatattttctcaaccttcaatttgtcacaagtagctaagcattatccygtgaataatagatttatgattttgctagcattagcacagtgactaggatactaacttattccagctgtgtttcctgggtttgagttttcttcccaggaactggcctttctgagcaagaagagaatgaatggccgattaagtagatttgcagtaggtgtacactggcagcctagaggaagattaatctgaagacaggttgagagcacctggaacattttaggatttaggtgatctgactattaagtgttgccaagtcatgggacctggtaactaccatgttactgatggggagactggatcttagagagttagaggatcttgtcaaaaagtcatcccattctaaatttaatacactcttactgaatccaagtttcatgttctttccattccataacagttataaagaccaatggaatgaatagattcttaatggtaaggaaataatgacttcctggacacaatatatttttaaaaaccggaagtagaaattacttcgtacttttccaggatgtttcagtcatttaaaacaatgctgagatttcacttccttcacttttttgctttatgagattttgtcccttgtcttaaatactgtgaaaacaagaaacctccacaaaatattgaagcaagaaatatatctaccacatcataaaaataatgtgtttttatattttggttattgtttactaagttattttctaccttaggttataaactagagttgaaaagggctgaactgcttatttttaaaaagtgatttaataagattattgtttaggagatgtagagagaatgataggctaaaaaaatgccttgaattgtaatgatgtcatgtgttgagaaccaaaaagcgagtttgggacttaagcattcccttgaagaatagatggataagaaaaaaagtgaacgttatagattttggagagttgaactgttggtggtggagaatgacagactaaaatgaatatagtaagtgagataggaattagcatgttgaatgaacatttgtaatcagagtagataattcataggggacaagagagagatagggattagatagtgtcagaattaggaagatgacctttatttatggtatataagtcaagttatagaacagagaaaacaaaagtggtgttttagaaattttattttttttctttctttctttttttttttttttgagaaaatgtctcgctctattgcccaggctggagtgcagtggcacaatcatagctcactgttgcctcaacctcaaggctcaagtgatctttccatctcagcctcccaagtagctggaattacaggcgcatgctgtcacatccagctaattttttatttttcgtagagacagggtctcattatgttgcctaggctggtctcagactactgagctcaagcaatccttccacttcagcctccctaagtgctaggattgcaggcatgagccactatgcctgacctcagaaattttaatttgaggaaatgtagacaccatttaggaaattgattgtggttttaggatcctgcactctggcaacaatagtaggctttgagagatgaaggatgtgatattggatgaactgcatgagttaaggatgaatctgagatagaggttctgaaacttgagtgtgtattaggatcgcctaaggagcttggtaaggttctgattttggcaggttgggtaagaggacagaaattgcatttttaaaggcagtctcggcatttctgatgtaaatggtaaacaagttcctagccagagacaccaggataatcatagatagagaaatggaaattaggagaatagttttataagatgaaatggtaagtttagttttggataagttgagtgttatctttatatattgcaatgagtttgatgacaggacatccaaatggaacgagctgtccaataaaaatagatctttgtgttggattgtagtgtgagagtggatgatgtatcagaggaaggtgttggaaaaagaacaagagcatgtccttttcttctgattaattcatctaagaaacactggggcagtgatgggtctctttagttacgtcaggtcaacacagtttcattcttgtttctcttctaaaaaaacattgacgcttcttgttttattttcttaactcctgggaaacgtacataaatgtctttgccacagtcaagctggtcttgactggataacagcattttcaatcactaaagtcagctatttgagttgttcagtagaggcacattaaaataactcataaataagtcaagacaagttatagagaagagaaagttatagagaagagaaaacagaaatggtgttttaatttgaggaaatatagacaccatacaggaaattgattgtagttttaagatcctgggctctggtaagcagtaatagaatttgagaggaaagtttatagtatctgatatgtccctatatataaatgattcttaatccatatttttcaggacccttagggagcttttcagataagtttagctagcatttttaaattattgaaaaaatgaactcttctcttaatttggaaaaaaaatactgtgttgcagtctttagaagaatcttagtatataacatactctggtctcaaaatcaaataagcagtgacattgtgctataacctaaaaattgatatgaatcactgtgataaaggaagtttactctagtttattcatagatgaagaaaagtagcctggtagcttgaagctgttcttttagctttgctgcagatttataaaatgttcaacatttccatttacctctggacaggctgtagttttttttgttttttttttgttttttttttttttaaggattaagatccttgaagctagaggtctttgaaactgcatctgagtggaagaggtctagtgtaaagtgactcattcttaaacatattcagaaatgctgtgggccaaattgaatcccttgaaatataacctgtatacacagtttccagaacatgagctagttgtgtttcagaagtttatgtgtaagacagctgtttggaactcagaacacattttttttttccttattgaagcagtacaaaaattactggctatgttcccaggccagttcacaaatatttttcacccaaatgtactttaagtattaactgtacaatttccatttattgagttgatatttttgtttctgtgggaaaatatatcccaaatcagtttgaaagaaataggttatctttgcttagctggattggggtcttctcagaagatgtcactggtcattcataaaaaccagtaatttattaattgtacatttttaaccccttcctctcaattataaaggtacaatttcaggttattcattcccctagtgattactattttagaaagtagccccggtttctctgtcttcctctttctttactttctcttttctctctaaatgttgggtcattattaagtttatgtctctatatcagggattgtgtgttcaggtttggttacaaaatggttagtgctcctgtawtttttttagccagcattgattaacagagttaatcactttctgtctttaaaagagactgataagggcttatgatataaagtttatttgggaaattatctgttatctgtcaagtatggtgatgactggtattgtacaggacagaaaactaaaatacctactaaattattaataacataaaataatacaaaaattattacggcattgtttattatgttggattttagttctttggtgagtcatgcataatacattatctgttatatttaacatgttttattcttttttttttttttttgagatgaagtctcgctctgtcacccaggctggagtgcagtggtgtgatctcggcccactgcacctctgactcckgggttcaggcgattctcctgcctcagcctcccgagtagctgagactataggcatgtgccaccacgtctggctaattttttrtatttttagtggagacggggtttcagtgtgttagccaggatggtctcgatctcctgacctcgtgatccacctatctcagcctaacatgttttattcttaatgcatattttgttttgactggttgtggttggtgaatatatgtgttcattaaataaaagaggttctttttagcagggagtaaggctgttttaacttcagcctcagggaatgttttactttgatgggatggctgttattttgaatggaatcaaggatctggaatcttttatttattaatcattcactctacatgtatttattgagtatctgcttggtgtcaggctctattctaggtattggggatactacagtgaccaaaacagacatggtcccttctttatgtaggttatattcttgctggggatctagagaataaatgagaattgaataagtaagtgtgtgttgcgatatattgggaaggtagatccaacttggctaacagattggctatggtatatgagagtaaaggatatcagccaggtttttggtctaaacagctagaatcctgtaattgcctttccctacagtggggaagactgaaggatatgggggcttgtgggagtaagaggggatcaaggatatggtttttacatattaaacttgaggtgcctgttagacattcaaattgaggtgttcgaaaggcagtttaggggagatgtctgggttgaagagaaatttggcagttgtcactagagagtgaatataggaaaagaagagattcgagtcacaagccccagagctctccattattgaggggctgggaagacaaggaatcagcaaagtagaccaagaagagcaactgtgaccatcaagaatagctgaggtagatggttccccaaaagccaagttaagaaacatgtttcaagaaaatggggtgatcagttttgttaaatgttgctgatggttcgactaagatgagaattgaccattgagcaacattgaagacattggtaatctttgaatggagtcattttcatggagaggtgggacaaaagcttgaatggggtgagttcaggagagaatttagaggagataattaaattgaagattaacaagtcagactgtttatcaatctgtagacaattgacaatgagttcctgagaggatggttgggatatgaggccaaatcaggggatatagagaatgttatggtgataagaggctaggtggtgaaggatgacttgggtatcttggtcttctttttcattttcttttttttttttttttgaaatggaatcttgctctgtcacccaggctggagttcagtggcrtgatctcggctcactgcaaccactgcctcccaggttcaagcgattcttctgcctcagcctcctgagtagctgggactacaggcrcgtgccaccatgcccggctaatttttgtatttttagtagagatgggatttcaccatattggccaggctggtcttgaatccctgacctcatgatccacccgcctcggcctcccaaagtgctgggattacaggcgtgagccaccatgcccggcccatcttgggcttcttgtggtgactgatatgaaggggataaagtgagtgtttagctccagtgtcttcaaagtagattgtgatgcaaagcctgtgaacgttgagggatagggaatggggagtggcataattctcctaggccataaagtgatttcttataagatacctagctaaggaataatctaggagagtaaattgtttcagtttacctgagattgaattgtaccaaaaagccaaattatggctatctactaaatatagagcctgcatgtttttaattgatttatgattatagagtagactaaatttttatgtgacatgtaaatggctactgaaagaataaatgcttgaaagactgaataaatattacagattctccttcagtaaagttatgaaagcctgataaataattctaggcatgatagtatttttcctaaaaacttactccttttcttggaggctgcttaaaaattttacattgccaattcatttctcgacacttttttctatcttgatcttttttttgtgggctgcattcattttcattcagtggtttcttcgctgagtgcttttcccaaaataaacaccagtcatatttagaatgaaataatgacctagtgtaagtattctgaatactgtttcaacttttcaacatttctgaaaattctagactgatttattttccagaatccatttaatttagatgttcagagtagtgcttcttcttaaaacatcaacagtttttgttttgttttgtgagacacggtctcgctctgttgcgcaggctggagtgcagtggcgtgatctcagctcactacaaccttcgcctcctgggttcaagctattctcctgcctcagcctcccgagtagctaggattacaggcatgtgccaccaggcccagctaatttttgtatttttggtaaagatggggttttgccatgttggccaggctggtctcgaactgctgacctcaagtgattcctccgccttggccccacaaagtgctgggattataggcatgagctaccatgtccagccaacatcaacatttgtagtgatagaatttgagttgtttagatcaagtttatggtgctttctgggcaaattctgaagggagagacagttggtttactattagagtttacttgtttgagcaaactcttttattttgttaatcagatttgtcatatatttgtagtgccagattacatttttagtttttctgcaataaattgtattaaattcagtttattaatagccaggtatatcctgtatatctccattagtgagtctttataggagagtgtagctgttaatcagtgctgtctctgtgaattttcttggagatctctcaatgggatttgtggtttgagtgtatcacccttaggtttttacaaaagataataagcactaatgttaaatgctacttagcaaatggatgcaaagctttgacagtaattttaggttatttctagatagtgtggacttaaaaaaagytttttagaaagctgttttcagttgacttagagttacttgtaatctgttattatcaaggtcaccccatggaagatctctgaatacccaatgaggcaagtgtcattattacctcttaattttctccaggggaaacaccaaattctgtggtggcttaggtgaaggagtaaggctctttactcagcttttgtttttaattgtaactgtgcagatgtctcctatgtcctatggccagttatttaaaatagtgaaagccaaatgctagtttggtggtgtgcaggcataactcaattatctgacaagagaaaaagaatggttgagtatatgttactttggttgacaatgttaaaggtatttttttttggttttggggtacctttttagtatttacctgtaaggattgaaatattaagtcagaaaattcataatacttgtgaattggtataattgtctagactaatgcttcttttaccattggcgtaattgtctagattgatgcttgttcttaaaatttggccacaactctacactctaagctggggtgtccaatcttttggcttccctgggtcacactggaagaagaatcgccttgggccacacatgaaatatactaacaatagctgatgagctaaaaaaaaaaaaaaaaaaatcacagaaaatctcataatgtttaagaaagtttacgaatttgtgttgggccgctttcaaagccaccctgggcctcatgcggcccgtgggccacaggttggacaagcttgctctaagcagtgcattggcacatttatgtgcgtgtgtgtgtattaatattgtattaatattacagttatatatataaaataaaagtttcatgaaatagtacttacttttacattgtacagtacattctaatacttttctagctgtttataaaatattcagtttttgagacagggtctcactctgtcgctcaggctagagtgtggtgacgcaacctcctgggctcaggtaatcctctcacctcagcctcccaagtagctgggactacaggcgcatgctaccatgcccagtttagtgtttttttttttttttagaaaaagttggacatgagctaaattgatttcataacccttactgagtcataacttgctttttgaaaaatcctggcctaccttatctctgaggtgccgcacaactatggagtatgttactgtgacagtgtacataaaaataacttctttgatctgggttcttatgagaaggataaaaatattgaatattactcaaagcccactgaccataagaaagtgatctctaccatcagataattttaaaaatgcatatagaagagtcatatatttgtataactaatctttgttgagtggcatctgtgtgccacgctctgaacttaccactgcctatttgaaggtgaacaaacaggccgtccttatctccaggaatttcagtgtagtggaagagataataagcaagtgaataaatatttgtaaattgctgtgcagctgtgctagagaataatgggagatggttgcttgctcacagtttttcatcatctcatttgtatctagcttaaagaagaaaatgtgagctagaagcttaggtttttggtctcagatgtcacattctttctgttgagtagggtacccttgttcccataaaccttcttaggcagggggcccagtgtacttatttatttattttttttgagacacagtctcactctgtcgcccaggctgtagtgcagtggcaagatctcgatctcggctcactgcaacctctgtctctcaggttcaagcaattctcctgcctcagcctcctgaattgctgagactacaggagtgcgctaccgcagccggctaatttttgtatttttagtacagatggggtttcaccatgttggccaggctggtctcaaactcctgacctctgatgagcctgcctcagcctcccaaagtgttgggtttacaggcatgagccactgtgcctggcctacgttttttttaaaaaaaacttattattacagataattatcttgtgggcatmttttcaccttgtattacagataattttcttttcaacctccagctggtgttattttcaggtgaagtcttcatcttaggctattatacatacatatgtacatatattctaatacaattttgtatttcttgtcttttcacactagtgtccatattttcatagcagtcatgaagcaaaattgaggttgttacaagttgctgtgattattacagagaagagtttctttttttaatttaatttaattttttttaattatactttaagttctagggtacctgtgcacaaygtgcaggtttgttgcatatgtatacacgtgccatgttggtttgccgcacccattaactcatcatttacattaggtatttctcctaatgctatccctcccccaaccccccaccccactacaggcctcagtgtgtgatgttccccgccctgtgcccaagagttctcatcgttcaattcccayctatgagcaagaacatgcagtgtttggttttccatccttgctatagtttgctcagaatgatggtttccagcttcatccatgtccctacaaaggacatgaactcatcattttttatggctgcatagtattccatggtgtatatgtgacacattttcttaatccagtctatcattgatggacatttgggttggttccaagtctttgctattgtgaatagtgccacagtaaacataggtgtgcatgtgtctttatagtagtatgatttataattctttgggtatatacccagtaatgggatcactgggtcaaatggtatttctagttctagatccttgaggaattgccacactgtcttccacaatggttgaactactttacagtcccacccacaatgtaaaagtgttcccatttctccacatcctctccagcacccgttgtttcctgactttttaatgatcgccattctaactggcatgagatggtatctcattgtggttttgatttgcatttctctgatgaccagtgatgatgagcattttttcatgtgtctgttggctgcataaatgtcttcttttgaaaagtgtctgttcatatcctttgcccactttttgatggggttgtttgattttttcttgtaaatttgtttgagttctttgtagattctggatattagccctttgtcagatgagtagattgcaaaaattttctcccattctgtaggttgcctgttcactctgatggtagtttcttttgctgtgcagaagctcttcagtttaattagatcccattttggcttttgttgccattgcttttggtgttttagtcatgaagtccttgcccatgcttatgtcctgaatgggtattgcctaggttttcttctagggtttttatggttttaggtctaacatttaagtctttaatccatcttgaattaatttttgtataaggtataaggaaaggatccagtttcagctttctacatatggctagccagtttccccagcaacatttattaaatagggaattcctatttaataaattcctcattgcttgtttttgtcaaatttgtcaaagatcagatggttgtagatgtgtggtgttatttctgagggctctgttctgttctattggtctatatctctgtttttgtaccagtaccatgctgttttggttactgtagccttgtagtatagtttgaagtcaggtaacttgatgcctccagcattgttctttttgcttaggattgtcttggccatttgggctcttttttggttccatatgaactttaaagtagttttttccaattctgtgaagaaagtcattggtagcttgatggggatggcattgaatctataaattaccttgagcagtatggccattttcatgatactgattyttcctatccatgagcatggaatattcttcaatttgtttgtgtcatcttttatttcattgagcagtggtttgtagttctccttgaagaggtcgttcacatcccttgtaagttgtattcctgggtattttattctctttgtagcaattgtgaatgagggtacactcatgatttggctctctgtctgtctgttattggtgtataagaatgcttgtgatttttgcacattgattttgtatcctgcgactttgctgaagttgcttatcagcctaaggagattttgggctgagatgatgggattttctaaatatacaatcatgtcatctgcaaacagggacagtttgacttcctcgtttcctaatcgaataccttttatttctttctcttgcctgatttccctggccagaacttccaacactrtgttgaataggagtggtgagagagggcatccctgtcttgtgccagttttcaaagggaatgctttcagtttttgcccattcagtatgatactggctgtgggtttgtcataaatagctcttattattttgagataggttccatcaatacctagtttattgagagtttttagcatgaaggsctgttgaattttatcgaaggccttttttgcatctattgagataatcatgtggtttttgtctttggttctgtttacatgctggattacatttattgatttgcgtatgttgaaccagccttgcatcccagggatgaagcccacttgatcttagtggataagctttttgatgtgctgctggattcggtttgccaatattttattgaggatttttgcatcaatgttcgtcagggatattggtctaaaattctctttttttgctgtgtctctgccaggctttggtatcagggtgatgyttgcctcataaaatgagttagggagaattctctctttttctattgattggaatagtttcaaaaggaatgggaccagctcctttctgtacctctgatagaatttggctgtgaatccatctggtctcggagtttttttggttggtaggctcttaattattgcctcaatttcagagcctgttattggtctattcagagattcagcttcttccttgtttagtcttgggagggtgtatgtgtccaggaatttatccatttcttccagatttcctaatttatttgcatagaggtgtttatagtattctctgatggtagtttgtatttccttgagatcggtggtgatatcccctttatcattttttattgcatctatttgattcttctctctttccttctttattagtcttggtagtggtctatcaattttgttgatcttttcaaaaaagcagctcctggattcattgatttttttgaagggttttttgtgtctctatctccttcagttcttttctgatcttagttatttcttgccttctgctaacttttgaatttgtttgctcttgcttctctagttcttttaattgtgatgttagggtgtcaatttttgatctttcctgctttctcttgtgggcatttagtgctgtaaatttccttctacgcactgttttaaatatgtcccagaaattctggtatgttgtgtcttcgttctcattggtttcaaagtacatctttatttctgccttcattttgttatttacccagtcgtcattcaggagcagattgttcagtttccatgtagttgtgcagttttgagtgagtttcttaaccctgagttctagtttgattgcactgtggtctgagagacagtttattatttctgttcttttacatttgctgaggagtgctttactatgtggtcaattttggaataagtgcaatgtgatgctgagaataatgtatattttgttgatttggggtggagagttctgtagatgtctattaggtctgcttggtgcagagctgagttcaagtcctggatatccttgttaaccttccgtctcgttgatctgtctaatattcacagtggggtattaaagtctcccattattattgtgtgggagtgtaagtctctttttagatctctcaggacttaccttatgaatctgggtgctcctgtattggatgcatatatatttaggatacttagctcttcttgttgaattgatccctttaccattatgtgatggacttctttgtttcttttgatctttgttggtttaaaatctgttttatcagagactgggattgcaactcctgcttttattttcttttgctttccatttgcttggtacatcttcctccgtccctttattttgagcctgtgtgtgtctctgcacgtgagataggtcttagaggagagtttcttatgattgagggcacttgccccaattcttctctattactctataaaaaaatggaatcataaaattttctttcagattgttaaatattcttcaacttaattttaatagctaatggcaattgccatgtatggatggatatgagaaagttttcagaaaaatgagatatttatcttgaggaagatttggctgktgggaggaggagacataatagcttttttcagatattcagtgtaagtgagtttgcacaagttttaaaatctttggaagctaacttgatatcagcaagcaaaaaatataatggagaaaattttgatggttggggaaagtttgtagcactggttttggtgaataatatgttaggtaggttctttcaaggttgtgttatacttttaccactaccattattttctttttagttaaacttgcatttccattgctcaaattctagaagaacctgttctgttgtctcttccttttccaatattcttgtccacttgacttcatgctctcttataataaaattattaaaattattgttacatggattaaaatattgacattcagaaatagattcatgcttctctgcaacatggatgaacctggaggacattatactaagtgaactaagtcaggcacagaaagataaatactgtgttctcactcatatatrggagctaaaacatgagcggatagaggtagagagtagaattgtggttattagaggctaggagaggttggttaacagatacaaaattatagctagaagagaggaataaattccagtgttgtacagcaatgtaggatgattatgggtaacagtaatttagtgtatattttcaaaaagctagaagattttgaatgttcacagcacaaaatgataaatgtttgaggtgctgcatatcttaattatccagatttaatcattatacactggatacacaggcattgaaatagcacactgtattccatgaatatgtacaattattatgtgtcaattaaaaagaaaagggaaaaagaaatagatttatgattttgacttttgaatagactatatacttttaaaaagctgctgctgcttctagttttaggtaactttgttttgtcttttttattataagawtggcttatgccagatctttaatgttgtaaaagtatccattgctcaccagccatataggagctggccagtagggtttgggcagcagcctttggtgtggagctgttctcttgtcggggtatggattgggccacttttctcttataattgataacatgaactatccagttccttggtgatctcaaagtaagagaccagtgaagtttaggaataaaaataaaatgtttgcaaatggtcagaaattgataaaatatcaaccagaggagaacattgtgtggttgacaaagtagggaatatttgtcgttttcaaacctttttctcttttaaacctagctttggctgtggctctgctgtttatgtcacataaagtaattcattctgttgtgtcctattcagcagataagcagcgtctcaaaatttatttaaaagaaaaaattgtaaatttagtgaaactgcaaatatggttgaagatttagaaattaaatcctattaagaaaacagtatcttaactatatagataaagtaatactccttttgcatcaagtgtgatagtaggagaggaggtatttcttccagtaaaaatcaagatgtattcgtatcctttgagctagtaagcctacttctcatagtgtattctatgtaaataattcaaaaggatgaaagttctctgtagcgttatttaaactagtgaacagtcacatacccttaccctaaaagtgacacattttaggtatcttccctgaatgctattttatgcaaccattgaaagggatatttatgaaattatttatagtggtatgggacatgtaaaaatgttttataaaatgcaatttgtacactattatgtatgagccattttttaactttaaaaagatgttctcttcttttgaaaacatgtttagaatagttgttagcttatttgctaacttactattattgttttttctcaattcctccttatcttattacatacatttgagatgttattcagatttccagctttattctctttgtaaaatattaactgtcatttgaagtacagttcttgtcatgttttgcattgtaagtcacttaatattctaacttaaaggtgataaaacacatcctactgtgtataagttttatttatttgattaaaaaaatagttaacacagtaaatacttggaattggatcagaggttcattaccctggacacttgtgggctaaaggcctaggaatttttcatctgtttccagatgggaaactctgcctgctgatgtttggtctttattacaattaaaataccagaaaattttgttagaaggagatattgggaatatgaagacataacccaaatatgtgtatattacaattctggaggaaatacctcagttaaaacaaaacaaaaatcaagaatattaaaagtcttttataatttgacaatagatcctccatatcttctcatattctggtgcttattttacatatttgtaacttaagtatttaagaagagacctttccaatttattaaaaattattggataagacaccagctcaacagtttagtaagttttttttgttttagtaatgtttccaagtggtgacactgtgtgtatttaagtaattagtgaattggagggatgagccaatttccagcagatctgattagatctgaaaactaggctaaataattcctagtgagtatagaaacagaatttgagtgtctgaattatgtaggtatttacttctgttacattttcttaacctttattgaaaacagtggaaaagtgaaatgagaaacgtctactttctaaaaaaatgaaaataagaagttatgagtcaaaatatatgttgagagtaaaccattctgtaggtgtaaagtaggcagagtttcagctttagaatagatgtaatacaaatacatatacatatacttatactgtttcatatcctaacatcctggattgataacctgcctcccaccccataatttagcctgattttttttttcagtccttagctgttcaggagttttaaaatttgcattaaatcttttaggttattttactcccatgtaaaactactgattaaatttggtgaaccctttgactttacaacagaaaacaatcaaaatagttaactctaaaacaatggttatcacagttttgaggactcttttagtccagtagctttcagattttagcttgcatcagaattacctggaagtttggttagaaaagtaggtctaaatgtagcctgagaatgtgcatttctaacaagtttccaggtgatgttaatgaggctggttttagaaccatatgtgaaaaaaaaccccactgacttagggtttcaaagagatgtaaaattaacactcttatctagatacaaatratgagttatctaagtattgaacacattttgaagattttatttaagtcattaatgatggaactagtcagatattataaacagttcaaagaagcacaaatttatgtggagtaaaggatattgaactaaatttccaagtggtcagcaaactgactttctattgggggtagtcagttgaacctccatgggacagaattttcttgcatgtctccagactagaataatttacattgctctcagttatctacagcagttaatcaacaatttgagttgcagtatagctcgaagtcaatgaaaagctagaattagaaaacgtggaaggttttgtaccacaaagtccatattttttcatcttgagtgcactgtcatcttttttctcattcccaatttccttacagtggctttttaccaaactcctcaggtgattctgatgcagtctgaagtttgagaaccatcggcttaatgtaacagacaaaatatttagtatatttgtaatacttatttactaaatcatgttttcttatacaacttatttcttatacarattatttcatacgtagccagttcattatttgaaaaatcaaggtcagattgcccctgttagctgatattttaacctcttgattgcctataaaggaattaaatatgcatttatataataaagtagttgtgaagtttttgaacataattagaaaaaagactctttgttgatcgagtayaaaatgtgcttcatgaagcgtttgattagttaaaatatgaaaaattttagttgaagagcttttaatagggcttatctttagtcagtcattttatacataataaaatgcctctcacaattctgaaaggacctagcgaatttaagaagctgggtgatgtaatataaagagccctggatttaggaggtcagtcttagtttattccctttttgtagctagtaagttatttaatttgtaattcacaatggtggtgagggcataaagataaatgcatcacagctcttgtgatgacataagtgcttgctttctggatttcagttttctcatgtgcaaaataaggattatagagccaaatgagacccaaggttgtcttaagcactaacattatgtgatactttgaatattrcacagtggaaaacattaaacaagtgtgtgctaaatcggagttgttcaccatttctctctcatttttcttttttttaacttttaaaactgacacgtaataattgtgtatatttattgagtacataatgatgttgcatatcagggtaattagcatatccatcacctcaaatatttatcatttctttgtgttgggaatgtttaatatcctctttctagctatatgaaactatgtattattgttaaatgtattcattttacaatactatagaacactagaatttactcttcttatctagctgtaattttgtattctttaacaaatctctccctttcccttccttgtgcttccccttcttagcatctagtattttctgttctactttacttctatgagatcaacatttttttagcttcctcatatgaatgagacatgtggtrtttaactttctgtttttggcttattttacttaacataatgtccrccagttccatccttgttattgcaaattacaggatttccttcttttttatggctgaatagtactccattgtgtataaatacaccacattttctttatctctgttgtcggacacctgatttaatttcatatcttggctattgtgaatagtgctgtagtaagtaagtatagggttgcaggtgtctctgcaatatactgatttcttttcctttggaaaaatgccccagcaatggtagttctatttgtagttttttgagaaacttccatactgttcttcatagtggctgtactagtttccattcccaccaatagtgtatgagttcccttatctccccattcttgctagcatttgctatgtcttgtctttttgataatagccattttagaatgagataatacctaattgttttgatttgtaattccctgatgattagtgatgttgagcattttttcctaaattggttggcaatttgtttgtcttttttagggaaatgtctgttcagaccatttgcccatttttaaattggatcacttgcctttttgtttgtttttctgtttgagtttcttgtatattctggatattaatctcctgtcagatgaatagtttgaaaatattttttcttattcaacatgttatctcttcactctgttgattgtttcctttactgtgctgaggctttttagtttaatatagtcccatttgtttgtgtttgttgcctatgcttttgggagtctgattggtaatagttcttcttttcttaatctttattttttctttcctttttattttcaccactctttatatttttttagtttttaaatttttgagacagagtctcgctctgtcacccagggctggagtgcagtggcgtggtcatggctcaccgcagccttgactttctgggctccagtgatcctcccacttcagccttccgagtagctgggaacacaggttcacaccaagacacccagctaacttctgtacttttggcagagatgaggtttcgccatgttgcccctgctgttcttgaactcctgagctcaaacgatccacccgccttggccttccaaagtgttgggattacaggcgtgggccagtgcacccggcctgttgtcaccactcttattcaaagtttctccttttaaaattgctttattgaggtatagttgacatccaatgtactgcacgtatttaaagtatactatttggtaagtttaaacataatgtataccctatgtgatcatcatagcaatgaggaaaatgaatgtcacaccccaaagttttctttgagtccttctataatcttcccttcccccacttcagacaactactgatacgcttcctgtcataatagactagtttgcattttctaggattgtatataaatggaagtacagagtatgtactcttttttaaatccagcctttttgttcagcataattgtccatgttgtgcaagtatcaatactttctaacttcttgttgctagctaggattcttttttttatggctgtrccacaattcatttgtttgttcgcctgatgacagatgtgggaattgttttcagttttgggtattacaaatagagctgctatgaacagatgtatacaaattttaatataaacatgcacttttcttttgggtaatcacctaggagtggatcgtattgtaggtgtatgtttacttttaaagaaactgccaaactgtttttcaaagtgattgtaccatttttatattcccactaatagtatgtgaacattcaatttcctttacatccatgccagcacttgggctgggcagtctttttaaattttagccattgtaatagatatgtagtagaatgttactgtggtttcaatttagatttctctaatggctaatgattttgcatctttttattgcctttttttgcaatcatatgtgtatcttattttgtgaaaaatttgcttaaatattttytgattttttaaaaattaagttgttttcttactgttttaagagttatttattctgaatataagtaatatatttattctgaatattttgttgaagtccgctttagcaagtttttctttcatggatcatcttttggtgtcatatctaagaaatctttggttaatccaaggtcacaaatatattctactttttcttctagatttttgtagttttagttttacttttaagtatatgatgtattttgagttaattttatgtatgttgagaggtatggattagtatgtgtatggttttttttttcttttttgcatctggatatccagttgttcctgtaccttttttcaaaaagaccatcctttttctacagaattgcttctgtcaaaaatcagttttttatatatgtgtgggtgctctattttatgtattttatatatttctgggttctctattctgttccattgatctatttgtcttgtgttgatgccagtaccacattctgttatggtagcttaataataatccttaaaagcaggaacagttagcctttgaactgtgttcttttccagttgtttggctcctctaagtattttcwtttgtctatgaattttagaattagcttgtcaatttatacaaaagagcctgctggtattttgatttgtattgtttggaatctgtgaatcaatttggggagaattggcatcttagcaatatggagtttttgtgaacaagctgtagctctatttgtataggtctctttaatttctctcagcagtgctttctagtttctagtgtacatatcttacacactttttttttgctgggtttattcctaaatatttcctatttttgctgctaaggtagatggcaatttttaaaatttcaattttcggtgctagtatctagaaatgcagtgggttttaaaaatacttttattttatatcttttaatcttactggactctattagtagmagtagcttggaaattttgtcagaktttttacccagactgccatgttgtctgtgaataaagatacttttacatcttccttttctctttgctcgagttactgaactggctaaagcctccagctgaatgttggataaaaatggtgaagcagacatctttgtcatattcctgattgtagggatgtaggggaggaaaagaaatatcttttccttgcccattacaaggtttatggctgacatcctataacaaaagacagactgacaagagagaagcctaacaaatttatttaaccgaagttttatctgacacaagagccctcagaaatgaagacttaaagacccagggaaaactgtgtattttttttttcatwggtgcgatgaacaaataaatagtcatgtagaagtatgattggactgaaaagatataatctattgggatcatagaggaaacttagaaaggcctgtttgttcagattcttctgtgtcttcattccttcccgctgggtatagggcaggacaccagtcacatagggtcttcaggggagaaggtggggagaattctttttatggacccaggaagaaagggcgggagaagatcagagtgatctttgtgttcatgccaagatgccgtattttgggatataatgtcctgagccctgaaaaggaaaacactgagtctttcaccattaagtaagatgttagctggatttttaaaaaatgtactttttatcaaattgatgaagttcctttctattctttgttaaatagagagtttttattaggaataatgttagatttttaagttattaatttggttaattacattaattttttaaaaaactaattgctgggcgggtgtggtggctcatgcctgtaattccagcactttgggaggctgaggcagacggatcacgaggtcaagagattgagaccatcctggccaacatggtgaaaccccgtctttactaaaaatacaaaaattagctgggcatggtggtgtgcacctgtagtcccagctacttgggaggctgaggcaggagaatcacttgaacctgggaggcggaggttgcagagttgacatcgcgccaccacactctagcctggtgaccaaacgagactccgtctcaaaaaaaaaaaacacaaaaaacccacaaaacccaaattgctttttcaaggtaagccaaatttgcatttttgggataaaactcacatggtcataatatattatcctttcaacatactgtttaatgcagtttgctaatgtagtgatgaattcttccagcttttatgtatctgaaaaaaagtatttttcttgcctttatttttgaagatatttttactgattatacaattctaagttgatattttttttcattactttaaagaagttgctgcattatcttcttgctgtcattgtttttcaagagaaatggcctctcatcctcatctttggctgctcttaagagtttccttttattgctgattttgagtaatttggttatgatatgccttggtgcctttttctccatgtttctcatgcttgggttttgttgagcttcttggatctatgggtttagagtttttataaaacttggaaaaatttggccattttttccccccaatgttttctttcccttctttttcttttccttaggggactcaaatcacacatatgttaggttgcttgaagttgtcccatattttacttgatgctcttttaatttttttattataaatttttttttcctgtgtgtctcattttggatagtttccattatgtcttaaatttactacacttttcttctgcaatttctgtactctactgttaatcttattcagcatattttttatcttagacattataattttcacatctagaagcttgagtcttctttagtatctcccatacctctacttaatttttgactctatgatacagttataatgatggttttatgtccatatttaccatttctaaaatttgtgcccattgtgtccattctatattgatttcaatgaattgatttttctcagcattattgttcaaactttcttgcttctttacatttctgagactctgtgattggataccattctgaaaattaccttattgagtactagatatttttgtatttctataaatattcttgagtttttttctgggatgcacttaagttatatagaaataattttatccttttggatcttgctttaaaaagttttgaacagtacaagaacagcatctggtccatggctcataattayttcactagtgagacaaagtccttctgaatacccagtctatttctccataaattacaatgttttccagtctggtagaaggactggatatatcttggggaaaaaaatgtaccttgacctctaacttatgctatacaaaagttaatatgtgatgaattgtagacctaaatagatagctgaaactttaacatctctaggaaaaaaacagaataacattttcatgtcctgaagataagaaatgatttattatacagaacatagaaaatatgcataaaagacgttgataaattgaacatgataaaaattaaaagctttttataaaaagtcactgttaataaatggataagaaaactagatactgggagaaaatatttgtcatgtatgtatctgacaaaaaaagtcctctttagactttttaaagaactcctacagatgagttaagattttctcttttttgctggtttttactaatgtgatactgatgtggctttggtgtggttttcattatgcatatcttacttgagcatctgtgagttattgttttcataaaaatttgggaaattattggccactgtttcctcaaattccttttgtgaccttctcttattcttggattcaaagtacacatatgtcacttgtttactattataggctacttaggctctattaattttttgcagtccattttttctcactcttccatttttgttagtttgtattgcagtgtgttaaaatttactgtaattttcatttttcagttcagatactctgtgtttttttttttttttttttgagatggagtttttgctcttgttgcccaggctggagtgcaatggcacaattgcagctcactgcaacctccacctcccaggttcaagcaattcccctgccccagccgcccaagtagctgggattacaggcatgtgctaccacgcccggctaattttttgtatttggtagagacacggggtttcaccatgttggtcaggctggtctcaaactcctgacctcaggcgatccacctgcctcggcctcccaaagtgttgggattacaggcgtgagccaccacacctggccagatactctgtatgtttttggtctctaaaagttccattttcttttatatatcttccattttttaaatcatattcatattttgttgtaaatatttgagcctatttatattaattattttaacatttccatggtctactaagtttattatttcttagatttttgggtctgttctagtctctttttttcacccatttatgaatcacattttaaaattcatatctgaaattttttattggatgttggatattatgactattatactattgtctagattttattatcttcttttamattttttgaaatttgttttgagtgctgtcaaagctactgtggtttagcttcattttttgaggcttttatcaaaacttcgttatagtgggtctggtgacacccctgtggaggcagggtagctctcctactaagatgtaacactctgctcagtgtttagggtgtttgagtctctctattcatgtctgtcagaactcaagcatcttgcagcccagtgagaccactgggaattatttagcttgcagctccccagtaataggtcacccagtctcatagaattttctcctcygtgtatatgtgtaacttagtagttagctattggcgtaaggggcctctgtgaagatttctggagtttttctctgccaagctctgagctcactagtactcagccctacaaactctggcctcttcagtctccctagagtcttatttttaactcctcaacygagtgagactgctgtgatctacttgggattcctagcctgcactgttatggaaagggtcttatggaaaagggatttactcagtttttttccttcactcatggatcataattctgggctgcctgttgtctcaatgtttgaaaaaaaattttttttcctcagttttctagtagcttacagtaagaaggtatggacaattttacttattccatcatggcagaagtggaacagtttctgtttttaatagaagaatttattttaattgtgactttgaataaatataacctgaggttgtttatttttcttgtttagtgagtagctcttcacagaattagagccctccctccttttttaaaaaatgaaattctacacaggaccccaatatagaaaatagttaaaacttcatctgctctcatttaaattaggtttatagctctgttggtctctacctaacaccaaagcaatctggtactcccaaaaataaaatttgaaaacctgtgaactatttacccctctcattttacaggaggaaactaacttctagaagggtcaaatgttttgtcttaaagtaatgaatcttaaactgtctggcttatatgagtttttctagcatttgaaataagacctcttatatcctaactcagtgtctgatttttcttagtcagcttgattttttttaaaaggtctctttgattttgagctgtttcagcatgagattcttgagaactccatttcctattaatctttgtatggcgcattgagtccacatgggctctgttgtaacttctagctgtttaaacaatcttggaatagtttatattaaatccagtccaacatttggtttattctgttttctcacacttcagtatataagatttctgcttatccgttttacaaaaactgtatgaagatggctacatacttcttggtgtttttttgtttgtttttgagacagaatcttactctgtcacccaggytggggtacagtagtgtaaccatggctcactgcatccttgaccttggggctcaagtggtccttccatctcagcctcccaagtagcagggactacagatataagccactatgcctggcaaatgtttggtagagacagggtctcaccatgctgccaggctgatcttgaacccctgggctcaagtgattctccccgcttggcttcccaaagtcctgtgattacaggtgtgagccactgccatccatcttgttttattccttattcctcttcaattgttgtgtttatgtcatttaatctcctagaaactatttggactatattgtgatgaatgatgtactttgaactctaagtagtagatcatggattgtgactttgaattgttggggaagtttcatattgaaggaagcagggaatgtcaacagctttcactgtgttacttggcagaaatcttctttatgggcagtctgcagtctgaatctaagagctacagtttaattcttcctgaaagctgtcctgtrttcagtcactgcttcatcagtatggcctatggtatagaaatgggacagccactctagatggatgagaggtggacaggcaggatagatacagcactaggttcatctcttcagtctactggttatagctagactttaatattgaagaattatgttgctgctattctattatttcattttcttcttacttaaaaaagaaaatcaacagaaaacaccaaataatttagttatacatatgtcctcagatagtcttagaaaggtttcctttgaaatgcatctgtagtggctactagggactcaatgaatattcatccaatgaacagatgaactaagcccaataaaatcaacaaaacatctcctaagaaattgttgatcgtgtgcaactgtttgagttgcattactttttagcacaagaagaatagcatcactaccaaaaccagctgagatatcttattttattwatttatttatttatttatttatttatttatttatttagatagagtctcactctgttgcccaggctggagtgcagtggcatgatcttagctcttggcaacctcggactgccgggttcaagcgattcttgtgcctcagccttctgagtagatgggattacaggtkcctgccaccacgccaggctaattttttgtatttttagtagagatagggtttcaccatgttgactgggctggtcttaaaatcctgacctcaactgatctgctcgccttggcctcccaaagttctgggattacaggcatgagccaccgcgcccagccaagataccttatttaaattaagattcatcatgcagttctgatgtagttcttttgtaagtagtgcggcaraatttttcatacccatcattgtgtcctaaacactcaaaataatgcttcatacatgatataggtgttcaggaagtgtttgtagaatgagaaaataaatctgttctattgcattgcagtgtgtgcacatgacaggcctaacagatctcaagaaaactgttctttcatggctgttgatttcatgtagatttttgcatgtacacttcacatacacatrtgtttacatctctatgatgtatattagtagccatttcctttctaacattggtacttagtagtttgatttttttttaaacaaatcttattttatgtagtaattgatgctttttcatgtactcttactatagcctacataatttgagttctttttcctttatttttttcctttttccaggtgaaaatttcctacctattggaaatataatttgtagtttttgactgatttatcttatattgataaaagatagggcatttaggaagaatttttatrcatattattttgttttctccctcaacttctttgtaaggtaggtgaacagatgaggtaaatgatgcagataggctaatcgtctctctccaagtcacacagttaagttgcagggttaggattccagggtcattgttccttttgctgattctacactatctctgaatattctctttcaaaaaaggatacataatctatttgctttagttaacgcagaattgacttgcaattttggttaaagagaatgaaaaggaaatcactgtatttagtgggaaaatgtcatttcaaaggttgattctgatctttaaaaattgtaattgtaattatcttgtgtagagccctgtgtcttaacatcctcatttaataatttgtttgtcatataagcagatggtgagaaaacagtgattcccagatctgtcattactgctgtggtaatttgatgttttatagttaagaattttgactggtagaaggctgatctagaattcacatgtctctggggacctgtattgtttggatttggaggtatacttgtatttgaattcagggaaggctgttataaataaggacttggcttgcatgataagtaacatttctttatatagctattcagttgagctattgaaagtaaaacatacaaacaaacaaacaacaatagcaaaaaacgctttgtgttgttgttgacagaaaagttgaagcttttcaatggtgttttcctctctcatgtcgcataaccatgatggtgataagcgtacaattatatataaaggcaaaaaagttcaaagtccagaggtattaaatctttatggtaaatgagagcctgtaagtcatgtaatacactaagaagtatgttctgaaaatcttaagagatccaattgccatgtgactctcacaatgttatcctttatgaggagaataaaaggatgcttagtgtgacttttgcaacatcaagcccagttgaaacacaaattttattttgatttgtgagtccaatccaaccagttatttttcattttccatttaccatcattttgattagtattttttgttaatcagttcagagttactatttgcagccctctgaaagctggagcctacattagaagttttctaaatgtattgaagacaaagccatttattaaaatctgatattaaactgtcactttccagaggcatatttgaaaaacagaaaaacaaacaaacaaaaaaaacacaagggaaaccatagagctcttcctgagatgctttaattcaggagtttctactcaaaaagttaatcactgacaaaattctttgaaatgttttagtgttcgtgtgagtgtcacaagccatgctttttagaaaccagaattttgtaataagtgctctctctgcagcaattaaaaagtggcgtcatctatggtaaacactaagttggtctattgagagggaaatagctagcccttcaaaatacctttgtgggagtgaaaattacctttcgtactgaaacttactaacccccagtgattaagaggccatttcatgttcaaaaacatgttattaaaaataatgagtgtgatattttaagtacatgactattactacaaaaattgtaatattatagattaggatttattcatacactgaaggtctcatatgttgatatgaactatatttcatttaagaaggccttgggaggaggagtcaggatcatgaacaatctgagagtttatccaagacctgtaagttataagaaggaagagttgagaggtagctgaggtgggtgtctccaggtaggacacgtgaagatgggaataagttcaggggacctgagaaaggtgcttggtgcctaaagtcagaggaaagycaaattagggattccttttagggaggtgaggagagcaacttagacgtgatgttgcatttgtgagcttggaacccagagttaaaagaaaatatacagaattgaaaaatattacctggcctaaaattggaagtagaatgatttcgcaggaaagaaaagtgaaagaggaactatcatctcctaggcaaaaacagaacagtgtagagtcaggaagaaatcatgatttgtcttcaagctgagattagttaattggatggcacagtataggtgtctaacttacccgtacatagtttactctcttcaggtgtccttaaactgtgatgtaagtgttcatctgaatttactctgtatttacattctatccatgatgtctgtaatagctatgactataaaagggagggccagcctcattactccttggatggctacactgcagtaggacccagaggatgtgagtatgggaatctgatcctgagtcctgctggttggagagttgccagtgtcatcataacttgtaaaaaaagtcccataagacacttgtaaaggataagtcttaaagtatgtaagaataaatcagaaaattgccttttttaaaaaaaagctttttaaaaagctttttagctggtgattgtgtctttcttttctttaggattctttaataagtaattttagtaaagtgtcattcttagttgctaaagaaaacagtcgtctcctgttttcagtcatcagattcaagcctattaggaaaaacttgaataattattcttacacgtctccattaatatgaagaatcatgcataaaatgtagtccatgcttatctctaaaataaacaaggaaataaaatttccgggttctgttagttgttagaaaacatggtaactcaacttgttattctgcaccttgggaaaaaaatgcttccttgttgattccaagtaagatcatttagaaactaaagtctaccatgtagagtataaaaatgagattgttaaggggatgctcctttattctgaaaactctctaatgagggaacaaaaatataaccctggttttaatatttatgtaactttttgcagaaataatttaaaatagggagaggtaactttcaatcccaaacatagatcaaatacttagtaatttrtttgacctataatgctggttctcaaccctggctactctttacratcacctgggagcttcttaaaattaccagtgtgatcttaaccccagagattctgatttattgttggtctgggttagggcctagrcatggttaattggattccttaggtaattctaatgtgtagtcagaattgaaaaccactgccttagaaacacacagttgaactttcttttatcttcatatggaatcagaaaagtaaagaggaagaaaaggagtgacctgtagattagctacccatctgtacttattctaaaagatcaaggtagggagcaggtgaaggcttggattttgcaccctttgtaccagaacacatgggccagtgtgcagtactggaagtaaagttcttggatgttacagtgtggtggcatttcttgtcaggagagaagggaatgatagattgttttaacttttcttcttctgcttgactttgagtaaaaagttgagcatctcctgcttttttagcattttaggaaaaaaattattgtgccaagagtatcaggtaatctgtcataaaaatatatgaatggagcagatctgtgcatcacttcaaactaaagatatataaaagcattcctttgtgcttttttgctaagctgtgacagcacaatcactggttattttgtaaagaaatttattttaaaacagtatgacggccaaaaaaaagctattggaaggagaggaagagaggacacacctrggttacatttggcctcttttaagtctgtgagacatgtttaaaaatctttaaagaaagcttactttgtcactatcccatttctgctataatcaacataattatacctttttaaattaactaatctatgagtaccgacttaatgaatgagttccatgtatatggagctgcttaaagactctgaaaagaataggaatgtcttattaatatcaattctggatactacgtgcctaaatgaaccttctttagagggctaatccagagtactcatgcatagaataaaagcttactggataggctcaataatagaatggatatgactggatatgactgagagtagataccgtatactgtggtatgactggtgacctgttggatgtcgctgtcctgtagtcattggttaaatatactcctgatgacagatgggtacatgcacttcatccagctttgctgctgcacgttgtcatggtgaaggggaaggacacactacaaatgatgattccttcccacagactacagtccatatcttaacaaagatctgtcgaatgtttccctgtggaaaagaggattttaatatatttttctcttgctgacttgagtaaagatttctgattatcctagaacagagataatggargtaatttttcatggaaaaactatatactttcgtttgtaagctgttagaattggcattttgttggttgggtgccargctgctagactatgcaccacgtgggcagggattttgttttgctcaatgttgtattcctgatgaaaggtaaatgattttaattttgataaagtgatttatttactttttaattttttcattttttccacttgttatttcactttgtaattatatgatataatctatttttagttttctccacagggctaaatatggtaacaatttattgtttattcagggcactcagtaaactgaggatttgtgaatactgtatgaattcattttatagagaataacagtttaaaaaaactaatgactggaacattagtattgaacttttgtcttacaataaactttttaaaaaagtttaaagaaaatttttagaagtttcaaggcatataatcacagatataaaatgcattaagaaaacctattcagaatcgcacagatttattcacatttcaaaacacttaaatatgcaaaaaagaaaatccacagaatggttttaaattacaaactcaccttgtgaatttaaacctaatttcattttcaaaagttcaattttcagctcattttaggatcatttatatgttgtaaaagtgatatatactagcatctggttatggtcagcacctgccaagaaagttaataaagcatttctttaagatctttggtttagaaaaatgttctggctatatttatagtagcctatataaataagtgctacaaaccttaccacttcacaatttttgtgaattctttttctccattgaacagatgcaaatagaaaaattaattagcctttcccttgttaccagacataaattattattctcttctaaagatacaaaaaaaaattgatgagaagaatcatagaatttttagaagtggaaagtatcttagaagtaatctacacttatttttagcatcttgcttatagatttcaattttgtaaaaaccttagtggtattttgatggtaggatatttttattaagtttttaaatgtcttaatgttctctctgtagccttatttgttaatttttgccaagaatctttccacaaaatctgaattacttgcttcaatttgcacctttcataaggattaaaataaattgagatcttaagaacttatttatttatttatttatttatttatttatttatttattwgagatggagtttcactcttttgcccaggctggagtgaagccgcacratctccgctcactataacctccgcctcccaggttcaagtgattctcctgcttcagctccccgagtagctgggattacaggcatgcatcaccagacccggctaatttttgttatttttagtagagacagggttttaccgtgttggccaggctggtctcgaactcaggtgattcacctgcctcagcctcccaaagtgctggaattacaggcgtgaaccaccttgcccrgccaagaacatttttaatgcttgtttatataagaagatatttggctaggcctttgattttttgaaaggaagatcctaaatataaagtgcatgacctattatatatttctgcaacacaggaaattaacattttatttagtaggataataccttctggtaaactactgagaaaaaataaaatttactacattctaattataaagagtactttgccatatcccttacccttctcaattctgatatggtctcctggaggtgagacagggtttatttgctaatagcctgttgagcaattcagttgtcttaccattgtctcctttccctgcctgatcttttttcaytgaatggccataataattttttttttttttgagagacggagtttcgcgcttgttgcccaggctggagtgcaatgctgcgatcttggctcatcgcaacctccacctcccaggttcaagcaggtctcctgcctcagcctcctaagtagctaggactacaggagcacgccactacactaggataattttgtatttttagtagagacgaggttttaccatgttggtcaggctggtcttgaactcccgacctcaggtgatccgcccatctcagcctcccaaagtgctgggattacaggcgtgagccatcgtgcccggccataataaatttttgaatggccatcctaaattttaggtgcctcattggagtacagagttttgccatagattgtaaattattctagggagatatttttgatgctattgacatttaacccagataattctttgtcatgggagactgtcctgtgcattgtaggatgtttagcagcgttcccagcctcaccccaatagatgccagtggtacctcctcgcccaatttgtgacaaataaaaatgtcttaagatgacgttgcttgaatgtcctctggagggcaaaatctgcggttgagaaccactgctctagggcaagaaggtcttttgtgtttgtattctctcatttcccatacatatgtctcctcaattgtgttattatgtataagaacccagtaatttttacttaattgaaatagtaactttattttaaggcctgattatcttgtattgaaatggtaatttttatgttatagcctgtatgtatcaacaaatatgtaaaaacctggagaggaaatattgtataatccatgtatagtataaataagagttagctttaggtatctgttggatcgattttaaatactatccttagtattccatatgtggctgttacaaagttatagaaacgaagctttgtcaggcgtggtggctcacgcctgtaataccagcactttgggaggccgaggcgggcggatcacctgaggtcaggagctcgagaccaacctgatcaacatggtgaaaccctgtctctactaaaaatacaaaaattagctgggcgtggtggtgcatgcctgtaatcccagctactcagaaggctgaggcatgagaattacttgaacctgggaggtggaggttgcagtgagctgagattatgccattgcgcttcagcctgggggacagagtgagactccatctcaaataaataaacaaacacacaracaaaccaagcttcagttttttctcctgtaaaattgaaataatgtctattttrtggttttatggtaagaaacaaattacatgataaatatggtcagctaagctcagctgagaatcagatgcctttggtgggttgtagtttgatggtactcttctactccattttaacatttctgttatctgattcataaaaggggtttttagggggaaacacctacttgaaatctccctacaatcggcatacagatatatatgaagctttaaaatgcattagagagactccttatagatttatctctatttgccaagaggaacaatggatgaaggaatcagccttattgtgggattctgttttagttaaagagtaggctaagttgcagtaacaaatccacactttaatggctcagttcagtaaagtttatttcctactcacatgatagtccttactgcttcaggtttgttggacattctttcaggaacatgaagctccttctgtctaatgggatcaccatgtacgttgtaagcttcactgttgtcctctggtagaagaggtaaacgtgtaaaaggagtaccactgctttcctaaaagcagtggtctggaagtgggatatttaaattctgctcatattctatttgttcttatttggtgagaacttggtatcatggtcacacctaccccattgaagaatgggagagagtggagttttgggtatatacccaaaggattataaatcatgctactataaagacacatgcacacgtatgtttattttggcactattcacaatagcagagacttggaaccaacccaaatgtccatcagtgatagactggattaagaaaatgtggcacctgtacaccatggaatactatgcagccgtaaaaaaggttgagttcatgtcctttgtagggacatggatgaagctggaaaccatcattctcagcaaactatcgcaaggacagaaaaccaaacaccgcatgttctcactcataggtgggaattgaacaatgaaaacacttggacacaggaaggggaacatcacacaccggggcctgtcatggggtcggggaaggggggagggatagcattagaagatatacctaatgtaaatraggagttaatgggtgcagcacaccatcatggcacatggatacatatgtaacaaacytgcacgttgtgcacatgtacactagaacttaaagtataatgaagaaaatatatattaaaaaaagactcttgctttaaagaaagaggttgctgcctactctcttgacagggatgatagcattgttctctagcatccaggtgtgctgggattcttaacgtcttcgccatcaagatgtggcggtttcctaatgctaccagtggctaggtagtagggaagttttgagttccagctttgattagcacttctctagacccatcagagatgcatcctgatgacttgtaatgaaatgtagaggtcaggagtaatcactggacccttacaagtgctcctttggattttcaagaatactgggagttgtacaattctgccagaacttgtgcttcagcagtttgagcagttagggcttaatgttgttagccaagcaactaggagcttggaattattgacagccagttgaaatgaaaggaataaatatatattcatagagtgatgaagtgaattctggttacttggctgtaaagaggcaggaatagtgcacacagcatatccagccaggtaaagaggaggacaggggcagaatggcttagcaggaaagtagtgttccttgccacatagggaaaatagttcctcaggttttgtaggcttgagcagcagcaaatatttgattataataaaaatggaacttagtattaaattatttaatgaatgatgtgttctattaagagcctttccatgctagagatcttagcatttctggtactgtatgtactattcagagggtacaaactattcacagttccagaaatgttaatatcaaagagcatttgcctatatattaaatttcatactggctggatgctgtggcttacgcctgtaatcccagcactttagggggctgaggcaggaggatcacttgagcttaggagtttgaggccagcctgagcaacacagtgagacactgtctctacaaataatgataataataataataaaaatagctgggcatggtggcacacacctgtagtcctagctgctctggaggctgaggtggaaggattgcttgagtccgggaggtcagggctgccatgagctgtgattgtgccactgcactccagcctgggtaacagagtgagactctagacccatcagagatggcaagaaaaaaaaaatagcttcctttaaatgcagtctgatttcggaacttctatttttctttacaagtttgataattatctctgcttttaaattaaaggaaattcattctttaaattttacttggtctttttggtttctgttactgaattctactcacaatgaatttagtcgaagtctgtgtttctagcgtagttactcaatattgaaaatgtatgttagcaagatggagtagtcccttatgtggttagtaggccttcaggcagtttttttcctttttgccttcacctttagtttaccccaaaatatataatcaaaatatataattttaaaaaattctatatactactgtttttgaaaattataactatttgaaccaggtactattgctataacagataatattttaaaatttaaagataaacaggaggctgtgttaggggagcagtattcttatattgatgttctgcatttagttgcagatgttactgttcataaagatatacaagtaccactgatgttggtattgcacgtagaaagtaggtaaaaatgataaattggagtctgcctgacagaatgcagtctgagagaaaacttttctctttcaatataatctctttacatttggcctaagtttaaggtaacagtgttgcctttcagaattcagcctttctttaaagatatttttcatatcagcatattacatccaaaatacctcatgctcaatattatgttatatttaaaatgagaatcatgcaaacattaatatctgaattaaacataccaaaattaattttattctttcaaatatggaattacaatagagctttctttcacaaggttgatttttagattatcttacagtaaaagcatctgaaaaattttggcttacttagtctttctcggagtttctttttataagggaatcttggcagactgtgctctgttctatgagctactgattgtagggggaaataatgatgctatttacttttgtgattttcttcaaactgaacaatcaagttaaaacctaagataatgtttcaaaagtmatcactatatatgtggtcttatccttttatccttattttctctgtaagtgattccttttctgctcttctgatttcttaatatttttcactttcttcagttaaaatttattaatcacacatttactactaatcaggaattatgaagactggaatttaaaaactactctactggagagaacaactttcagttgaaattcttcatggttgggtgactaaagattccaaaagagagtggtttggatgaatcagcactggcttggaaagggagctcttgaaatctgctccacatttcttatgaatgacttagatgaaggtacacaaaataaatttttagggcatgaaaagttgaaaggaatagctaatatattgagtagagaaataggaatttaacattatcacagtggactgaygtgctatgtcatggcaaataatatgttatttaatgtgaataaatatatatgtctgcattaatgatatataaaatattcacttaatttcgaggaaacagtgcagaaaggttttagttgactgcatgttttatatgagccaacaatatgataaagctggtaaaactgtcaaaataataatggactatagcagttaatagtttctaaatagtttccaagaggcccctggtattagtcagttcttgcactgctgtaaagaaatacctgagactgagtaatttataaagaaaagaggtttaattggctcatggttctacaggcygtacaggaagcatagcggcctctgcttctggggagacctcaggaaacttactgaggtcatggcggaaggtaaagaggaagcaggctcgacttacatgggcagaataggaggaacagggaggggaggtgctacacacttttaaacaaccacataccctgagaactctattatgagaacagcactaggggaatagtgctaaaccattcatgagaaatcacccccatgatccaatcacctcccaccaggccccacctccaacatgggggattacaatttcacatgatgtttgggcagggacacagatccaaaccatatcaaacctgtactctgttgtctgctctttaggatacctttggagtatttgtttcattctacactttatatattaaggaataattggatatccgtaagatgaacaagatcatgcttttaggaagagatactttatttggagggaatgcatgagaagtctagagaaggacttctcaattctagggaacctgatctggagaaaagatttctgacaatgagcataaaattattccaccttcttatraaaggcaggactaggatcactgagtatatagaaattttagggaagtagattacattaatatgtaatgatgtgaaaagttggaatcactcaatatggattgattgggctgccttcacaaagtgagtcctttccctgtcaagctaaatggcaatttgtctagattattattgtaaagaggggattaatttactagcgggatgggatgacttctctggccccttccattttttttgtatatgtagtaggttttattgaagagttgggaagtttttgtttttgttgtggacccctttgaattcacattattcctcaaagtatgaattgggaaagaggttggtgttggaattgtaacaggcttcatgatacatgcagactcactacccatgccacttgaccatttttaatcttgtgagcctttgtcattttcactgcataagaaattaaccaactgatggttttatttgaaggataggggtttaccgatggggcagtctcattgttttactgatatatatatgggaatataattcctagacattcataaccttaattcagtatggtaaagtttagtcaatttttaattactgtatattcttcccatccatttacacagttcagtggtttccttccttcattcatattccttaaatagtttttgttccayggactatcattttttattatatagtttctctgtccctgctgattgcattagtctagtactagcaaacagagggttatccaaatgtttaagaactaaaccagagtaagatgatatacaagtaatagatacttttctgcaaatttcaccaaatcttttctgtgtagtcattgaagagactcctacctgactgctgttgtagtgggacagattttgatccccagtttagtaacatatacttttttcgttcatttggaaataattagtgcttgtgcttattaattaagaaattatttagtttggtttgctaccagtgcaaaaagaaatttttcagttcacatttaaaaggtagaagtgatttaaaaattattaatattgcagcccttctcaaatctttcacttgatcaacaagtttttagcattttctctttacttttctaactttttgttttgaaataatttcagatttaaagaaagattgtagaaagaattacagataattctcatgtactcataacccagatttcctaaatgaaaaatggaaacattttatcatagttgttttctctgccttcttcttttttctttttgaactatttgagataaagttacagtcatgattatgtttttatccccaaatactcaagtatgcatttcctaaaatcaggaacatggtctaaaacaaccataatgcattgatcaaagtcagaaacttaacattgatacagtacttttatttatttaatctgtatcctttattcaaattagacccgttggcccagtaatgtcctttatgggaaaacaaaagaagtctgatttagaatctgatctaggctcagacattaattacatttagacatcatgtctcccttaatttggaagagttccttattttttcttcgtcttttatgatactgacatattttgaaatgtgtaggccagttaattgataaaatattcataagcttgggtttatctgctctttcctcatgattagctttcaatttatgcagtcttggcaggaatactgtggaagtgtttttgttttcttttcagtgcatcagatctggagacacattataaagatttgtccaattattgattatattaactttgatcattttgttaaggtggtttctccactttgccagtttgtcccctatgaagttattattttatcctttaataaatatcttgtgtgaaaatactttgagactttgtaaatatctatttctcatcaaagttaaatgctctagttttagcacctgttgattcttgcatgactgaagcactactgctttaaaaaaagcattactatgatagttgtaaaatgatttttctcatcctgtcacttccgtatttactaattgtcattgtactgtaaggaagaagtttcctttctcatttgcttactgacttatttatttatattagcatgaactcatggattcttatcttaatctatgagttaaaatccattactgtggtttagtgttttgctcgaattatcccagatttggcctattggaaccttttctggatggtttctgtttcctgttgaaaaatctccatgattccttgaattcttctttattctgtggcacaaaaagatattctagactcattgtatacggatctcttcctgtctaggaataatccatttttccaaggagctatagtttcttttatttgaatataatttttagaaaccaggacctgggcacttcatgtgaaaatttataatggattatcattgcttctagttgctcttagtgggcaaacataaaatatatatgtacacacacgaatatatatatayayacacacacacacacacatacacacacacatacatatacatatatatctgtttctgtgttgatctatctatatttaaaaatctacagtgtgtaatgctatttatcattgccacaacttaatgtctacacagaatgataggaagctttatcaaatatgtctttattttgctttcatttgtaaggattattttcactggatatagaattctgaatgaaatctcactagataggcttaataatagaatggatgtaacagaggaaagtgtcagtgaactagaagatagatcattagaaattattgtgtctgaaaagtagagataaaagattgagaaaaaatgaacagagtttcatggacctgctgaataatatcaaaatttatgatgttaatataattagactcttagagaagagagactgacaaggaaaatatgtttgaagaaataatgggtgaaaagtcttgtaaatgaagagaaagtcacatttaatgattcaagaaggtcagtgaacaccagttaggataagtacaaagaaaatctaggtgatttatggtggctcatgtctgtaatcccagtactttgggaggctaaggtgggaggattacttgaggccaggagtttaataatatcctgggcaacatggtgagacccctgcctctacaaaaaataaaaaaaattagggcaggcatggtggtgtgtgcctgtaggcctagctactcaggagactgaggcaagaagatcttttgaacctaggagttcaaggttacagtgaaccatgattgcgctactgcacttcagcttgggcaacagtaagacctaagaccctgtctctaaagaataagaaagaaaatcttgcctagatagattgtaatcaagctgctgaaaccacagatgaaaacaaagtcttaaaacagagaaaaattacttatcatatacaatggaataatgacttaaatgaccacagatttctcattggaaatcatgggggctagagacagatagatgaagaaaaaaaagttatcaatatcaggaatgaaaagggggatatataatagtactacagacattaaaaggataattagagaatacagcaacagtcttatgccacacatttgacaatgagatgaaataaataaatgttttgaaaatttcaaaaattgccaaaaccggataaaaacattgaaaagctggtaattatagacaaaaatctatcatgaatgtaaatgcaagaatcttaacagaatattagtaaatcaaatgtaataatatataaaaggataatacatgcctaagtagaaggtatcctaagaatacaaggtttatttaacatcctaaagtcaatcagtgtaattaaaaaaagaaatgaatctcattattattttggtagatgcatttaaggcctgtgacaataatccatttattaaagaaaaattaggaaattcttcaaactctgcacacctaggaagaatctgtaactcatatttaatggtgaaagacagaatcttattcccctgagaataagaacaagacaaggatgcctactttcgtccacttcattcagcattgtaatggaggtcccagccattgtaataaggtatgtgttatggattgaatygtgtacctcaagaagttatgttgaagtcctaacctctggtacctttcaatgtattcttatctggaaatagggtctttgcaatgtaatcaagttaaaatgaggccatgctgatttagggtgggtcctaatccaatatgactggtgtccttattagaagagaagagaygcagtgggaagacagccatatgaagatggagacagatactggaattatattccctcaagccaaggaacttctaggacaaccagaagctagaagagggaaggaagaattttttcctagaggctttggagggagcatggcccagtaacaccttaattttggatttctagcctctagaactgcaagataataaatttttgttgttttaaaccaagcagtttgtggtactctctgggaaactgaaatatagcaagtaaaagaaatgaaaggaataaagatggggaaatgagaaataatactgttactgtttacagatgttatgattattacatgaaaatattttaggaaccctataaaacaactactagaactagtaagtgaatcttcataattgcaaactacaaggttaatatactaaaattggtgcattcatttatcctaacagcgtactgttggaaaatgaattttaaaagaatcccgtttataatagcaccaaaaatcataaaatacttaggtataaacaaaacaaagatgtctaagacccctacactgaaaaatacaaaatgttgccaatagaataggagggtagaaactgagaagctgattataaaaactatgtggaagttaaaaaggacctggaataaccaaagaagtttaaaaaaaagaaggttggaggacttatcctacctgatttgaagaactaatataaggctacaataatcaacacattttggtatgatgaaattatacacgatagagaatctaaaagtaggcccacacatatatgatcaattgatttttttaatagatgtacctgttctaagacaaattcttgtggttctctgacatttctacacatcttttgagcaagatgcattggcatgtttgttctagactatctttccaaagacatttgtatagtaaacttgcttgggagattgagatagtgcctttctctgggagaagagtctggatttgttttcttttatttttaaccatgcaacaatagcttattatgtatgggttttaaaggtttcaaaaattatttcctgaatctctccatacacaggcaaaaataaatgtgctatttaacatattggaatgtgcaaacttaatcattgcctagagaagggaaaattatccccaaaacatgcttaaccaggaggctgattcatctgctgactccaagaacatgaagatgaacatgatagacagactgtccaccatctgaatgttcattcamcacccattcattcagtaacccttactcaggcccagatgagcagcacatttcttgccaacaatcattaaatgtccaagaaggctctcgttatcatcttctgcagcagaaatctgggatatgtttcttgtgtatcactagaaaatgtgttggaagaggccaagatggcagatgacatcactaaggctcatgtcgtttggcctggtgacaacacaatctttgggaatattttccacaaagaaatcccagctaaaatcacttttaagtatgactagtatcttgctttccatgacattttccctcaagcgctaacaggagggaggaactggatttgttttctgaccacgatagtaagcataatgtcttcaacttaggcaaagcctgggtagggttgctagcagccactgtgtaagagtgagggtttgctaagtttatggttcctcagttgtgacactgacccgctgtgtgccagccttcatctgaccttgcttctgcatttccctgtgggcgttggtggttaaggaggaccaatgcaaacatgaagctcttactgcctgacgtgctgagagtaataaggtgctttgtctctgattcaggtgtcttgggtcttctgctggcatgagggaagccattgcgggctaacttgtagcttgcaagtagggtaaaatctcagacccttcatrgttcttgacattaccaaggtaattaaaagggaaaaggaaaatcttttcagaaatggcaccatattaactggatatccatctggaaaacaattaacattaactcttaacttcataccagacataaaaatttgattggatcatagaccaacatgtaaaacttaaaaccatactacttagaaaaaataggctgggcgtggtggctcacgcctgtaatcctagcactttgggaggccaaggcaggcagatcacttgrggttaggagttcgagaccagcctggctaacatggtgaaactccatctctactgaaagtacaaaaattagttgggtgtggtggcaggcgcctgtaatcccagctgaggcacaagaatcaattgaacccatgaggtggaggttgcagtgagcccagatcgcaacactgcactccagcctgggcgatagagcgagactcagtctcaattaaaataaataaataaataaagtaacatataacttaaaatcttcaccgttggggcatgacacagtaaggtcacatcacaaaaaagcaagaattgaagaaaacatttccaaaacatatatcagacaaaggacttgtgtccagaatatataaagtactctttccatttaataataacaggacaatccaattttaaaatagtgggcaaaatttttgaactaatacttgataaaagaaaatacatgaataatcgataaaccataaaaagatgattagcataggttgttatcagagaagtgcaaagtaaaatcacaattttatcttactctacatccattaggatggcaagcatgtggaacaactggaaattatatatatcgctgaagtaaatgtaaaacagtaaacagtttggcaattgcttgaagcattaaacatcccccctcgcccaaaccagccattccactcctagttatttatacaagagaaatgaaaacatgtgcccatacagaaatttgtacatgaatgttgatagcagtttcatttgcaatagccaaaactggaaacaacccaatatccatcaacaggtgaatggagaaacaaactgtatcatacccaaacagtggactcagcagtcaaaaggaacaaatggctatatcattatcatcatcatcatcatcatcatgatgaatttcaaaataattacccttaaagaagccagaccaatagagaaatatttattatataattctacttatatacagttctagaaagtgcaatgaacctgtagtgacataaagcagatcaatgttacctggaaacagggtacagtgagaattggattgtaaagggtctggtagaaatgcttgttatcttaggtgtagtgatggtttcatgggaatatataggtcagaaatcatcaaattgtacagtttacatatccaggtcattgtgaatcaaatgtcaataaaatttaaaacgaagatataaattaaatattttattattttttagaatattcaatttgtaagttcaactttatcatagaaaagagctacatttttgttgttatttatttatttatttgtattatactttaagttctagggtacatgtgcagcacgtgcaggtttgttacataggtatacatgtgccatggtggtttgctgcacccatcaacccgtcatctacattaggtatttctcctactgctatccctcccctagccaccagcccccatcctgtcccccagacaggccccttcttgtgtccatgtgttctcattgttcagctcccacttatgagtgagaacatgtagtgtttggttttctgttcttgtgttagtttgctgagaatgatggtttccagcttcatccatgtccctacaaataacatgaactcatccttttcaaataacatgaactcagccatagctgcatagtattccgtggtgtatatgtgtcacattttctttatccagtctgtcattgmtgggcatttgggttggttccaagtctttgctattgtgaacagtgctgcagtaaacatacgtgtgcatgtgtctttacagtagaatgatttataatcctttgggtatatacccagtaatgggattgctgagtcaaatggtatttctagttctagatccttgaggaatcgccgcactgtcttccacaatggttgaactaatttacactcccaccagtagtgtaaaagcattcctatttctccacatcctctccagcatctgttgtttcctgacattttaatgatcgccattctaactggtgtgagatggtgtctcattgtggttttgatttgcatttctctaatgaccagtgatgatgagcattttttcatgtttkttggccgcataaatgtcttcttttgaaaagtgttcatattctttgctcactttttgatggggttggtttttttttttttcttgtaaatttatttaagttctttctagattctggatattagccctttgtcagatggatagattgcaaaaattttctcccattctgtaggttgcctgttcactctgatgatagtttcttttgctttgaagaagctctagtttaattagatcccatttgtcaattttggcttttgttgccattacttttggtgttttagtcatgaagtctttgcccatgcctgtgtcctgaatggtattgcctagggttacttctagggtttttatggttttaggtcttatgtttaagtctttaatccatcttgagttaatgtttgtataagatgtaaggaaggggtccagtttcagttttttgcatatggctagccagttttcccaacaccatttattaaatagggaatcctttccccattggttgtttttgtgaggtttgtcaaagatcagatggttgtagatgtgtggtgttatttccaagggctctgttctgttccgttggtctatatctctgtttttgtaccagtaccatgctgttttggttactgtagccttgtagtgtagtttgaagttaggtagcgtgatggctccagctttgttctttttgcttaggattgtcttggctatgtgggctgttttttggttccatatgaaatttaaagtagttttttcctaattctgtgaagaaagtcaatggtagcttgatgggaatcacactgaatctataaattactttgggcagtatggccattttcacaatattgattctttcctatccatgagcatggaatgttttccatttgtgtgtgtcctctcttatttccttgagcagtggtttgtagttctccttgaagaggtccttcacatcccttgtaagttatattcctaggtattttattctctttgtagcaattgtgaatgggagttcactcatgacttgcctctctgtttgtctattattgatgtataggaatgcttgtgatttttgcaacttgatttttttatcctgagactttgctcaagttgcttatcagcttaaggagatttggggctgagatgatggagtttgtaaatatacaatatacaattatgtcatctgcaaatagagacaatttgacttcctctattcctatttgaatatcctttatttctttctcttgcctgactgccctggccagaacttccaatactatattgaatagtagtggtaagagagggcatctttgtcttgtgctggttttcaaagggaatgcttccagtttttgcccattcagtatgatattggctatgggtttgtcacaaatagctggtcttattttgagatatgtgccatcaatatctagtttattgagagtttttagcatgaaggggtgttgaattttattgaaggccttttctgcatctattgaggtaatcatgtggtttttttcattggttctgtttatgtgatggattacatttattgatttgtgtatgttgaaccagacttgcatctcagggatgaagccaacttgatcgtggtggataagctttttgatgtcctgctggatttggtttgccagtattttattgaggattttagcatcaatgttcatcaggaatattggcctgaaattttcttttttgttgtgtctctgccaggttttggtatcaggatgatgctggcctcataaaatgagtttaggagaattccctctttttctatcgtttggaatagtttcagaaggaatggtaccagctcctctttgtacctctggtagaattcggctgtgattctgtctggtcctggactttttttggttggtaggctgttaattactgcctcagttttagaacttgttattggtctattcagtgattcgaattcttccttgtttagacttgggagggtgtatgtgtcgagaaatttattcatttcttctagattttctagtttatttttgtagagttgtttatagtattctctgatggtagtttgtatttctttgggatcagtggtgatatcccctttatcatttttaattgcatctatttgattcttctctcttttcttctttattagtctggctagcggtctattttgttgatcttttcaaaaatgcagctcctggattcattgatttttttgaatggtttttcatgtctctatctccttcagttctgctctcatattaggtatttctcgtcttctgctagcttttgaattatttatttgcccgttgcttttctagttcttttttttgtttgtttgagatggagtcttgctctgttgcccaggctggagtgcagtggcgcgatcttggctcactgcaagctctgcctcctggtttcacgccattctcctgcctccttcctgagtagctgggactacaggcacccatcaccacacctggctaattcttttgtatttttattagagttggagtttcaccgtgttagccaggagggtgttaatctcctgaccctgtgatctgcccgccttggcctcccaaagtgttgggattacaggmgtgagccaccatgcccggccttctctagttcttttaattgtgatgttagggtgtcgattttagatctttcctgctttctcttgtgggcatttagtgctataagtttctctcgaaacactgctttagccgtgtcccagagattctggtatgttgtgtctttgttttcattggtttcgaagaaatgttttctgccctaatttctttgtttacccagtagtcctttagtagcacgttgttcagtttccatgtaattgtgtggttttgagtgagtttcttaatcctgagttctaatttgattgcactgtgatctgagagactgttaagatttccattcttttccatttgctgaggagtgttttacttccaattatgtggtcaattttagagtaagtgtgatgtggtgctcagaatgtatattctgttgatttggggtggagatttctgtagatgtctgttaggtcacttggaccagagctcagttcragtcctgaatatccttsttaattttctgcctccttgaggtgtctgatatacacagtggggtgttaaaatctcccactattattgtgtgggagtctaaatctctttgtaggtctctaagaacttgctatatgaatctgggtgttcctgtagtgggtgcatgtatatttaggataattaggtcttcttgttgcgttgatccctttaccattatataatgcctttctttgtctcatttgatctttgttggtttaaagtctgttttctcttagagtgggatcgcaacctctgctttttttttgttttccatttgcttggtaaatatttcttcatccctttattttgagcctaygtgtatcttagcacatgagataggtctcctgaatacagcacaccgataggttttgagcctttatccaatttgccagtctgtgtcttttaattggggcatttagaccatttacatttaaggttaatattgttatgtgtgaatttgatactgtcattatgatgctagctggttattttgcccattagttgatgcagtttcttcctagtgtcaataggctttgtaatttggtatgtttttgcagtggctcgtatcgattattcctttccaagtttagtgcttccttcaggagmtcttgtaaggcaggcctggttgtgagaaaatctctcagcctttgcttgtctgtgaaggattttatttctcctttgcgtatgaagcttagtttggctgggtatgaaattctgggttgaaaatcctttttttttttgagatggagtctcgctgtcacctggcttgagtgcaatggcatgatctcagctcactgcaacctctgcctcctgggttcaagcaattctcctgcctcagcctcccgagtagttgagattacaggtggtcaccaccatgtctggctaatttttgtatttttagtagagacggggtttcaccatgttggccaggctgttcttgaactcctgacctcgtgatccaccctcctcagcctcccaaagtgctggaattacaggcgtgaaccactgtgcctggcgaaaattcttttctttaagaatgttgaatattggcccccactctcttctggcttgtagggtttctgcagagagattcactgttagcctgatgggcttgcctttgtgggtaaccygacatttctctctggctgcccttaacattttttcctttatttcaaccttggtgaatctgacgattatgtgtcttgcagttgctcttcttgaggagtaactttttagtattctctgtatttcctgaatttaaatgttggcctgtcttgctaggttgggcaagttctcctggataaaatcctgaagagtgttttccgacttggttccattccccctgtcactttcaggtacaccaatcaaccatagatttggtcttttcacatagtcccatatttcttggaggctttattcattccttttcattcctttttctctaatattgtcttcatgctttatttcatyaagttgatcttcaatctcttgataccctttcttcagtttgatcaatttggctattgatacttgtgtataattcacgaagttcttgggctttgcttttcagctccatcagatcatttatgttcttctctaaactggttattctagttagcaaattcctctgtccttttatcaaggttcttagcttccttgcattgggttagaacatgttcctttagctcagaggagtttgttattacctgtcttctgaagcctatttctgtcagtttgtcaaactcattctccattcagttttgttttcttgctggcaaggagttgtgatcctttggaggaagaggctttctggtgtttggaattttcagccttttcatgctggtttcttctgatctttgtggatttatttacctttggtttttgatgttggtgaccttcagatggggtttctgtgtgcacatcctttttgttgatgttgatgctatttgtttctgtttgttagttttccttctaacagttaggcctctctactgcaggtctgctggagtttgctggaggtctactccagacccagtttacctgggtatcaccagtggaggctgcagatcagcaaagattgctgcctgttccttgctctggaagctttgtccyagaggggcaccctccagatgccagccggagctctcctgtgtgaggtgtctattggtccctgctgtgaggtgtttcccagtcaggagacacaggtgtcagcgacctacttgaggaggtggtctagtctgacccttagtggaactcaaatactgtgctgggagatctgctgctctcttcagagctggcaggcagggacgtttaaatctgctgaagctgcacccacagttgccccttccctgaggtgctctgtcccagggagatgggggttttatttataagcctctgactggggttgctgcctttttttcagagataccctgcccagaatgtgggaatctggagaggcagtctggctacagtggctttgctgaggtgtggaaagctctgcccagctggaacttcccctctgctttgtttacactgtgaggggaaaaccacatactcaagcctcagcaatggcggacacccctacccccaccaagcttgagtgtcccagttcgacttcagactgctgtgctggtagtgagaatttcaagccagtggatcttagcttgctggactccatagrggtgggatctgctgagctagaccacttggctccctgacttcagccccctttccaagggagtgaatggttctgtcttgctggtgttacaggtgccaccggggtatgaaaaaatactcctgcagctagcttggtgtctgcctaaacagccacccagttttgtgcttgaaacccagggccctggtggcataggcaccggagggaatctcctggtctaaaggttgcaaagaccgtgggaaaagtgtagtatctgggccagaatgcaccattcctcacagcacagtccctcacggcttcccttggctatgggagggagttttctgacctcttgcacttcctgggtgaggtgatgccccaccctgcttcggctcgccccaagtgggctgcacccactgtctaaccagtccccatgagatgagctgtgtacctcggttggaaatgcagaaatcacccacgttctgcgttgatctagctgggtgctgcagaccatagctgttcctattcagctatcttgccagcctctcttgaaaagagctacatttttatagtcatgtgtcacttagcgacggggatacgttctgagagatgcttcaaggtgattttgttgttgtgcaaacatcatggactttatttaaacctaaatgatatagcctgctacacacctaggctatatggtttagtctattgctcttagcaacaaacatgtgcagcatgttactgtactgaatactgttggcagttgtatcacgatggtaagtatttgtatagtttaatatatctaaacatagaagaggtacagtaaaattactgtatggtattataatcttatgggaccaccctcatttttgtggtctattgtcagccaaaacctctttatgctgcatgcctcatgtgactgtatttgatttatgtattttgtttttttgtgctgtggcttcatgaatgacctgcctgtgtatttacttttaggtccattgagtgacatatattcgttttcaggataacataaaattattttcattttattcagcctcacttttctcaaccataaatttagggctgtctcatatcaccaaaggttcttctgtgactaaaattctgtattgtgattatggataaatgagtctttcaggattcagaatcacctcagaagacaatactgtagagaaatcaagtatatttaatcatacaactcatgtgtaatccttttagagaatattttgatgattttagatcaatttagtaatgcaaagttggacaaacagaaagcagctgcccaaagatgaaaactcagcctagaataactgatatttctaatcaggggtataaatgaaatatgagaaatatgaaattttctttcataaaaatgaattcatattgcttactatatatttggaattagaatagcaatctcaaatgctctgctgaagggaaatttaaaaattaacacaacacattttattaatatattgttcatgtaattgcatatattaacatgtaatctaggtaagttttattagaaatcgtgtgatggaataaatattaggtaacattttagggctagaggaaataatgtgtgttcacttggctgaatagaatgtggagcataagtggggaagtttttgaaaaagtgctttttatgaagtttaaagttcttagaatgtgcatatgttttactctattatgcttgttacgtaaagaacatcctatttaatacatacaaacaaattccatagacagatgttccctggtgacagaaattaaacacctacagaagttgtttgtagcagggctgcattgacataatagccctctttgagtggagcctaaagcaggaagatagcttaactgattgaaccttgtggtttcactctttagacctgcttggacaaacaaggaggtcagtgtgaaaagtctatttgcagattggtctcagaagaaattctcagaagtgatttttttttaaagccaaggaaaatagaactcctgtttttggtgcatatgtcacagctgagcctttctgtttgaagagcttcatttaataatttttgccttttggagtgtaggtgctagactatatcctagacactgtagcattgataaatgttaacatacagaggccgcgtatattctttgcaccaaatactttccttgttcacactgttctgtcacaaatctttttcacagggtgaggaagtgttttatgggaggccaagctactttttaaaagatggtatgaaaacatgaattgaaatgtattattgttattgttattattgttgtgtagtaagtcctaacttaatggaaatttttgtgttctggaactgtaagcaagttttgagtccattggaagtagaccagattttgatttataaaaaatatttggaaaaacaattagagaaattgtgattgagataattgattccaggcaatagcttatgatgttaaaattctgtgcaattacatagaatgtatattaaaatattgctcaactgtttaaccatcagtgaatgaagggagcccagaaggtctgtttagtcttaagtaattacagaagacaacttgtgtgttgtaaagtgatttttccacttaataactttggtaaagaactattagggataggagacttatatcatgctactgctggaattattgtaattaatttttaaatgggaattttatctaataaatcccagggaagaaaattttattttgaagcatgtctttcctatcacactcattattggctttttggaaaattattttagacatgtgtttgatttcatatttctgatgcatatcttagtgaatcaaaactgacatacattgccgttttagttggcatttactttactaaatgattggtacatttactaagtttacatgttattgttttaaagcgacagcaggcttaacttgagcatcatggctgttgcaggtactagggctctcgcctttgcagtaggatgaatatggtaatgacagtgcaagagagattccaaagacgtatatctcatcgctaactctattttagccctttgagctcgtcctttagttagaattttaagtttctctagggtacttcttaggcttcttttgctgtgcacagtgccctctcttaattaacagcagagtaatattgggcaaatgtctgagagcatcaatatcctcatctgtgaaatagtgttaataacatatatcacagtgtagctggtcagatccaaatgagaaatatttagaaagatttttaataagtaaacaagtgtttagtaaaacactttttaaaaacatctttcaaatgttatcttagttcactttaattagcaagttgaatcaaactgacagtctctttggcatttggtggtgttctagatagccagtagttactattccgttaagttcctctgagactgtagagaaaaactgtacattttgatatgttttgttgaaaaacatttttgtaatcttttaattttttttttaattttgcacagattgagatcagggaaagagactgacatatacttttagatgtctgatttcctagaggcaaatattttggactgagttttcctgtccaagtgttagctctgaagttcttaccattataatgacaacaaagaaaaaagaggtggtaaccccaaaaagaacagggagcaacgttgcctacctacatgcataaagctgccagtaatttgatcgactcaaccaaagagatagaaaaatttgaagtcagatccactaaatctcttactcttcctttagaaggcataaagtatatttcacccacatagcgtttacccaagggtgatattccaaatatttaacaacctatgtggcataggcaccaaggattcaggactggaacagcatactgggcctgccctttcctcctggggtttcgctctttagttgtggagttgtggggaatwtagggcaggtggcttattcagggattctgggagaggagactgggaacctcgtgtgggaaaggggtagttgggccctctattaaacagcagctgatggccaagtagggcagaaacccatgtgtgactattgaatatcaaccttgcgtttacctgaatgtgtctacccaaaactggattcataatactggttttcaattttgtcttatggaaacttgttcttccttttgtttactttaatcagttgtaggagatagttgaaggaataacttaatataacatttaattcctaacgttggcagctgaatgtataacttagatgtaacattaaatttctaacatttttaggaaggtatacagaaagcgttacctctaataagtaaaaatataagttctgggaaaattatttaaagaaaccctatttggaatcctttcataaagtgataattttaatttatcttgggcataatattggatctttaataaaatctttgctgtaaaatcagtattatagaaactggctaggcacagtggctaatgcctgtaatccgagtactttaggagtttcaggtgggtgggatcaccttaggtcaggagttcaagaccagcctgaccaacatggtgaaatgccgtttctactaaaaatatcaaaattaactaggcctgatggtgtacacctgtaatcccaggtactcaggaggctgaggcagacgaatcacttgaacctgggaggcggaggctgcagtgagctaagattgcatcactgcactgcagcctgggcaagagagtgagatttggtgattcagtttcaaaaaaaaaaaaaaaagaaaagtcaatatagaaccttaaatagtatatagtttttgaaggactaattcatatgtaattatggaaatgggaagataaccttaaattatttcaactagactggtccaagtcatctgtagtcagtcagtcagtcactcagctagtaaatgcctgaggcaaaacctcggatttctgtttcctrttatttctactgtaccctatctgtattcagaagtgatggtctattttataatctgtctgcttcaaatcactttggcaaccattatgatatatagccttttgagatatgtagcatggattttattgtttctgtttgaaatttggggaaactgagtcccagaatttcctggttttaggtcttatttcacttgtcatgctggtggatgtcaaagatgcagtttwtcaccattcctgtgtagctagccaaaggtatccatccgtgcttctcttggttgcataaaattatggtgagagttagtagatggtgcaggttcatggacgatttctcaaaatgcattttatgaaaacatgtcacagagagagaaaacttgatacttgtgtttttactaagacataatctttttttttttaaattgaatgagaaactgagatctagaggagcaagctcactattcaggaagatttactcatcaaactaagggtaggaatagtaaaactaattgaatcatttcccccaaatctacccttatctaaagcttatttcttcagctttagctggtcaatttctagaccaatgcccccacttccctgtaaccttctctggcaaaagcaatatatcttattatattctaccccacaatggtgagtctgactctagaacaacaaaatggggaaaatctgaatctagaagttccatttttcaggagaatctttattttgggctatatagcctgtgttgtctggaaaattgtcactgagttcttttagtacaattaagacagtctgctatattacaaaatatatacaaaagtgtgtaaaactgtcttatattgtgtataattacgagtaattataaaataaacacctgtgtaaaccacctcctacattaagaagtagaatattgtcttcacctcagaagtctctaattcttagaggtaaccactgttcctgatttaacagtaatcattctgttacctttaaaataatattatttaatgcattcctaaatagtagtagtataccttactctttaatttttaattttttaatttttttattttgagacagagtcttgctctgtcgcctgggctggagtgtagtggcatgctgttggctcactgcaaactctgcctcctggattcacgccattctcttgcctcagcctcccgagtagctggaactacaggcacccgccaccatgcctggctaattttttttttttttttttttttttagtagagacgggttttcaccgtgttagccaggatggtctcgatctcctgacctcgtgatccgcccgccttggcctcccaaagtgctgggattacaggcatgagccaccgctcctggcctaattttttatttttaagtatgtgttcaagtcctttgtctatttttcattctagtgagctatcttttcttatcagtttgtacaatttatatatgtagtttgactggaaacctaattgcttctatgggtcacagtgtcctgtctcattctgcaccatgtcttttcactcttcattatgttttctgttgagcaaaagttttttttcaatttagccaaatttatcagttatttccttgatggttagtgctttttgtgtgtcattttagaaatctttcccacctcaaggtcatgaagatttttctcctgtatcctaaaagttttatattttgcttgtgttcacattaagtcctgaaaacttacctgaagttgatttttgtgtgtgtcagagaaggatccaattccatttttttttccatatggacatctagtggtctcaatattgtcattgaaaagtctgtcctttttctgcttctatgaagtgtgccagttttgtcttaaatcaatgattcatatatgtatgggtctgtttctaggtttttctggtctgtcccatttgtcttttgtttttgtgatgctatataccaatgctgcactatcttcattgctatttatttataataaatattcatatctcataaagttcttacacattgttcttcaaaattgccttgttttttattcttggccttttgcgtttgcatataaatttgagaatcagtcagtttccacagaaacttttttgtgaatttagactgggataacatttagtccatggtaatttggagaaaactgtcatctttatatttactcttcaatccatataaatagtgtatattttcatttatccaggtctttttaaatgtctcaataacattttatgaagttatctttagagatttttgtatgtcctttgctagctgtagtcccatttagcaagatttctggtatacaagattaaaataaaaattagttatatctatataatatcaataaacataataacatttttaaaatacagcattaattaaaaaaatattctaagcaatacaatagcatttattctaaatatatttaaaattaaggtgtaaatttctcacacatcgtgttttgtcctttgtttcttktttgagactacaacctctgcctcccaggttcaggtgattctcatgcctcagcytcccgaatagctggaattacagccagctaattttcacatttttagtagacacagggtttcaccacgttggtccagctggtctcgaactcctgacttcaattggtctgccagcctcagcctcccaaagtgcagggattacaggcatgagccaccacacccggtcgtattttgtcctttgaactctaaaagtttatggtatttgagtctacaaatacagtagtgctgcatttaccaattatttgtacatttgtatcaattattcagaattatggaatattctagtttgagaagtaagagatacttgattttatagtgttaatagcaagaaaaaatrctttactttcttgcctatatttttgtttaatctttttaacaaccttaagagtagagcattatgatttctgttctatagcagatgagacctaaatgcagggatgttaattaatttgcacaatatcacagggctagaaagttgtgagtaccatgatctgaaccaggctgtgtttaacaccaacatccatgatgttttcactataatattttgccacatatcaataactcctgagctcagtgcagtatttcagcatggggatggtaattgattatgataatgagaaatctgaagcatcaaaagactaattaatattcagtttattctgttttattaggcgtaaaagagggtactacatttttcagatttctattcaaaacattaaaatcaaagtttaagcctgctgagcttcaattaatgattcaaattaattaaaaatatttttcctatagtaaagagaacatataatgcatgaatgtagtactcattaatgctatatatttgttaaaatagaaaaatgttttatatttaaataytccacattgtacatagagcccaattttttagcataggaaaaaatgtgaaattttagcttatatttatatatcttttctccttctgtcagtgactgccaccttgccaaatctgtgggagttttatgatctgttatcctctgagatctgtggattcatttaacattttgctgtgattttattggttttggaatcaagaaccaaaatctgaatatagttcactattcatataacaagatttaaggatgtttagtttttaaaagttcttttggtccatattagatttatttctgtttgactaataagtagatggaggaaaaagaatcaaacactgcatatggtttctggaggtatgttttaataacaaaatcaagtctggtcaatgaaagctttcagaaaatggttttataaaaaaaccttgcattctttttagatcaagagcagttttcccccaaaccttaatgtcagtcgtacgattttcttcttcttattttctgttctccatttttgcttatttgttgaaaacattttttagctatgtggagacttgcctgaatgctgtctcctatttaggtagaggccaataagatgatagctggaaaagcttcgattgtctrtcatgaagaccaggatggaataaaagaaaaataagtaatgcagttgtgatattctgcagtatacttcggctctcttaataagatcatgctgtaagcagtgtcttttaactgaagcttgcaacctgttggtgggtcatgaagtagattttaaacattgcaattagcattttatttaatgaatagacatagaatagcatggaaatttaagagtgactatagacttaagagaattgtaaataggacaagtaaaatagaaaaattaatgtatcacacataaaaaggggattttcatgaaactttagtattagttccacagacacacagatacatcaaatagcgtgtgagtcaggatttagtccaggaaacaaaaattacatttatttaaaacaggaagatatttaatacaagagaatttgatgcttataaaatagttggaagatctaagatatgagttctaggctgttcttgctggaatgactttagggagtacagaaatgatccacccaagagccagttatagctaatatggttgctgcaactgtgwgttatgaatatactcctcttgctgcaatccagtaatcaggaagccagagttacactgctaatgctgtagtcacaattgcctcttgacacccagaaaattggaaagtgccacaaaaagcactgctaacaccttgcatttctttatctttgtttgcagttaaaacagtygaaaggatgtaggaaaatggcttctgcttcgcttctgtgttcattatcttagatgaattgcttctaatttgcagaagcgaattctcatccagaatttgaactgcaagagaaatgttttattattgacctctccagtgatctagactgagggtaggagggcagataagagaatccatacacactatccaactcagttcatcaatttgatttctcaccactcacactcactcttccattcatgcttaagtttccaaatggcaacactagtggtgaaaacatgctgctgtcgttcatacacaggaaaagtagttcacttctcctccaaagtgagtgagagcaaagtcactgtacccagtggagagacttttctatcccatagagatacatactgaagtattcgcatattgtctgggatttgctttaaagtactctggaaaaaaaagagggggagggagagatgagacttcatggcagaaatgttgataattattgagaatcaattatgagcatatagtggtccattatttttctctgtttttgtatatgttggaaaatttccattattagtaatggaaattttatatataaatgtatctgcttttctttaactgaaaaaaattgagataactatacaaagaatattgattctccttgttttctgaaatttttaaattagtgattacattcataaatataaagcattgtcactcttggcctgttattttaaaatgaaaatgtcacctggagttatgataataattattaggaccacatgtgttatgaccaaaagtgatttcatatctattttaatgaattaggattagaggagttaaataatcaacttagtacatctgaaaggttcatggctgaatcttcttactctaaataccaggtttgcactattgtaatatccttaagttgctctctatcattagcacctttgaatatgctctattcatacattttctttccttagcccttgttgagaatacaaatctgaaagaatgctgtgtgtgtgcgtgcgtgcgcgcgtgtgtgtgtgcgtgcacacacgtgcactttaacactggattaatataaaaattagatattgagtctcccagtttcagttctgacattttragatcaaggaagttgttaatcttggctaggtgtggtggctcacacctgtaatcccaacactttgggaggccaaggcaggaggattgtttgagcccaggagtttgagaccagcctgggcaatatagggaaaccttgttctacaaaataatttaaaaaaaaaaaaaaaagctaagtgtggtggcaagtgcctgtaatcccagctactcagaaggctgaggtaggaagattgcttgagcccaggagtttgaggctgtagtgagctgtgattgtgtcattgcactccagcctgggtgacagaacaagaccatgtcttaaaaaaaaaaaagacgttattattcacatcgttagaacaagaaaaaactggacaaactgaaaaactagtgacttttcttggaccctgaagcagatatttgaggttacagggcaaaccccctccctgaaatctggagacaggtgcctccagagagtctcagccaagatctatttacctggagaagaagctgctagagtcataaactggtaggaacagtttaaatggcaattttgataaattgctgaagactaagtattcagcagggtgtgacttagaaactcctacctacctccccaccagtgttcatgggctttacctataaggaaccccaccagtttctcacagatgatctgagaatgattccctcatggccctggtgggagaagtggacaagtaatcatcctaaaatgtacccagagcctttttttaataaaatgtccacactccagggtgaaagactgtatcagagccttgtgctgcagccatgggagtaggatattactgcctgggccctgtagccttcctgcttcactgaaggaattggaaaaaacaattcatgaaaaaacttgtaaaggtcacaggctagagacaaagactcactaaaagacattctgtaatctctgattaaacagaggtttagtataatcagagattatagaatgctactccttgcccccatttcactatcacactggcacgtctccagtttaataacagcagatgacagctgaaagaacttcaagacacaaattccctccgaggaagagtacttaaagaaacccatagttaaaagggaagatgaaaacaagggcactgcagaaattttatacctctagcaccctacagcaaacgttagacagcccaacacatagccagcagaacataaatcctcataccaaaagcccatgtacctcattcctatttcccattataacatgtccactttcaacaaaaacttataaggcatgccaaaggcaagaaagaacacagtctgaagagacaaagccatcatcagagcccttatcatagatgacacagaggttggaattataagacaggcagtttaaaataactgattaatatattaaggactctaatttaagaagtagacaacatgcaagcacagatgggctatgtaagaatggagtcgaaaactcgaataaaaaattaaaaggaggccaggcacagtggcttatgcctgtaatccagcactttgggaggctgaggcaggcagatcacttcaggtcaggagttcaagaccaggctggccaacatggtgaaaccccgtctctactttttagttgggcttggtggtgtgtgcctataatcccagctactctggaggctgaggcaggagaattgcttgaatctgggaggcagaggttgcagtgagccaagatcatgccactgtactccagcctgggcgacagagggagactacatctgaaaaaaaaaaaaaagtattaaaaggaaatgctataaatcaaagacactgtaacagaaatgaagaatgccttcagtgtatcaatagacttgataaggatgaggaaagaataaataagtttgaaaataggtcaatagaagcttcccaaattgaaatgtaagggaaaaaaggaatgaaggaaaaaaaaaatcagaatagagcatctaagaactgtggatcaatttttaaaggtgtgacatacccataattggaataacaggaggagaaagagataaaggagaaaaatatttgaagtgataatggctaacaactttctaaaattaatgacagatagaaacccacaaacacaggaagctcagagaataccaggtagcataaatatcaaaacaaacaaaaaccaaataccaacagcccacacctgagcacatcatattcaaactgccaaaaatcaaagacggagaagatcttgaaataagagagacggtggaagatacatctatcctatagaggaacgaggatcagaaaggtggattttgaagcaaggttgcatatattctatgacatgtaattgtaccttcaatttcacatagatgttttaaacacctaccatatagcatgttttatgaaagataatacagataaataagacctaataacttctctctctcccccagtcaaataactaaaatctagtagaagaaagtaaaaaaagtgtataagtaaaaatataacacagattttaaagtatcctagggaggtaccaaaaaaaaaaagtgctataagggatttagaggaggaaaagatagcatggctgagtcagtaacggctccatgcatgatgatgttaaggagttattttacttataagcagccagcatcctttgagaccagcctgggcaatatagggaaaccttgtttctacaaaaaaaaattaaaaataatacaggatattattttaataataataatacaggatgtactcctgttgcccacaggagttgactcagaacttgacctttgttattttcctctcgtttcttgaaatttgtatcttctcccttactcaggttattttgctttctgttttactgagaaaatagtgatcatagagaacttaggccatctttatctccatcctttcccttgtgccacatctagatttcactaggcacttttcattctctgaagaaattgtttaatctactctcgaattttagttactggcttgtcttgcatgattattttgatgatctgttgaattttttccccaatactgccctcccagcataatatgcattctccatgaaagagattaatcctctctctccctgctgaaaatcctctacagttctcaccttggcctccagaataaaatctacctctttagcctgtctttcaagggccttcttattctgccccaaactatagtttgtgatttctgagaggagatatcccatgaaatattttccaaatttatttgacagaaatatccactttgtatctcctgggtctctaatgttttgcagagtacagtttgggaaatgctgggattgaaggaagaacgtgaacatttgggaaagggaacaggagggaaatgcatgactaaggtcatcttagtagtaatgagcatggagaatagcccagctgcatatgaggttatgacatacattagtagacgaatctcaaaatgctgatttcttctccaaggtttttagaatgatcccctgcgtctgtttgtaatctgcagagactgtcatgcagaaaaataggaggaaaaacctttccgctctgaatctcaggagaaaaaaagattttaatcatgtttctggaaacttgcattggtagaatttaaagtcttccagagagctcagttttatttcatttgttatcatatttcatcttgacaatgtaagtgtagattgtttgacaaatttaagaagaatgtgttttcatttcttatgcatttttgtgcagcttttctatagcctccctaaatactatttgtatttatccaattgtcactctaaaatatgaatgtatacttgttaatgttcctattgcaaaggctgtgcttcgttcagttttcttttatttgtagtttctcgtaactagaaatctcatgcttttctgaaataggaataattgaatatttattgacatgtccttaaggagtactatatcactctgaagtgacttatggcacatcaaaaatattaactatacattattactatacattattttacttattattataatttaaaatttcattatttcctgaaaattttttcagtgagacttccagaacctgtgctggaaggataaatttgagatctatttgcacactaggtggtgcaaatagaagttacaacactttacatggcacctttatttaatcagaggtcaaaatacatggccagtaatgtagtacatccttgggaacaggacattatttgcttcactcactggtggggagagggtcctaccatccatctcgaggcscttgggcaataggttttacttgggaaggtgatgtcagggaaggcaggtagccaggtgtgcttttactgccctcagggagttcctagtctacttgtgcatgaaatagacctatatgtaagcatttaagatgataccaaaaatattccgttttccaggaggtgtggagttgtgagtagacaaggaagaataagcatttaaggaatacgtgatactcatgcatcatgtgcagtgcaatgggtctttttctgaaattttgtctacacaacctaaaattcctacttatgctactatttttaaaaactgatatgttttattagaagagtcagatgacatgtctgtttagaagtagaactttttatatcaaatgaatttaagaatgctatcttatgaccttgtttttgcatgaaggcatctataccatttttcatctcatcaagtgaaaataccaaattttggtaaagttgtacttcatttatgatgccttgaaaaataaaccatacacgtgattcatttattacacatttaggctgttgatagtgtgtcagttttattatgcaaaataatatctttctgttcaacacacctgctcttcacaggtgtatattaatgaggacttcatgatgtgttgatctaaagtaaaacttcttgtcgatgttgaatttagtcaataggttatttttatgctcaagaaaaggtgaaagatatcatcaagctgacaaaatacaatggtttttgtatcatctacatgttaaaataaatttcatgttttgaaataatccacacattgaaataaacagagtttagctgatgactctcactttgaaattttatttttctggtacatctaaaagtatatttttgttaaaaaaaaaagtccctttaagacagattttaggtactccatttgctacacaatttcattaacttagaaccatatttttaaaatgttttctccacacaagtaagatacatatggaaaatttgctactatgcagtccctgtagcatatataaaaaatgaggctgctaaattaggtcttttcttctttaccttctttaaacctacgttattcttttgtgatatttccatcacttaagggaatgagatttcaaattaaattctagagagacttaaattccccttgagttttcttttacttgaggtatgcctatgctatggggtaattagtggtacctcagtaggataatataagcagagtggtaagacatatctgccttgaataactgtgtgagaaaaaacaggcacatttcactaaatacccttgcttgtgctttctataaaattaaaatattttggacagtaataacatacaacacaaatgaataaaaacttgtacatgatgttttgtgtggagtcctgataagtaagcaacaaggaggaagggccccagatggggaagaacagtgaacaactgttctgagagatggctaatcacaaacaacacaagggcacagtgatctcgacctacttctgcaggcacagtgaccttgttctccaggtaccccctctagcatgaccctgtaaaacttccctccagcccctgcatctttgcggacagcccccttctctgctgtgctgcctgtcttacaacatattttcatactttctctaataaatctgcttttctttatctactattgtcttgttaaatttccttactgcctgtgccaccgggcccagatagtcactagctggcaacatttagggaattctaacatcaaattcctctaacgataaactgttaaaacatcatctctagacccagtcttaactttcctcttactggctactccatgccatttgttttgtactctgattcttccagttctgtcctgaaatacctaagcctcttgttcattaattttcttagggtttaaagtacattaatatcagaaataagattagtggatcactccttagtttgatcaagatttaaatccttcttattgcagaagcacaacaatacattggagactgcttcaaaactcaactgaaaaagagaaaaatcaaaagaagccttaggctaggtgaacaggaaatgaggcagttacagtgttttagttgtttgtcctttatttctggagggggtctgccagtggctgttctaactgctccctcttgcctcagatcttgaaagccacactttatccatcattctcacctatttactaaaaagaatgagccacctgaagggacttccctctactttctcctcctctaccttaactgtggctctttatactcttttcctcctgtgtttcctctgctttatgtaagtaattgaagtttaaaagaaaaaaaatatgaacatttttgcccatgcagtatcatttgcaagatcaggaatattatctcaagtttctaacttgaaagggtctaatgagtctaaaagagaaaaaagctgaaaatgtcttgaaaagtaagggactatacaatcaataagctgatattattaactatttttttcaggatttttttttttttttttgagacagtcttgctctgtcatgcaggctggagttaagtgacacaatcaaacctcactgcagcctcaaactcctgggctcaagcagttcttccaactctgcctcccaaagtgttgagattacaggtgtgagccaccacacccagctaattaaatatatatatatatataatatatatatatttttttgtagagatggaggtgtctcactgtgtggtccaacctggtctggaatgcctgcgctcaagtggtcctccctcctcagcctctcaaagtgctgggatttacagagtgagccactgtgcctgacctcagtctttgattttgacatagtttgacccagtttttgttagtggaataggtttggttttaaaaatttaagtggtttcagtaaagggcaataaaaatgatgaaaataatagaaaatgggttctaggactagagttgaaaaggcttgggtcttcattttgtccttagaaaattaggtaagatgattgactccttttaactccttcaagcatgtgaaataatatatttgttagtggtggcaaatatccgagttactggcagcaaagctatacgaatctatggcaacctcaattcttgcttcctaagaagaaataattcgaccgaggggcatgcagtggaaaaagagaccaaggcaagtttccgagcaggaatggaagtttattaaaatgctttagagcaggaaacaaaggaaagtacacttggaagagacctaaacgggcactttggaggtcaatggtggcgtatgaccttttgatttggagttttatatgttggcatccttacagggccttgtttaccttttcccatctcttagggtgggctgcccgcatgcgcagtggcctgctaacccttgggaggtgagcatgcgcagtgtgtttaagaagttgtacacatgctcacttgaggctttcttccctttttcagtggaatgcccctggaaggtcatactctgccattttgtctcttaatgcacatgcccaagcctacttgcccaattcctgagctgccagttaccaatttcaagtgtttttatctattgtgaaattgcctctttttggcgcctgtgaccaatgatcatttttagagaagtggtgtgtcaactgtgggaccatcacctgatggttgcctgacatttctagtgggcgaggggagccctcttctgccctgctcatgcctaactacctactgtatggttgcctgacatttctagtaggcgaggggagccctcttctgccctgctcatgcctaactacctactgtaatatattgatgcaacaaaaatcaaatggagaaaatgggcttataatggagcaacagaaaatagttaattataatttctgaatttaacgggttattaaacacataccaggctactaaagaaggctgtataattatcagtgttgagtatcattaagattaggtagtatttcttttcttttgtataattatcagtgttgagtatcattaagattaggtagtatttcttttcttttttttttttttttgagacagagtctcgctctgccgcccaggctggagtgcaatggcacaatctcggttccctgcaacctctgactcctgggttcaagcaattctcctgcctcagcctcccgagtagctgggattacaggagtatgtgccaccacgcctggctaatttttgtatttttagtacagatggggtttcaccatgttgacaggctggtcctgaacttcaagttcttggtcttggacttcaagtgatccatctgcctcagtctaccaaaaggctgtgattaccagcatgagccaccatacctggtcaagattaggtagtatttctattaaatgtttcagatattgtattttctaaaagcagataacccgatggcctttggcattgcctaaaaccttttggactctgctatttgataacacggaattgtggaatatcatatgaaactcttatttttctcttctgttgtatttaaattctttcttaatatgcacattttctaagaagatactttttaagagagaaaagatagaggcctgcatgggtaatacttggattgagcccagggaattctctgtcatgcattttagctatggggacatcagctgctacttatttgctactgatttctcacttccttctttttcataccagctttcaattgcttgtttctaaacaatgcgttatctttgattaaattagaccagtaataaaagctcgtgaatccttaaatgaaaagcacacattctggtcttcttgaccctgcattccaaaattattctctaatgtttataaccaccttggtagataaagtcttctttttccttctcagagaaacggtttgcagccaactgtgaccactaagctaaatctattgcggtgtttgtaattgaaagctttttgtatgtcttggttgtggtgctgggctctctcctggatttgttgatttcaacaatggagtaattcaggagaacagagagggaccagttagagctctccaggttctgtgtaacacacaccatagttggcagcagctgagatttgcttcatatttatctctaagggcgttgtggtggttccagccccaagattaaagtcagcatgtcatctctttttattatttcgaatggctttttacttttatagtatacatgaataaattttatcagcagggactattaagcagtgtttcggcacaaatgctttagagtacattttttagttgatgtgtactatgccagttatagagagctgtcaatacagtttcagtcttcagtgacaaaatctatcattttctaacttgctagaaacctttctttttagaaattcactttttgagacataatggcttcaattctccaggatctttttctgtctgttttgaatgagcttattgtttattcacagtaaagaatgtttctgatactgctttgttgtaaatatagttgagtgccctagctgacatccttgttgagcccaaaaagactgtttgagtacactttttgtcaggtggtacctttgctgaaactgaagaaggagattttgaagaattttcttgatttcaccagattattttaatggccttaaattttccatttaaatttgcaataacttttgccagttatagagagtgattcattggggaccactttatcttttgcattgtggtatgaggcacagatgtaaaggggacacattcttggggtagctttttctattaggcctttgcagttggaagtactccatatagaaagtgtttgaagtttttacaaaaatgtatgctgtaggctgaacagatagaacaaactataagtataaaaacatgctggttaataaatctttcctgtttttccttagacagaattcagttttatttgtattattaaacaagagtaagactttaattatactttcccaagtagaatatttattttaaaaaggaatagctgttaacagaataagaaaacttcattatatttttaattactcatctaattttatgtaaaatgaaatgtacattaaatggtagtacataaagtccagcataaaactgcctatagtacaaatgttgatatttatttcttgttcactaggatgacaaaaattgagagcattttctccttaatagttagcatctattaagtctaatttatggcttcttgtaattcattcatttatcatttttaagtattcattcaacaaaaagttacataacaaagttttaagataaacaggatcagatcatacttagcctcaaagaagtaatctgagaagtttggatatgaaagataaggaaatactatatgatgagtacaataatagaaatattattatagcagtgtcttggaagagcaagtaattggcttgagtagttaagggtaaattttctggagaaattaacgtatatactggtatttttttttaaccatgacagcgttttgttgttgttgttgttgttgttgttgttgttkttttgagacagagtctcattctgttgcccaggctggagtgcagtggcgcgatcttggctcactgcagccttcgcctcctgggttcaatctattctcctgcctcaacctcccaagtagctgggattacaggtgcctgccaccacgccgagctaattttttgtattttttttagtagaaacggggtttcactatgccggtcaggctggtctcaaactcctgaccttgtgatctgcgcacctcagcctccgaaagtgctgggattacaggtgtgagccaccatgcccggccctatgacagctattatttttaattactgtgtttttattgatataaccatttatataagtgtatctgttatttgaaattatttcagttatatctataaatttacaaatactgagaagtaaaaatgacttgggcatttcaaaatcatgttctacaatgtattgaacagttgaaaaataaagcaaaagagaataaaacaaacacaaacaagcacagggagaagtctggtcagaccctgggctatcatgcttctgtttgtgtgaccactgggtgcttggttgtagcatcccaaacccacaccatgccggaaagagatatgcataggagtatgtagaaggtcacatgtggaataaacttcatcaacagtcacttccaggctccatatattaaaatttcagggattaagatcagaaggaattgttccaatttgtttattttggagaagaaaggtcaatttttacctccaggggataaaccactaatttgcgaagagattgggttaaaaaaagaggaccccacctacttttaaaaataggctttactttttagagcagttttaggttcatagtaagattgagtggaaagtaaagagaggctccatacataccctggctccttcccagcctctcctactgttaagatcctgccttactgtggtacatttgtttcaatcagtgacactactttgacacatcattatcacctaaagtccatagtttacattggggttcactgttagtgttgtatttttcatgggttttgatatatgtataatgacatatatccacatcatgcactgtggtattattttctggccttaaaaatccactgtgctctgccaattaatcccttcctcctgccaattgctaatgtttttactgtctccctacattttgcccttttcagaatgtactatagttggaattttgtagtatacaacctttccagattgacttctttcacttaaaatgcatctcagtttcctccctgtcttttcatggcttgatagatcatttctttttagctctgaatagtattccattttctgagtataccacagtttatccattcacctgtgggtgctttcaagttttgacagttatgaataagctggtataaacatctgtgtgcagatttttgtgtgcacataatttttcagttcatctggataaataccaaggagtgtgattgctggattgtatggttagagtatatttagttttgtacaaaattgccaaactgtcttccaaagtggctgtaccagcaatgatgagagctcctgttgtatcacgtccttagcagcattcggtattgttagtattttggattttggctattctaatacatgtagtgggtatcatgttgttgttttaatttgcagttccctaatgacatatgtggagcatctkttcatctacttatttaccatgtgtatatcttcattggtgggatatatctgtttaatcaaattgattgttttgttattgttggcttttaagaatttttaaattactttagataatactcctttatctgatacctcttgtgataggcatatctgaaggatgtgttgccatccttcaagataagaaatataaacaagaggctgggcttggtggctcacacctataatcccagcactttgggagtctgaggcaggtggatcacttgaggtcaagagttccaaaccagcctgaccaatgtggtgataccctgtctctaataaaaatgcaaaattagctgggcgtggtgatgcatgcctgtaattccagctacatgggaggcgaggcaggagaatcgcttgaacctgggaggtggaggttgcagtgagccaagattgtgccattgcactccaccctgggcaacaagagttaaactccatctcaaaagaaataaatacaagcaagaaagcaggctataggagaagatagtttcattataagtgtgttgaatttaaggcattttaattttataagtaggtaaggatatagacatttttaagcatttatatcatagaattttataatattgcatcattaaattttcttcttcctgctggatgtctctaaatgggggtcccatcagtgccaaacttgtttactggcacaagtaaattttaataagtccagcttatcaattctttctttcatggtttgtgcatttgtgttatatctaaaaagtcatcactatccagagttatctagattttctcctacattgtcttctaggagttttatagttttgcatcttacatttttacatttaagtctgtgattcatttttagttaattcttgggaagggttatggtctgtgtcttggttctttttttttattgattcttttttttttctttcgaatagggatgtccagttattccaggacaatttgttgaaaagactgtcttttctccattgtattgtctttgctcttttgtcaaagatcagtcaagcatatttatatgggtgtgtttctaggctatcgtgtacaattgatctgtttgtcttctttcaccagtacctcactgtcttgattactgtagttttatagtaagtcttgaagttaggtagtgttggtcctccaactttgttcttctccttcagtattgtgttaattattctgggtcttttgtttctccatataaactttagaaccagtttatcaatatccacaaaataactttctgagattttgattgggattatgttgaatccatatatttaattgggaaaaattggcatctttatacatgtcatttcagaaagaggaaatagtatgtataaatttactgaggtatgaaaaagtatactattttctggggttacccagtttgctactattggaacataccattcagagttagaagataaaactggagaggtatttagaaactcaattacaaaagatcctttatgccaaaacaacaaaaaaagtcagccatgaccatcactatttattgaacatctacagaaccagatgcattaaaattttttttttattttaattttttttttttttttgagacagagtctctctctcactcaggctgcagtgcagtggtgtgatctcagctcactgcaacctcctcctccagggttcaagtgattctcctgcctcagcttactgagtagctgggattacaggtgcacaccaccatgcccagctaacttttgtatttttagtagagatggggtttcgccgagttggccaggttggtcttaaactcctgacctcaagtgattcacctgtctcggcctcccaaagtgctgggattataggcaggagccactgtgcctggcccagatgaattttatagtcattgcctctctttactataaggaaataataaacagtcagtaatgggcttaatgtcagggagactacgaactggcttgaaatttaggaagattgttttgccaaacttgttaattggtaaaaagcaagaatgagaaagaaggcaagataagaagctattttagtagttcatataagagattatgatggcctgaagcaagactgtgatagagggaatggagaaaagtggaaggattgaagagttagttagaaggtggcaggaatctaatggttgaaaaggaggagttaagaatcgtacccaggtttctggctggggagccccgtggattgtgttgccatccttcaagataagaaatacaagcaagaaagcaggctataggagaagatagtgagtttcatgacagatgtgttgaattgtaggcattttaatttttgaagtaggtaaggataaggacatgcttaagaatttatgtcatacaattttataatgttaagtcattaaattttcttcttcctgctggatatctctaaatgggagggccttgtcagttcctcatcttctctccaaagccagatttttcttctgtgttcccagttttagttattggcatcaaccaatagtcaggaacttaggacagcaatcttgaagtcattttcaatgttctgtttccctcaccttatgtgtccggtcagttgccaagtgccatcaattctaagtctgcaatatctcttttacctctgctcatttctcttgtcgttgtgtctgctctatatcatgctctcatcatttctaccctggaaaagctcaaaagcctgggattctctgcatgcctctagtctccccttcttccagcctattattgactaagcccccagaacaatcttcctgtgtgataaagcatgctgccttcatggagcctgtttcatttctttgtattaatagtagcattggtgggacgacttccctccatcctcactcaggggaagtttcattaaaatgttgttcacagttagggtctctctgtgttgagatggatgtgaagaaactcattgttaaaagaaaagcaaataaagtgattaaagttttcataaaatcaaatctgaaggaatgtaatagaaatgggttatggctttcatcagtaaggtgttggtatgtgcttgtcagttttttacaaagcagagggaacagggaatagagtgaatgtggaacttgaacctcacactaaggaagtttttgtataattttcccacaatgcaactggctctggggaaatttcattcatgtacacaaaagaagtattgcagcaaaattcaataaggttttaagtaagtttcttaacaccaataaaaataaaaatgctagataacaggaataacaatattggaaactgcgtagaaagcctattcgtagatgtaattttacttttgaactatgatgggagagggggatgaaagtgaagtccaatactcaattttggagagggtgcttacaacttggattcctaatcctgaagagaaggatggcagctcaatacagaatctgtttgtgaggcacttgttacattgctgtatgtggtggtctgtaaagtaggcttacaaggatcttccctcatttaggtttctactgacctcaccaaactttggtctatttgggcagtaggcagtagcttggagaaagggaactgcatgctttggaaagctccctaacaaaattcattatacattgctctatagaagtatatagcgttcagctcagacaggtctattgaagataggaaagatctgaagggcaatcacaaaacaacgtttagcctaaaaagaaagaaatgttaaatcagctaaaataagtatacatagacagtttatgttgagtatacagagaagcatgacattttagaatagatacattgataatattagattagtccactatggcttcctccagtggttccccactgtgttttttttttttttttttctgagagggagtcttgctctcttgcccagctggagtgcagtggcacaatcttggctgactgcaacctctgccttctgggttcaagctattcccctgccttggcctcccgagtagctgagattacaggcgcccaccaccacgcccagctaattttttttttttttgtatttttagtagagacggggtttcaccatgttggtcaggctggtctcaaacttctgacctcaaatgatccatctgccttggcctcccaaagtgctgggattataggtgtgagccaccatgcctggcttttattttggatttaattctatatcattaccgtacattgtctggaactagggtgaccatttaatttatcattgaaattagaactcttttgagagtaaaaggaagtgctattactgattgtacctggagcacaggtgtgtccagtcctgtcccaggtgaagtagaaggtgtggttactggagctataaggccctatgcgtcctggctccctggtccctgcttgtccctgccacactaactgcttgttttttccatcttccacatctgacctttttctctttcttgactggtctaggtttgtacttgcccccagatgagctcttcttcccagcacattgacatttgtgtttcatagcattgaatagtatttgaaaatttttgttttatatttgtttacttgtttcttcataaaatggaaagtggggactgtgttgatctcattcattaccctacttccagtgcttagcacagggcctatttgtaatgttcaaaaatgttctttgaataaataaaagcaagttaactattttaacttacgtgatcaattcctgatgaattatatgtcatggtgttaaaaacaaagttattttaggaaaaagaaccttggtataggagggagagaaatctatgtattggattaagcattcactgactgtccttccctccttgatacttctatttccaaatctgttaagtggagataatatgtgcattgctcattttgccactattagcataaaataaatgtttgggaaaggactgtgcagagtgttagggggcattttatgactagaagtattattatatattttccattcctctccccagttaaaatattgctattttccaacctccccatttctgttgagaactctagtactgaagttttctgttgagaactctagtactgaagttttctgttgaaaacttcaaaattcttaaccctacccattcttttgttcttgatatggagttaattttataagtcctgttaattcttccttggaaacatctccagtttcagtttttattaccactacttaacacccacccctagtgtcatcacttttttctagattgctatgaaaacatttaacatgtttgttttctcttctccatcgagctcaccaaagacaggttaatcttctttaaaagtgatgtttgccaataacctttagtgatccccatagcttatttgataatatccatatttttaagcctagcctttgactttagtcatgttaattctgcatcatgtacatctccttggtttcttattagtacactcatttctgtctttttcttttgtctctcattctaccccagaatgcccttttgctcaagtaccttgtactctaggaagcgtttcctgacaatacactctaagtttgacctcaacatacgttaggaatttcttgttcttattttctctcacataaaccattgcatacctatttgagcttctacctactgagaacctaccatgtgccagaataacatactaataagcattgctaatcaatacagagcaaccccaaataagtattaatccagttatttactaacttgtattgttatttaactgttgtatataaatatgtttccattataaaaatttcaaaagctttcagaaggcaagactcatgtctcatacttctttacttgcatatactattagcaatattaatttctcacttttacttgttaaaatggcatgcatattttacatttcctaaaggctgacatttcttatcatgggcacacttgatacctatggatttgtgtgctaaagaactttaatggtccaagaagttcttatctaaacaattaaattggaatgacaaaagttcagtgaatttggtatttttcttgtaatctttcattattcaggaacaagtttatagacataggatttatgtggtattcaccctgccacccaacagatcaatatgctggtttatcgtcatgcaaagataatttcagtataacactggagtactttgagcagcatagcagatatattttttcttgtagtactggttacttcaaaccctggggctcacagtggtttgaggttaatgaagtgttgcattcttattaaccatggtaatcttatggtgtcacaaaataacaggctttccttgccatatgagtttttcccctgccatatgattttgcagtatttttcagtttgcaaatattgcatgcattgtttgaccatattcccagaagttgctttgtgatagtcaagtttgcctgaagtaatactaatggcatttacagctgtatgtaatatgaattcaactcatgaaagttatcactgatctgtttaaatgaaatattttaactagtatatttttgcaggtatttgctttaggagaagctcctaagaaaaaatgattcaatcttaaaaaggccaaaatctaaatgaatatttatgtttrgacattaattatgtcattctgccagaccagtttttaaaaattatcagacacaccttcactaaactttgttagacaacttcaagttatatataagaatagattaagttattaatgtgatttactgctttaaaaattgttgaattttgatctctctctccatgacaaatgtattatttggagacttcacttagaaaagaaaaagaggaatttatgacttcatcagaagcctcattagggaatatgtttggctttcatgttgagttgtctttttttccttttctttttttctgctgttgtttgttcccaagaaattcacagtctttgaactcacataatttgggggatttcaaatactgtatcattcaaccacagctgttttagatatgccacaaattgtagttctatgaacttgattttttcccctgaacatggagaaaaagcaaataataaagaaaagaaaagggggaaaatttaaattgtctccgtagtaattaaataactcatacagccaaagtgctatattttagtagtaactaccttgtttttaatgtgacatcaaaagctgatggtttgtttctcatttagtgcagatgtgaaatagtctacatctctagaacggtttaaaagaaattatggtcatggtagagagatttaatttgggtctactccatgaacttgaggcattttccccacaaagaactagcagatgaatttaggtacattaaagaaatgattatagacagcttatacaacgtctaaaacttgggaaaccatccctctgtttaattttttaaattcctctcagatctcatttgttaataaccctattcttactcatttttattccttgcacttacccagctttctgcttgggataattttcagtgtgatagaatccacttgactccttcttcctatgccctttcagtatagtattgaagaggaattcattatattgaatgaatgttcttaaatttgtttcacttacttcctctctaataatccattttcttctcagtttgaactttaggtatgggtaatagatcaggaattggggagacctttgttctaaataattggaatgaccatatttgtcaattagagagatatgtagaccaatggttataaaccagagtactagaaattcttgtagaacatcagggaacatgtattctgaagtttgtaactggagagtctgattcagtaagtcagaagtggccctgtgaatgagtactgtaaataatcatcttaaataatactgtaaggattggtcttttgttcctttgtagattgacctcccaaaagttctacctttagttagattgtttagttgaatttataagtaaaaaataatggcttaggctaaattaaaattgttaactggactatttacagatcccttactaggtattagatgttataactgggtaagatagagaatgcaaggaatttcaatatgtttttcctggaaaaaacaaaacaaaacaaaattacacacaagaagatgtacatctgggccgaagatgcttttagagtggcagcttctttgttgtaatttgaaccaagtaaatgagactaaaggggagaatgtaaactgagaagagaagagggctgtggaatcctcaggaagtacagtctttagtgtctggttaaaggagaaagggtctgaaagggagattgtggactagttgctagagaggcaggaagaagacgagaaagatatgtcatgactatcaggccaaaggaaggtttccagaaggaaatagtcaaatgtgctgaagctgttgtaagaggtcaagaaaaatgatacaagaaaattggctttagcaaaggaaagaaaagggatgggagtgggatcgggggtggagcggggtggagtagggagaaggttcttacatcaaagctttagttttcttttcttttcttttctttttttttttgagatgaagtctcgctctgttacccaggctagggtgcagtggcatgatctcaactcactgcaacctctgactccctggttcaagtgattcttctgcctcagcctcccaaatagttgggattgtaggcgtgtgccaccacatccagctaatttttgtatttttagtggagacagggtttcaccatggtggccaggctggtctcgaactcctgacctccagtgatctacccaccttggcctcccaaagtgttgggattacaggcatgagccaccacacccagactcaaagtggtaattttcaaactttagttattcatgtatcacctccatgtgttttttttccatttccaattgccatgctaactatttttcactattttatctttacttttgtaggtattataatttcatggttaaaaaatacaaattttattaaaaggtataggctaagatttattttaccagtcatcccaaacgtcttctacccttctcctcattgattataacagccattcttactagtttcttgtgtatacttttatatttctttttacaaaatcccagagaactcttttaatagctttttagtcctgtgaaaaccccactttttctttattcacattttacggaggctaaccatacaagagaataaccaagtagtaataggttgaagtttctcagcccagactttagaaggccttgagtcagtgcatctgactgtatgatcagtttaatgttaaacatatgtcccaaaatagactagcctgagcatgaaaggtagtcctaaagttcatattttattacttcatttttctgtatctgttatttctagagcataagcagtttgtatgaggttgagcataacagaatgtatgtatgctgagtgtgactttgaaggacaaaaattttgtgatatattagtccctataaaggaacttcgtagctcaatactctaccacctagacttgaattttatttagcttccttcattcctaatgtgtactgtgtcattttgggactgtggaaaccttggattctgatctagaccttgtttcaccccttttgctttcgttttgcaagacttggaggggrgacgggaacatcaaggactctgaaaaatgtgtggttgaggtgttttgcctcagatgttgggaggggttaaggtgcgggagaagatacaggctgagagagactgagcagacaacttggcagcagtcctggaagtgaaaacactcctggaaatagactggtgattctctgaagtctaccccatccccagttctcccacacagcagaggttgtctgactctgaaacaccagctctgtaagtaccatagtgccttcactctaatggagctatagccctgcctttcataggctgagacttacttaggaaactgaaatctaaggtatccaggttcttgccacacagttttgagaggctgacaagtaagtgtcttgagttgactgaacatcctgtgctggacctctccgacagtggaagcttgagtcagccatgctttagcaagggggtggggcagatttggggatttgtataaatcaactttatggaaccagggattaaggtacaggttaggatttgaacttggaatgaactaataaagagtagatatgtaaaagaaaggtgaagtgaccatgacccatcacccaggctgtgcctccttcaccagtgccaaataagagggtcttttatgagtaggactgtaaactgaggtctgctgtttatataaattagatgatggaatcagtcttggttagttagatagcacagttgaaaatgtaaggtccgaagaccccaaactttcccccataagttacaactggatttagatgctgacatcatctagatatggttttgcagccttaagaagttggcacttttactcgacccaaaccttactgagtcaggttgtcagaggggtgggcagtatgacctgattggctatagggatttatattccagtttagaaaagattttaataaaatatgcttgtgccatgtggcagcaaattcacatgcacataacctgactatacagtctccagacaaggcctctggaatgaatgtaagtattccgttaatcccagtataactcacactatgaatgtacaaatgttaccgtgggagctagcactagtttaaggggtagatgacccaggaaagttgcgagccagtgtattgtgactgtgatatggactgttggtggagtacataaatagaacattacctctgaccctgtatgtgygtgtataaattgattacaacagaatcccatagtaacatggaatttaagaaaatcatttgtgttataaggggactcctaagtccagataatcaaaaacaaaacacctgggattttctgaacttcttgccttcctgggcttgtactgggactcaatataatgtcacccatatgaagttctctatggaaatctataggaagtttaaaaatacgtgtatgagctaacatctataaaaatgttaagtgaataggcaaaaattttgtaagtgatattctaattgcagtttggaatgctatcacttataaaataattctttaacaataccataggtctttacaatataacttgttatcattctttgaatgatgtgcaaagagctatggcgctggacgcggtggctcatgcctattaccccagcacttcaggaggccaaggcaggcaaattgcttgagcccargagtttgagaccaggctgggcaacgtagggagactccatctctacaaaaaatacagaaactagtcagatgtggtggtgcacacccgtggtctcagctacttgggaggttgaggtgggaggattgcttgagcccaggaggtcatggctgtagtgggccatgattgtgccactgccctccagctgggtgacagaatgagaccctgtgtcgaatgaatgaatgaaaataaagagccatggctttgtctgtgtttgcaacataatacagactaatgttagtcttacccaagatacaataaaactttattaacacacagcaatattcctgaaaatggcttgtgaattaatggtttttaaaataaaagtgagatattaggctaatgaagatataatttgctgaaaatatcttagtgacttgaacaaacttgtatgaccctgacaagatgttatattagggccccaaattctttttaaattaaaccactcaggcagtgtaattgaggagaatttctttaacttgcatcctctggtaattgtttctgttcttattttcctttggcaattgtgtagatgttgaagatggtggagtgactcctctgcacagctggcagggtgcttgcagtcaggagcatgcattaggtggcccttgagggtgagtggagcaatctgcctgagactgttcattattgtaaagttttggaaaccagtgtcttcagattcacactcacccttgcttgtatgaagtcacatgacagttcacatttgagatggcataagaagggcattaacttcccaaattccctgtgcatcagtgtgaaagagaacccaaaatgtcctgtgcaggtctttcttgctccttcaagtggaagtagttcagttccatagattagggaatttttttttttttttttttagatggagtctcactctgtcacccaggctggagtacagtggtgcagtctcagctcactgcaccctcagcctcctgagccagctgggactacaggtgtgtgccaccacacctggcttatttttgtatttttagtagagatggggttttgccatgttggccaggctggtcttgaactcctgacctcaggtgatctgcccgcctcggcctcccaaagtgctgggattacaggtgtgagccaccgcacccggccaagggggatttttttttctcctttcagtttagttgccctaagtatgattataaaactatactttttctttaccctgccccacttttttctgcttctatgttttaaaaaaaaaatagccataacaggctttgctgccatagagcacttacatatccatgtttcttctattatgaaaggaggagtgttgcttggtagcagtagcggctgtgggtgttagatggcagatgggggactgcagggttgcagctgcagtcctgcaaatattgttaaaataaacttccattggaaattgactggtcaaatagagtgttgtgatgaagcagagctgaaagtctaatgtgaaaaagaggaaaagcatgtatctgagccatgtaaacttttatgcagaccagtattgatgtgatttcttggcagggaattggtgggctgtaagtctgagaggactcaagggaatgactggagaaaagtatcactaatagagtattttgatggaagagaaaacaattcctttatttattgtaagaatgtttcatgtcacaaactaatcttgtgtgaccctgtatatgtgccttactcaattaaaggtacatttggtggagggaatggctcacacctgtaataccagcaatttaataggaggctgaggcaggaggattgcttgagtccagcagtttaagatcagcctgggcatcatagttagaccccatctctacaaaacattaaaaaaattagctcggtgtggcagcacatgcctgttatcccagctacttgggaatttgagacaagagaatcacttgagcccaggcggtcaagtctgcagtgagctgtgattgtgccactgtactccagcctgggcaacagagcaagacttttttaaaaaaaaattttaaataaaataaaggtgcatcttacctttatcttctcatttgctgcagattcttacatgtgtatgtgatgaaatttggatgtgataggtttgcatattggatgctactttggcgtgcacttgtacactataaacagttttcttgaaactgcaaaagggccaaatgaatgtggatgattctcatcaggagagttgcggaaatttgtggggatgtgttttctaatgtagttgagtctgagacgtattcataatgaaatacattatttaacataaattatagtcttattttttctttatattactcagagcataatacttgttttgaaattatgtgtgggggcaggttttaccatgttaattcacttcaagtttgtaaagagagccttataaatttactataaaaatggggacttttgagatccacttatcttggtaatagttaactaggacttcttaaattgtttaactctgtacattcagaagaatttcttgtatcatttaaactgtagtactgttatttgctgttatttaagttctgtaaagtcacagaaaacactgaatcagtgcatatagaaccattgttgtttgcaaaatatggcattaggtccctgccagcctctggtcacattttcatcagtaaatcattatataaccatgtttcacgtgtgtttctttttaaagacactttaatgtacatttttgattcattaactttgaactcatggctagtatactgctatagctcatacctgaatgaagcttatttgatacgaatattttctctataaggtacatcacgagtattttctccgtaaggcacatcacaaccttcttgcacttaggaacactagacagcactttggcactgtgcataggagatattctcaacagcaaaatcaccaacaaaaagcacaaacttacaaaaagtatggcactaagtggagtgaagaaaggacatttgcttacagaataagagctgaaaaatgaaggaaaagtgcaccttatttgacctcagctgggaacgtgcccattgggcaactcaaagtttttgtcactctgacctgtcagcaaatgccaaaaaagcyctacagatttgaggtaacaaataagttttagcaagtgggcaacttttcaaatattgaaatccacgaataatgagaattgactacaagtagttttgccaaaaattgtaaattatggaataacctgtgtagtcacttaaatgcttgcagaatctggagaattaatgaraacttttgatgtggtataacatattaaaatgactttactgtaacatctttgatttaaataatgaaattaaccacatttgtataatgtcttataaaatttttatagtacttcaggtacataattaatttgctctgtagttgaaaaactatgattctgacagattaagtaagtgacttaccactgttgacctgcctaatatgttgtggaaatgaaactggagcccaagtgtttttattttttatttatttattttttctttcagacatgatctcactctgtcactgaggctagagtgcagtggcatgctcatagctcactgcagcctcgacctcctgggctcaaacaattttcccacatcagcctcctgagtagctgtgactacaggtgtgcaccaccacacctggtgaatttttaaaattttgcatagagacatagtcttgctgtgatgcccaggctggtcttgaactcctggccccaagcaatcctcccatgggcctcccaaagtactaggattacaggcgtgagccactgcacctcgccccaagttgctttcatttttaattcactcttaatttttcacctttttctagatagctagttcagaattattctagatatatacatcttagtaagtatggtgatttaaaattactttggacaactttaagtttactttttttaaaaaaggaattttcaagattgttaggtacctgcctgttttcaggggctttgatgacttattccaagaaaatggaattgtctgttgtgactggagtcatcactggattaagctgacaataaactactgttattcttcaagaaacatccatcttctgcacagaccaaagtagtgatttaatttgagtgcacagctcrgttgtactttgtcttgggatgtgaaaagccagaaagaatgtcactcccatagtgatatcactcccacagaacaataaggataaagacagataatctacacaatttcaatttttttaacctactagacagctgagattgataacatctaggtagtctaaaattcaaggaaaaaaaataggcttttccatgtggagaagagaaataagcactggctcatgtggtcactactttttcatcctacaaagagattcactagttaataagcctaggcaagggcacagtactccaatcaactttatagaaatgtattgttatggtccaaattgtgtccctacccccaagttcatgtgttaaagtcccaaaccccagcacctcagaatgtgactgaatttggacacggtgaagttaaaatgaggccttttggattggctgtcatacaatctgactggtgtccttataagaataggaaatttggacatacttagcggtatttgcacagaggaaacactgtgtggatacaaaaggtgactagaccgcaagcctaggagagaggcctcagaagaaacctaccctgccaacaccttgatcttgcattcttgcacttccagcctgcctaactgtgagaagataagtttctgtttaagtcatccagactgtggtattttgttatggcagccctagtaaactaatattttagcactcttaaagaattaagtacgtagagccaaacatgtaagataacccaaaggaaaaatgggagtagaagagaatggagataatgtaggaaggagaagtaaactttaaaaatattataattaatagaagagaagatactatatgtagaaggaataaagttttctaataaagtgatattcagaggacaaaaggacattaaaaggagagtggacattttaagatgtcttacatttttgaagataaagttaggagaatttcccaatgaagtagaaatagtagatatggagaataggagagaaaaattatacagtagaagataatcaatccaggaggtccaacatccaactaatacacagaaacttagagaacagaggaaaaggaagtgaaattatcaagcaagtaatactgagattgtcctagagctagacgtgagtgaatattgagatagaaagccttattaaatgtgcaataaagaagaaaggaattttcaccaagacatgtcatttagaaattcttatgcaccagagataaggagaacttgaaaactttcaggggaaacaacaggccacgttaatggttgggaaatctggatggtatcggatttctccgttttaacaaagaaaggagaaaacagagcaatgccttaaaaattctgaggaaaagtaattttcatcttagaattctataccaaaattatcaatcatatgcatgagtagaataaagatatttttatacatacagtgtcttaaagatatgttttgtctgctgtttctcagaaagctactggagttgtgtaccatgaaattcagggaattaataaatgaagaaggaaaatgtggaatccaggaaatgggatccagcagagagatgtgaagggaattcccacaatgactgtgaagtttaggctaatagttggctcagtgcctagagagtttatagtccagattaaaacagtcagaagactccaggacagtgtctaaggaaaacaaacaagcatgaagctaatatattatctgaggcgatacactggcgggaaggaagttttatagtccttttggaatgcctagggctgaattagtgaatgtacaccaaaaagttattcaaaaaacaaagacagtttataactttatagttaacaaaaatttgtgtgagaaagaagagatacttatatacatgaagtagctcaggtataaacaacttttatgataataataacacagtcatccctcagtgtctgtgggggataggttccagattccccacggataccaaaatccatggatgctcaactcatgtatggcaaagtattttttttttcttttctaagtgctgaggtttgagagaatttctccaagaagctcataaatacagcagtgcccaatcaggtggtctacagcttcagtaacacacctgtgtatacccaggtaactactggtcagctacaaatggaagttcagtaaaagcaattccacaaaggaccaaatttctatctaggcctcagatctggctatctggctagatcctggttaaaactggatatgtggaaaattacagtcaaactatgaaacagccccacccttatctcccttcactgactctcttttcggactcagctcgcctgcacccaggtgaaataaacatccttgttgctaaaggaacaaaaacaaacaaccaaaaaaaaactggatatgtggcctagccctccagcaaactcctaaaatattgcaaacctcagcgcctattaagaagtaacgactgttagcaagaattgggagacaagaagtgacattcggccaggcgtggtggctcacgcctgtaatcccagcactttgggaggccgaggtgggcagatcatttgagatcaggagtttgagaccagcctggccaacatggtgaaagcccatctctactaaaaatacaaaaattagctgggcgtggtggcacacgcctgtagtcccagctacttgggaggctgaggcaggagaattgcttgaacctgggaggtggagattgcggtgagccgagatcgcaccattacactccagcctgggtgacagagcaagactcttgtctcaagaaaaaaaaaaaaaaaaaaaaaaagacaaacaaaacacaaaaagcaaaagtgacattcatcttaacttccaaatagcctgggttagttttatgcctcttttaatgatgaagaaactgagggtcagagagccttaagtttataggtagaaaatgtcagagccagccccaaactcaggtctctggcttcccttccctagtcatgtctaccacccttcaaaaattgagcttatgctctcagcatccctgtggtggatagtgggctgtaggaccaaggaaggctagaagaagatgttggtctacacacttgagtggagatggtgaagaggggacctaggcccagcagtcaggtacttgcttttgtaaccacccaatgagttcaccttgcccactgcttagacagagcagatttctcaagacaagggaattacaatagagaaagagtaattcatgcagagccggctgtgcaggagactggagtttattactacccaaatcagtctcctaaaatggcatagtatttgcatataacccacacacgtcctcctgtctactttaaaccatctctagattacttataatacctaatgtgatgtaaatgctgtgtaaatagttgttatagtatattgtttaaggaataatgacaagaaaaaaagcctgtacatgctcagtacaaatgcagccatctgcagaactcatggatatgaagggctgtctacctaatgattttcccaacatgtgaggaggatagtgtgtgtatgactgccttaaaggagggatggaggacaagaatcagaaatgtggagggggagggcagaggattacactttgttatataacaaacctaagtgtttggcttttaaacttctataattatattcttttggaaaaatattaatactagtaaaggaagtagggctacactttagatagagtacattcagaagggagggcagttaaaatggaaggagagggaaggaggagtataggttgggtttgaagtactttagggagagagagaagaaaggaaaaatcaggacactgttgagacactccacgggtaccccagtggaggttatgtatatacatattaataaatattaatatgccccaaccattgtatttgtttgcagttacttgctccccagtcagcttgtgttcttttcagtgttgacacttgaagttagattagtagcagtcagggttctccacctatatgctgtgtttttcttgttaggtgcctgccatttcttgaaagccctttatgtttctaaggacttgtttttctttttcatgagaatgttcttgtcagagaccaagcgaagagacagccaagggggaagagagtaaagtgaaccattacatcttactgtatgtgtatgtcctttagcttcatgttacttagcttactgtatgtcctttagcttcatgttgtcaatgtaggaaatactactatatgctgttcatgttgttagcacacagtaaactgatctcttcttactctttgagcctacaaccataaaattcccttctatttcttattgtcttcaagcatttttaaaaaatatacatgattccctttgtgggtgcaactattatgttattgcaagaaagacatttcctagccctacttacagaaaatctgtgcatatcacaggtttccaggctattggcttacttggttttctttgttaaccttgatgtaacattccagtggcacctgattttgtctagaaatcattcccaagtgggtaaacatcatatatgtaacctcacccttgtaagcctgctttctttccctgtatgtcatggaaaaatttctgtgttaattggaggtggtttctggcctaattatgtttgaaaaaaaattgtcgaatggagatacatcttaagaaagagatgttgaaataattgcttgagtaaacatagatcaccatgaccttgtaatagtttcccttgaaattatttagtgaaagcaaatttaggcaattactgaaaaccagtgatcaaggaaggaaataaacagctttttttgtttgttttctatttcataggactatacagagcaccccacttaaatgactaatactaaaatttaaatttcaattattttttaaatctctggtatatatatatatatatacacacacacacatatatatataaggtgtttttgcttatgaagtaagacttttgtcagaattcatgtacttgtaaaattctaagttcaggatcataagaagtgagactttttgtgattatttggagcattttgtcagattatgctttcaatttccccattttagagtcattatctaattctactttataggtatttagtaactttgttctttcaagagtattatgaagtcattatatgtattctatcatatggaaagagaatattagtgaacaatgacttctactttgagactttgaacaccaagagaggcaggcctcagatgatcaaggtaatgttaattggctaaaaaaattgaggaatattttttgtgagaatatcaaggggaaaaagaggagacagggacatttatttatgattcatatcaaactggaaggtagttttcaattgtgactatacactaaagattgtcacttgattcacatgtattcaggrctyataaaactaagtcaycatacttagaaatggtttcatgctatcacggtgtctgtcagaattagcaggcaatatctcattataggaaattttaagtatattagtgattttttwaaaaatgtaaaattttgagattttaggatttggagaataactacctgagcccatcctctttgttgtgaattagcaatgggacagaagtatttgtaatatagtgagagaaactaggaaacaagctcactagggtgatattgaggccatgtaatacagaataatctatttcgggagttccttgcaaaggtataatagtaccagatctttaggaatgttttagtttttaaattttacttttcctagatacaatatctagttgaaattttttttatgtggcagttctaggagtactgtggatgcgtgggaaaagaggaatgtgaaaagcttagctcaacttaccttccacttttatttcttttaaatgtcacaaaatagagtttacaaaaatgttagctatctggggtcattttgaatagctgattatctagtagttttaaaattaaaagaaaatgttttattataaaagaaagaatatgcttagtaaaatttaaatctgtattatttaatgttacattatgaaatacattaaggtaattattttaatataaaagcatgtttgttttagaaaatacagaaataaactttttttgtagccccactacccagtgttaattattacactattacgatttgaaattggatttccaggctatttccctatgaagacatatgcttttattttctaaaagatcgtattttatctacctttttgtagtcttttgcctactttatatcatatttaaaagagcagcccattttattaaatattgttctgtggtataattttaatggctgcttactgttatattacataagtgaaccataatgtcatgtttaatttaaatgaacaaattctattttattaactaggtttattataaaagaaatatgtatattcatgttaaatccataatatattaaccaaacttctcttttgttacttacttctttttaaagggaaactgttctttttattttcttatttattataaactcatatttgtataatacacatagcttttgccttactaaatatataatattatataataatatataatataatatatattataaaaattaataatattgtattatataatatatattatatataataatataagttatattattatataatattattatttgtgagaatatcaaggggaaaaagaggagacagggacatttatttatgattcatctcaaactggaaggtagttttcaattgtgactatacactaaagattgtcacttgattcacatgtattcaggactcataaaactaagtcaccatacttagaaatggtttcatgctattacggtgtctgtcagaattagcaggcaatatctcattataggaaattttaagtatattagtgattttttaaaaaatgtaaaattttgaaattttataatatataatatattataaaatatatattatatattatattacatattatatattatgtaatataatatataatatattatatgtatatttattacatataatataatatataatattatattaaatatatatattwaatatatatatttatatattatatttataattattatatataataattattatatatataataattattatatataataatataagttatataatataatataatattatataatataccatatatagcatatatgtgcaatatatattatatattgcatatatattatatatattatatattataatatgttatatataatataataataatattattattattattattttgagacagagtctcactctcttgcccaggctggagtgcactggtgcaatcttggctcactgtgagctccgcttcctgagttcaagcgattctactgccttatcctcctgagtttctgggattataggcatccaccaccacacccagctaatttttgtattttttgtagagacagggtttcaccatgttggccaggctggtctcaaactcctgaccgcaggtgatccacctgcctcggtctctcaaagtggtgagattacaggcatgagccactctgcctggcctacttttatatttcagggtttatattatgaatttatattgttttaattatagctacatgtaaagctaccggaatatgtagaacatagcataagagtaactttggatttgactctggtatagttgttttagaacttactttcttgaaagacttcttgccaagggcttgctttttaatgattttgcctgtctcttttataacttaataacacatttgcagctacctttctctaaaattaattgatgcttatcccaattgttttattttttacctaatttctacacaattagtttcttttgattttgcactgttattcaatgcaatacctgaaagaaataagttttttttttttttttttttttgtcaaggctcacacaccagaagaactaatgataaatattctttgtaatcttctagaaattttagatgcatatataaatacatatatatataaataaatactgtttttttgcttttttggtagagacagtcttgctgtgttgcctaggttggtctttaactcctgggcccaagcaatcctcctgcctcagcctcccaaagtgctgagattatagtcataagccatggaacccagcccataacttctttaaacaaaaaatattatacaagcatgttcacactcacacacgctattaggcaacatgaattttcattttaagatatgttgtaagaatgatgaatgaggttagaagcacagtatcttcagctatgctgcttggaattgaaccccaattcccacgtttactatgtgtgacatcttgggaaagttatttcacatcttaatgtgtctcagtttcctcatgcttagcgtggtgaacaatacaaatgtctatctcatagagttgatgtgagctttcagtaaacttgtgtatgaaaagtacttagttattggcaaaatagagtcattgtatttagccgttacctttttatgtaagagaatataaatttattctaatatttttagactatcccatcttaatattactataatttattgatcccccattacaagccatcgtgttatttccctattttatattattgaaacaatgctgcaaagaccgtctttattattaggattttgtacttgtgaagtaaatatataggatgaagtcctagaagtataattcctgtgtcaaagactacattgcttttttttgtttttttttttkttgttgttttttttgagacggagtttctctcttgttgcccaggctggagtgcaatggcgcgatcttggctcaccccaacctctgcctcccaggttcaagtgattctgctgcctcagcctcccgaataggtgggattacagacatgcgccaccacgcccagctaattttgtatttttagtagagatggggtttctccatgttggtcaggctggtctcaaacttccaacctcaggtgatccacccgtctcggcctcccaaagtgctgggattacaggcgtgatccatcgtgcccggcccaaagactacatatttgaagtttccatgggtgttgctaaattgtccttcaggtttgtgagattgcttttctcctcctactctctccaatactaagtatcacttaatttttaagttttaataatatgataggtgatgaatgctaatttttgttttaagatatattgtaagtggagttgaatatttatttatatttttgagacatttgtatttttttctcatgaactacatgtccatgtaattggttcatttttctattggtttatcaatgtttttcatattgcttttgaaagaacactttgttgtaaaataaccattagctagttcatttgtgccatgaataattttctctgtttattattgacttctcttcctttatagtcatatagattgttccaatttttatgttttcagattcttatatttgttattttgttattgcttctgagtattatgtcattcttcaaaatatctttgccaacacaggatcacatttaaaaagattcactaatctgttcctagatcctcttgtaattttatttttacctttaaatcttagatctactaaaaatgtaggggaggaaaaaaaagtcatcttctgccctcttaagttcagagtctagaacccaggaatcaaactaaagacattaccaggaagaaaaacattcacttaatacatctgcatgggagttcatgacgaaatgtgactcagggaggtggttagaatttggggcttatataccaacttaacaaaaggtgataaagtatggagaggtaggctgggcatggtggctcatgcctgtaaagtaatcccagcactttgggaggctgaggcaggcggatcacaatgtcaggggatcaagaccatcctggctaacacggtgaaaccccgtctctactaaaaatacaaaaaaaattakcctggtgtggtggcgggtgcctgtagtcccagctactcaggaggctgaggcaggagagtggtgtgaacctgggagtcagaggttgcagtgagccgagatcgcgccactgcactccagcctgggcgacagagcgagactccatctcaaaaaaaaatgtatggagaggtagctagacaaaggaaaggggtttggggcttctgtggggcagagcaatgggtaacttgtgggaaagtaactagaaaatgtatagtaattaagagttgtttactaagatttgttttgcagattaggggtcgtctttctgatatggaagaggagaacaccttcacaaatggaaaaatatgtcatctttacgaaaggaaatttatgtcctggttttgtgtttatttttcatacagatcgggtctcactctgttgcccagtctagtctcaaactcctgggctgatgtgatcctcccaccttggcctccgaaagtgctgggattagaggtgtgagccaccgcactcagcctatgtcctagttttagacagaatgttgcaggtcacagaacaattgcctttagttaaacacagttcttagtctaaagtggcatattttgcaatggcctactctgattcccttcacagactcacatggtgaaagtaattatgtgaggatctagctttatttttcttcataaggttagcataatttcctaataccatttattgtataatccaccttctcttcattattttgacatattttgtatctcataaaccaaagttttatatatttgaatttggatctttctggactctctgtttcatcaatctgtctactcctacactagtaataacaattattgtatgtttacaaaactttaaattttctcttatatctagctgctctcccccaatactatttttattaaaaaatttttagtttgttagtgtgtactttttccaggcaaacttaaacttttttgtcatatttcaaaataaaaatagtatttgttcattattttgtgagaatccattggagtttctgagttcagtaggacttaataccttaaatagaacttaattcctgaggtaatcagaaatgagatattttctttcattttattttctctcattattgkatatatatgaaaatggctttaggttatgtttactagttttataacctgacttcttagttacactgctaatcttttccagtttattttttagttatattctttacaaattatagttttatctctttctttccaacgtttatgccttcattccaatgtttataccttttattttttttcttgtctgatttcacagaatgattcctttcaaataatgccattttacttttaaccttttagaatgactttattcaaaataagccacttgtgtaaatatagagttggcttttgatttttaatttagtctgaaattttctttccctcaaatatctgacttcagtaagcaatgattgttatgagataaatgtttgctcttaattatatcaacttctttttatttttttgtttctartaatcactttgttttctggttttcgctttgtggtctgtgtctttgttactttcacttaagtagtgatcttcaaacagttaatttatataatctgtgatttttaaaaatcagtagacttttaccgacatgttagtgaatatgaggatcttagtttacttccatttttttaatcccttgacttccccctcatctttttgacttttgttattttactgagttaaaagataatttttaagagaaaggaaaaatgtatctcttatacagatttaagagtgaatgcacattaaaggatttctttccatagtataatatgagggaactgtagaggaggaaaaaataatttttcctatatcctctgcattgttagctgcccccccaataacaaagacagattaacaagaaaaaacaaacaaacagaagtttattaatatgtacacctcttgtatataagggaggtatgtaagaaataatggtaaatctcaaagagatagctaggattcagatttaaataacatcttcagctaaaaacgaagaaaggttgtgtgtgaggccagttgtggggaggtgaccaggaaaagcatggtgaagagtaaggtttgttatgcagatttgagtcagtgccttctccattgataggagtctcttatgatttagtaattcttcatttcctgccacagagggagatactcttacaaatggagcttttcttcatagatctaagtttcccttacaaaacagtatcttctactctgttttttttytttttaattatacttttaagttttagggtacatgtgcacaacgtgcaggttagttacatatgtatacatgtgccatgctggtgtgctgtacccattaactcatcatttagcattaggtrtatctcctaaagctatccctcccccctccccccaccccacatcagtccccagagtgtgatgttccccttcctgtgtccatgtgttctcactgttcaattcccacctatgagtgagaatatgcggtgtttggttttttgttcttgtgatagtttactgacaatgatgatttccaatttcatccatgtccctacaaaggacatgaactcatcattttttatggctgcatagtattccatggtatatatgtgccacattttcttaatccagtctatcattgttggacatttgggttggttccaagtctttgctattgtgaatagtgccgcaataaacatacgtgtgcatgtgtctttatagcagcattatttatagtcctttgggtatatacccagtaatgggatggctgggtcaaatggtatttctagttctagatccctgaggaatcgccacactgacttccacaagggttgaactagtttacagtcccaacaacagtgtaaaagtgttctatttctccacatcctctccagcaactgttgtttcctgactttttaatgattgccattctaactggtgtgagatgctatctcattgtggttttgatttgcatttctctgatggccagtgatggtgagcattttttcatgtgttttttggctgcataaatgtcttcttttgagaagtgtctgttcatgtccttcgcccactttttgatggggttgtttgtttttttcttgtaaatttgtttgagttcattgtagattctggatattagccctttgtcagatgagtaggtttgcgaaaattttctcccattttgtaggttgcctgttcactctgatggtagtttcttttgctgtgcagaagctctttagtttaatgagatcccatttgtcaattttggcttttgttgccattgcttttggtgttttggacatgaagtccttgcccatgcctatgtcctgaatggtaatgcctaggttttcttctagcgtatttatggttttaggtctaacgtttaagtctttaatccgtcttgaattaatttttgtataaggtgtaaggaagggatccagtttcagctttctacatatggctagccagttttcctagcaccatttattaaatagggaatcctttccccatttcttgtttttctcaggtttgtcaaagatcagatagttgtagatatgcggcattatttctgagggctctgttctgttccattgatctatatctctgttttggtaccagtaccatgctgttttggttactgtagcctggtagaagttgactctctgaatagaccaataacaggctctgaaattgtggcaataatcaatagcttaccaaccaaaaagagtccaggaccagatggattcacagccgaattctaccagaggtacaaggaggaactggtaccattccttctgaaactattccaatcaatagaaaaagagggaatcctccctaactcattttatgaggccagcatcatcctgataccaaagccgggcagagacacaaccaaaaaagagaattttagaccaatatccttgatgaacattgatccaaaaatcctcaataaaatactggcaaactgaatccagcagcacatcaaaaggcttatccaccatgatcaagtgggcttcatccctgggatgcaaggctggttcaatatatgcaaatcaataaatgtaatccggcatataaacagaaccaaagacaaaaaccgcatgattatctcaatagatgcagaaaaggcctttgacaaaattcaacaacgcttcatgctaaaaactcaataaattaggtattgatgggacgtatctcaaaataataagagctatctatgacaaacccacagccaatatcatactgaatgggcaaaaactggaagcatttcctttgaaaactggcacaagacagggatgccctctctcaccactcctattcaacatagtgttggaagttctggccagggcaattaggcaggagaaggaaataaagggcattcaattaggaaaagaggaagtcaaattgtccctgtttgcagatgacatgattgtatagctagaaaacccccattgtcttagcccaaaatctccttaagctgataagcaacttcagcaaagtctcaggatacaaaatcaatgtgcaaaaatcacaagcattcttatacaccaataacagacaaacagagagccaaatcatgagtgaactcccattcacaattgcttcaaagagaataaaatacctaggaatccaacttacaagggacgtgaaggacctcttcaaggagaactacaaaccactgctcagtgaaataaaagaggatacaaagaaatggaagaacattccatgctcatgggtaggaagaatcaatatcatgaaaatggccatactgcccaaggtaatttatagattcaatgccatctccatcaaactaccaatgactttcttcacagaattggaaaaaactactttaaagttcatatggaaccaaaaaagagcccgcatcgccaagtcaatcctaagccaaaagaacaaagctggaggcatcacgctacctgacttcaaactatacttctactctgtttttagagcttctcatgtgtccgctgtttctcaaaataatcaatatgcaaaagaggcatgttttagggtggcattctggtctcctacagtcatatttttgggtggcatattctggtttcctacagaacgaagtagatgttataacaggttcagagaaagtcaaaacagcagagatttatatgagataaagaaatgtccagatgacttgcacatggaacaaaactatttttccatatggggtaagatgtcaattaaaacattatcaggcaggtcaatttacatatctgcttgttaactattgtttacaaagagttgagaaaaagctcaaagacaaagaataagactagaatcaattaattcagaagggtatgtagcttcatctattcctaacaaagcttaaaatcaagacctgaatggatcaaactttctgcataatttaaccacatcccagaaaaaaaagcttaaggatatttgtagaaacacaaaaatagccagcagtaacagggtaaaattcacaatatttcacattcattcagaaatttccaggcatgcaaagaggcagggactttaaaaagagcataacaaggagaaaaatcaatcaaaattgaccctgaaatgacataaatggaagaattagtatacaagaatattaaaatagttattttaactgtgttccatatgttttgaggtgctagagaaaaacgtattaggaagagatatggaaactatgaaaaaggtccaaatcaaacttctagagataagcactataatgaaaaatgagatgaaaaatgtactggatggaattaactgtgcattagacagtgaacaaatgaaggtaagtgaaatttaagatacagctatagaaactttccaaaattaaacagagagaataaaaatgactggggaggaactccctgaaaggtgcattagtaaaccatgaggtaacttaagtggccaaatatgtagtgacatcagcgggaatggtgggataaggcactctggaaatgctcctcttcataaaagcaatactggcaaaatggtcagtcaccttttttcagaattttggaaattaaccaaagtcttgctacaattatgaagcatttaaggaaaatgaccataagctctgtaagaacagcaaatttagtgggattttaatttgctctattacctttaccttctcccctgcccccaacaaacttcccagtgccatgatagccttgaaaccaacagcctgaaatcacggtgaaaaccaccaccttggcagccacttcagggggcttatagtattggattgccttaraaatcccattttcattgaattgtcattgtttgacctgtgtggtgattgtctggataaccccactcacaaagattatttttatttgacctgactcagtgctaacacgttgtttttttggggcgaggtgtgaaagaggggtgtttgtcataaatacttgctttacgtttctgctgtcttactagtagatagcagttaaaacgaaaaatagggctaaccaaaaaacttaataggagaagctggggaattagatgttcatatgaggtttgaaggaagttctgacacattcttgggaattcagaagacttacatgcatgtgtagagctgtgagcatgctcggaaaatacctaagaaggccctcaccttaggctgaccttgaggctctgtgtaagccagaagtggaggctaaggcagagttgtctgctgcctggtgcacatttaaagtgtagagggtagagacctggtgtgatgggtgattcctgtaatcccagcactttgggaggccaagtcaggagaactgctagaggcttggagtgggagaccagcctgggcaacatagcgagacactgtctctacaaaaaaatttaaaatgagcatggcatgggggcgtgtgcctgtaattccagctacctgggaggctgaggtgggaggatggcttgagccctggattttgaggctacagtgagctatgatcatgccactgcaccccagcctgggtgatcctgtctcttaaaaaagaaaaaaagtgtagggtggaagggatttctttttttttttttttttttttttgagacggagtcttgctctgttgcccaggcgaactcggctcactgcaagctccacctcctgggttcacgccattctcctgcctcagcctcccaagtagctgggactacaggcgcccaccaccacgcccggctaattttttgtatttttagaagagacggggtttcaccgtgttagccaggatggtctcaatctcctgacctcatgatccgcccacctcggcctcccaaagtgctgggattacaggcgtgagccactgcgcccagccgggatttcttttctcacccattgcaaggttcatggctgtggtcccataacaaaagacatattaacaagagaaaagcatatatattttgtatatattttatgtgatataggagccttcaggaatgaagacccagagaaacaggtaaatctgtgtatttttatggacagtcatgcagaactatgattggaggacaaaagggtatgatctaatgataataaactaggggaacttggcaatgtctgttttttcagattcttcttcttgtccctgtgtgacattccttgcccccggtatagggcaagacacctgtcacattacattcttcaagggagaagggagggagaaggttacacagtaacctaggtcttatggcctgtttcagggaggaatgtgaggaggggaaggttcaagtggcctcttgcttctgctgtttcctcaacttccaaggtgccatattttggggtagcatgtcttgaactttgtcaaaagtgtaccttaacacttcagagctctgctgcaaagactaggaaacatagtggttccaggtggttccaggtcgttccagcttagctaactgctaagctaatcaagcagagatttcggaggctccgtaccacagggaatatagactttagtgtagaagtctctaaacaaacaatctcaaccacctccacaataaaacagcagcaagaaatatatttgtaattgggttccaaaaagtagatgagggatgaaaaaatatttgaagaaataatgctgaaaaattgctgaattgggtgaaaacactaagttcacagatccaaggagttcaatgaacccaaccacaagaaaaatgaaaactacaccaagttgcaatcataatcacattgcttaaaatcagtgaatatgagaaattttgaaagtagccagagacaaagggaacattgcacagaaaggaataaaaataaagacgacagcagatttcttatcaggaatattgtatgctagaaaacaaggcaaagacatctttttaaagttcttaaaaaattgttcatacttagatagcatgtatatgccataggcatcagtttattaaaatagaaaagaacaatgtgttaccacttaccagtgagctaacacaaaatttaatgcccatgttgaaagaaaagtttagggaaaaattctgagttattggatgtagacagagaagtcagtctgttgctatttacataaggatgatatacctaagggcagagaacttagaaggacatgatgaaataaaaattaactttaatagtgaaatcttgaaaaaataggctaaacgtcactaagaaattatttttgccaagttttatctttacacatttttattataaaggattttgaacatagaacatatagtatgacaacttgggtacccaccatttagctttgtaaaattttaatttttttcatgcttgctttgtatttttctatttaaagaaatataatattacagacttagatttccacagtgttcactccctaatataaaatcgttttgtagcccttcccagaagtaatcactcttttgaatttggtgcttttagttaccaagcattttatattcttttacaacatattgtacttgttataaatggtgtcagataaatatactttgttgaatttttttattttgagatgtgtctttattgatacatgagccatagcccacttagttgtaatctatatagttagtacatgtattctattgtatgaatagtacagaatttgtaatcattttcttgttatggacattaagattgtttataattcatcaccatcgcaaaccatgctgcagtgagtatccttgtgcacgtttacataggcacatgagcaagtgtttctctgtgttgtgtgtctccatgtgaactagccaggttttaggttcgtatatgtatctttaccgttagtgtctgttgtcacattacttatcactgggccatacccaccctcacatgatttactagttcctgtttttccacattctcacccatactcggcctctccaatggatgtaaaatggaattcagtgttttaatttatattgcctattactagtaaagtaggaccctatgtcatgtgtttattaaccattagattttccttttctgtgaatgatgtgtttatatcttagccccatttttttgtttgatttttatttctcttatttatatgaatttgagagctgtctcataaaaagaggaaaacaagagatgagatcccactgtgtcgcccaggctaacccaaacttctggacttagcgattctcccatctcggcctctcagagcgctaggattataggcatgagccactgcgctcagcaaaaaagaaaaaaaaatttttggttttttttttttttttttgagtcttgctctgtcacccaggctgagtacagtggcacgatctcggctcactgcaacctccgcctgctgggttcaagcgattctcctgcctcagcttcctgagtagctgggattacagatgctcaccacaatgcctggctaatttttgtattttyagtagtgacggggtttcgccatattggccaggctggtctccaactcctgacctcaagtgatccacctgccttggcctcccaaagtgctgagattacaggcatgagccactgcacccagcccaaaaatacattgtgaatagcattttattagtatattctctcagtttataacttgtattttcacttggtatatgtttccttataatacaggagttttaaattttaatactatcataatggttaatgtttgatttctttttgttttaaaaatcttcctaagaccataaacattttcttgtgtaatttcatctaaaggttttaagagtttgcttttcagtttgtcttcaatacactaatccacttggaatttattttctgtatgacgtgaggtagggatataatttaatgtgttttttttctttttttaaatttattttattttatgtaagtaaccaattcctctcccccaaattttttccaaaataatattaaaatttaaaatagttctaaatttgtaggaaacctgcaaagatagtacagagaattcctatatactccacacccagtttcctcaattgttaacatcttatgttagaatagttttaaaatagactgtagtacatattgctctacacattgtagaagtggtttttatttttacaacaaaacattagggaattttagtttaggatttttatgtcttaacacatattttataggtagtttaaatcaaaacagggtgattgtgtcataaactttgacacaaatataagtaagcattttacctaaaaaagatttggggtgactgtgttataaattttgacacaaatataaataagtgttttacctgaaaaagatttggagaagaatcttaacttggcaaatgatgttttagtctgttgcctttttattgccaaaatatcttgaatttccttgcaacatttacagctatagagtttgttgattactaactaaggggactttgtagtcagttctaaattctagaatggggaaacagggaataaaggtttttcttaaaacctactcctagttttgctgcactaggccaagcactcttttgtttacttttattcttttctactgcacttcactgataaaatatgtatactaaaatttggagactcaaaagggggcatgtagcactcatatttgaaatttagtccaagatcagtgaaaatcacatcaaggaagatagtgaacataacttataaagtagttgctagtttagacaagaagtcagtgaaattcatgaaaatgctattttggttcagaaaagagagtttaggtcgggagcaagtggctcacacctgtaatcctagcactttgggaggctgaggagggaggatctctccagccctggagtttgagaccagcctgagcaacatagtgagacactgtctcaaaaaataagacaagtaaataaaagatggattttctaaaaaaaagaaagagagagagaaagccaaaagcataaggctgacccattttactgagtgttcaaattatggtaatttcattctgagaagccacctaacacacttagtgtagttgcgctacgattgtgaatctgccttctgtaatagtttctcactctttaagacacagaaataaacataatttagatatgggtgtatagcactcagatgtttacttttatctcatgagaattgctaacccgttttagatttctctttctctaatcaaatagtctcaatgttttatataaagataaatacttcagttttaagaattgtagcttactagaagtattagtctctataattttaaactacaaataaagtaaattttcttcattcacagtactatggaatctctaatatgggtcagtgtttttgctgggtcatgggcgtaatgcttgaagaactccctctgatggggaaaaagtgaaacatgatgaaatattgatagtaaaaggatagatgtctacatttaaccttgaaggataagtagttttttggatggataagaagaatcatgggccgggtgccgctggctcacgcctttaatcccagcactttgggaggtcgaggcgagtagatcacgaggtcaggagttcaagaccagcctagccaagatggtgaaaccttgtctctactaaaactacaaaaattagctgggtgcggtggcaggcgtctgtaatcccagctactcaggaggcagaagcaggaaaatctcttgatcctgggcggcagaggttgcagtgagccgagatcgtgccactgcactccagcctaggtgacagagtgagactccatctcaaaaaaaagagagagagaaaaaaaaaaaaaggaatcatgaaagggaattctgttcactttaagtagcttgagatcttgagatttctggagataccagtaagagtgtgtcagagagaagatgggaaataagaattttaaaaaataaaatcttgcaagatacactatattgtttgagctttattctgtggcttataagaagctcttggagggtttaaaaattgaaaccaagaaaaagaaatgttggctctttaatcagagtagaatcctaataaacaatttggtatgattagagtggtacttgagtagtagctgagaattgggatgtaatagtcaatataatttatcaatgagaagagcattcatcacctgggagaagaggaaagaaactcaagcttttaaagaaggtggaatatattggacctcaacctctgatttaaaatatatggtggtacccttataggagactccattttttttttaaaggaccatggtgttcagtattatgtgctttctaacattgaatttggaaagtttcactgaagttcatggcactgggaaaaccaccatgcaatcagggcagtttaaagatagtagaggaaaaatcacacccgtgattgcaaatgcttgtgttaactgaatattgttttggaagttggaagttcgagaagcctattgaacaatattttttttctctgactaattctgaactacttgagaggtaagacaaaagttagagctgtagagatcaaagtatccagttaaatactaggtaggaggttgttacacaggcccagtttcttgtacctaagggaccagccagacaagtaaatcacttttgcctggggtgatgtgagtaagtgggaggacctggaggcatacactaatggatatctcttcccttgaaaaataaagctgggaaaaggtgattgcttgtcttttagtcagtatttactgctgagactggaaaacattaatgcagtgataatttgctactctcaaatagcaggtttattgtaggtacagttttggaatttcaaagctgaacgtgatcttggagatcatttacttaactcccctcgtttttacagatgaggaagatgtgggcctaaaaaggtcaacttacttaagataacacaagtggaagagcagatcttctgagtcaccatgccaacgtctatttataagtaggaatgctaatgcattgctttttcaatagaaaattaagtgaaatttctcatttctattttcttatatagaaaaccaaaatatgagaatcttaaacacaataaagcaaattagtactccagctactttacaatgactactaccacttttacacatttcttttcaaatgctttttaatgcatacaatttatatgtgaggtgtaactgcagcatccaaattggaatacaagagggctccatctctttcatgtgaaaggactcattttgctgcttgtcttttttatagagaaccattctgaaagaatacaaggtagatatatcaagaatactctgtatctggaatttttttctaacataagctttgaatagctgtgtgaatgtgtacttctttccttgaatctaaaataagattagaccagatatggcaaatacgtttcttttgtccttcccttaaattgatctcatagttaactgctttggagattctgggaagatggctgcacttgcctcacattcttcacctggataatccaccacagggagcggagtcccatgccttgtggttcttttcatccctacttaggtaattgctcagctcccattgggttataacattctgcaactgtatattttagaagctcgtttttttttttctgaattaaactaacttataatattactgagttttacataaagttttattctttagactaatcaatatgctagaaccatctatagatgtaactcagggaactagttcttctgttgtcatatgacagattattccacacaaacacacatactaaaaaagccattgtgaactaagctcaggaaatttcaactgaagcatggtattattattattatgtttctcagcatgagcagtagttttccagaccctcagccaaatgtctgaaagaagataaagtacagtggactttcctataacatagtctgagaattaaaatcaaagtgtcccagtaactaagctgtcttaaatgggaagtgagatcttagattccctttgttattaaggatcaagtctttggtggtttttagtatttaaggtcaacactcactaatcctttttttgaggggtgaatgacagcttaactgcaaagcatagtttcagtttactgcctggcaaatacaagcttattaaaaaaaaacgcctgattttattttgcatttgaaatttatagaatacaaggtctttttgtatcatagtctcatcattgtaaacatcagttatcactaagtaaatgaacactggaagtgctattaacatatattttaagttaatatatagacaaatttgcttttatagtgtatggaaagacttatgcccattgatcattcatggttttgtaatgagcgtttttaagataacatttaccaaagctctatattttaataatccagaaaactataaagaaaataaaaaatcagccaggcacgatggctcaagcctgtaatctcagcactttggaggccaaggtaggcagatcacctgaggtctggagtttctgaccagcctggtcaacatagtgaaacaccatctctactaaaaatgcacaaattagccaggtgtggtggtgtgcacatataatcccagctacttgggaggctaaggcaggagactcgcttgaacccaggagccagaggttacagtaagctgagatcaccccactgtactccagcctcggcaacagagtgagactccatctcaaaaaaagaaaaagaaaaaaatcattcataatcttagcatccagaaattatgatgtctatatgtatttacataattgggatcatgtatgtacatactgatgtagttttataatcttttcacataccaaatatttgaatattttctgtgtcactgaataaccttatagagcatgatttttaggatacatctataagaatcagtatattccatcatatcaatgtaccacttctttaacccttcctttttgacatttagatggcttccaagtttttcctcttttaaatttttattttcttctttaagttctgttggacttgattttttttactttttaaagtaatgttgtgattaatgtcagtgtgcagaaatatttctgtatatctgtgatttcattaaactgttagaatctgttaggtcagcttatactaaagttttcaatatttttgtcccccagaaagttatgcctgttaaaattttattcacagtgtattagagtgagttggtctgtctctttgccttgttttaactcttttttttttttttttttttttttgagacagagtcttgctctgtcacccaggctggagtgcagtggcacaatctcacctcaccgcaacctctgcctacagagttcaagtgattcctctgcctcagtctcccaagtagctgggattataagcacatgacaccacgcccagctaatttttgtatttttagtagagatggggttttgctatgttggctaggctggtcttgaactcctgacctcaagtgatctgcccgtcttggcctcccaaagtgctgggattacaggcgtgagccaccatgaccagccttaaatctttgtagatgaaaaattacttatgtaatttaatttgcatttctttagttactagtaagtttgaatctctacccccttcaatttatggccctttgcagttgtgggggcagggcatgtgttgtttattctatgtaggggtgcttattttagttttggcatttggtgcgttaataatgcttttttttttttttcaaactaaagctgtgtggcaaggagagaaaagcatggttttttaattcatggacttgtatttcgttgtcacttatgtatttcctgtgtgtctttgggccaactgtctgtcatctgtgagcctgaagttgactgacctgccaaaaaagatgattatgagatttaaatgagacacctatcccagaagaatcactcgatggtagctgcacttctccttttcctcacctcctcattatcacctacctgttatttctctctttaggcatttttgaacagaattgaaggaaaacgccattcargtctgctatttgcctgtaaacagagtggatacaatctcactgaccacccaatagtcactgttaaaatcttttcaattcttatgatgacagctgatggatatacttttacattatatttagtgagaaaggagtggaaagagagccagcactggaacaggcacagccatcagaggagcagctttttcttgtctgtatcttatactacacgctttttttttttttttgattaaagactagttctctgtgttgcatttttatgccaactttagctgctgccagaatcttggatgccctaaataccagtgcttacagtggaagccagcagggtgkaccagacagtgaaaaagattcctttgctcatgttgtcagcttatctgaaatcttgaacagctgtttgaatgaatgaatgaagtacatattaaagggagttacagaacttccaaaagaactgcttttatcaggcagactccctgtaagcacctgttgagtagatcctctgtcaggcacaatgccaaattttggagatacagtggaagtaagacactagtcctgtgctgaagatggcagatttaaacaagaaaatagcattaacaaatgaaatgcggcatataagtacgaaaggactacaggtgttctagacaagaggatagtcatctaatattggaggatattgtcataggaaagttccaagatattcaagaaattgagacctataatttggaagaggttttggtttcttccaaagtgagagagtgaggcttaattctctcctgtattaaactgtgttgctataattgctttgtctatgtcagggtgacttgtaagaagcaaatggacatttgagtgcaactacacttttgtttaagacatatggcatatgtatttaccttcccgatatcaatatggcaggtggagatgacatgccatgccaacaggttttggtagacttgagttcttatacatgggatgatgttttgttttattttgttttgtttttttggctcgggagaggacaggcaccaacagatagactttctcaggatagaccaccatgactagaatgcaaaactgtaaaagtgactgctatattttaatcagcaaatctgccacagttgtgggacattaaagccctaattgaccctacatcacctaaagataggtgctgcactcaaggctgcaaagggagccaaccacttttatatatttacatatttaaatccattctccagcaacaattgaaatacttgtaagcattttaattcttcctgccggctctgtatttcaacctgaggacccaaataatacaatttcatccacaacagtaaagctaattacccttgactgtagcatttctaatacaattttattttagcatttcaaaatacatttgaaaagtaaattatgagttcttccaaactagattctctacttagtcacattaaaatgatcaaaaaatggaaacattataaaattttttgccaggaaaaacctacccatcaaaaggagagaagtctttttttatattgtctaccatatgatacaaaaattaattttggtaatattaacaaatgttccttttttggtaatacttsattcctgacataaacattacatctatgttattaagtcatgtcttctagaatacagcctgaactatgcataagacttctttgttttgaagttataaattttattattatccttttgtgagtttttgcctctcacaggtcacttttcttttgttcagaagtggttctgatttaaggcaccaaccttaaatgtttcactgacaattattaaagacacattgcttctaaaacattgtactgtgaacattaagtgatagaaagataagactctgcctcactccaaagcggctgatttatttgaataaaaactgtagtcacagataaatacaatatatagcataatgtaataaatctataggagagaccaacaaatatgaaagaaagcttagcaaacatataacaaaatagtaacaatttttggatgataggatgagtgaaaggaagagtagtgctaagtgaaggctggccatgtatgctggagccagatcttagaagactttggatgtctttctgcatgtttgaactatattctccaggtaatatggagaaacttaggaggactttttatgcccttctccatctccattagaaagtaatacttgctcattatacagaattyggaaagtacaaaaaagtatacaaaagaaatgtaaaatcattcgtaaattcattctctctcctctgtcactctactccatcccgtcttccagtgctgtttcctgacccacagtgatgtgattagagccacgctttaggaatggcacctagatgtggtgtatcataagttgcaggataacttattaggaatcttagtgtgcagagggaataggaaggagtgagtagaacaagaatccttttaaagatagaaacaggctgggcatggtggctcacacctgtaatcccagcactttgggaggccaaggcacgtggatcatttgaggtcaggagtttgagaccagcctggctaacatggtgaaattctgtctctactaaaaatacaaaaattagccgggcatggtggcatgcgcctgtaatcccagctacttgggaggctgaggcaggagaatcgcttgaacctgggaggcagaggttccaatgagctgagatcacaccactgcactccagcctgggcgacagagggagactgcgtctcaaaaaaaaaaaaaaaaaaaaaaaaaaggaacaaaaggcgatttttactgatttcatgtgggtgtgtaggaggagaagaggaagtttggttgtgtgattgactgccctttcaagcccctgtggccaaaaggatcctgttgtcctcaaacatgagaaaccttacagaagacagaatgggagacactataattttgctttggggtactttaaatctgaggtgctatcaagtcacctaactggtccagaagtatgaactgtcyatacagaatcaggaacccaggtaggaggtacagatgattgctgcatttgattttttgcttacagagcattcacctatttattttaataaagaaattaccagtttttctagtgtgttcttttatgtggatggtttctgaggctgtggtgacaactgatttaagaagcctatttacaaaaccatcagttctattaaaagatacatgaggtcaaagttagtgtgattcaaggtcagtgatccccagatttgaccattaatcctatactaacggaagtgatggcagcttttacttcaaaaacactaagaataatgagataacactgtcctcgacatgttttaacaaagatagttgattatcttgtttcctgtaaaggatttccaccctctgagtttttccaataagtaaggggaacatgagacagataccatttgtagatttagctgtatattgacattttcagtcatgatccagaattggtcaattacatatgactgcagttcctggagaagtctaaatggaagggacaatctgtaaggaaatggagtctttcctgctttttcagggtaacatgattattttttaacatggatcacagctgcccagaatgcagtaaagattttttgtgagtctaatcttaggtttacaagctcagccttgtaccacagcatcagtgtcctcatgtatatatgcattccctaacaattagttgtttgtgcttcaatcttgttttgaaggtttttttttcccaccatgtgatgtctggcctcagcttgaagagtttaaaaattaagcatattttactcctgacctttacagaaattaaaatttttggttgtactgtgtaggtctcagtgctagaaatgcttgctaaaacagtttttttaaacctctatcagcatttgaagcagtttgagattgtagaaaattgtgcaacctttgttttattatttgactcttacagatagtgctaaacctcaagtatgaattctctttatatgagaccagaacactgtggaaatacaggattttagataggcctttacaatgcatatattttacataatttcaccctaaaaatgtaacatgtatttggcaaaggaagggcttttgttgctgtcattctccctcatgtgttcctcttgtgcctgactgactctgcagggggaactttagttctcaggaccttggtttgctcatggccttctgagattgatgctgcctttcctctttttgctcttgttgcaaggacagtgcaatcatattcttgccttccttcttctgttgcacaaatgactggcccccctcaccaggatcacttggagaaaaatctcttagtattctgagagggcctagactcccactgagtcctccaaaaggactgaagatagaggtttcctagagcktctggctcctctctttctttttagtgctggttctctctaatcttctttgtaaactcccattctctgaaagacaaatgcttttagggactctgcatggcatgtggattttactcacaaaaactgtgtcccagagctcccctacctatttttctaccatctcttcctgttcattcactgctgtatgtagccttggccatgttggcttacttcctgtcctgttattgggttcttctgtcttactcctaccttgcacatgctactcttcttctcagaatgccttccacacatactacccccaacccgccttatgtttgctcacgctaaccattgcaggctgaagtctttgctttcggggtcacttgggaaatcctttcttgctcacctctcttcccaggtaggtttagatgtctctactgtgtgctcccatagcatggcccacatccctttattacggcccttatgttggttacaatgacaggtctgagattaataaagtttttatttttttccttttttttcctgtcacccagtctggagtgcagtggtgcgatcttgtcttactgcaaccgcctcccagattcaagcgattctcctgcctcaccctcctgagtagctgggattacaggcacctgccactacgcccagctaatttttttgtatttttagtagagaaggggtttcaccatgttggccaggctggtcctgaactcctgatctcaggtgatgcgcccaccttggcctcccaaattgctgtgattacaggtgtgagccaccgtgtctagcctcataaggtattttcaatactgagcatagtgccaaccagtgagctggtgcttaataaggatttgaagtaagaatcaatggctcaaaagagagagaaagtatgaagtgtaatttctgtatctgcagtcagcattcacaggctcagtagtttgagaaacctgtatttcctgctttgactttttcactatttcttaagtgctactgttcttttagtctctaaatcaaaaccatttcacatcgagatatgatacatacatatgtgtatacgtatgtgtatatttgaaaccaaaagttttgaagtacaatatgtcctcttactacttataatgaatgctgatgtttttctattctatcctttttaattttacttttctcaatgctcttcatgacctattagattgattcacaacctccttaggtcacagtcagcactttgaaaactactgctctaaattactgtaccttttctatgaggaagagttgaactgttggtgtatcagtcagggtcaaccaaagaagcaccgccagtagaagataacattttaagagatttaccaccaggaattggtttatgcatatgttgagtctggctatgaaggtctgaaatctgtagggcaggcagtgaagatgggaggctggaagcctcaagcataagttgaagctgctgtcacaggcagaatttcttttatcgtcaggaaacttcagctctgctcttcaggcctttcaactgattcagtgaggcccacccagattatttaggataatttcccttacttaaagtcaactgattttgaactttaatcgcatctacagaataccttcaaagtgacacttggattgatgtttgattaaataactgggaattgtagcctagtcatgttgacatatggaaggatcaccatagctttgtgcagtggcagtatcacagcaaatgaggtttatcctaggcgtgattatagctaattgaagacttttcccaatatcccgctgtgaggacttacaatacagtcggcattaacattttttggcagtctttatggagactgaataaaaataaataaataaaaaataaatgtaaaaaaaaaaaagaccatcatagtactgtgaagagcctggtcatcatccttttttatgtaaggagtaggaatccattttagtttgcccaccactttatatcacattccttttttcctctgcactaatgttaaccttcttaagatcctcacccacttatttggcctcatccgtgttttggcattctcttccaccaccctgggtaaatgtatgtacggttcctgggagttttacagaggtccttgtgttgagagcccctttcactttagcccgcagttgtttctgatgacctccttgaatgaacagttaagttcctttcaaggctgtttcattctgtttccaggtaaaatttggggcttgaggtactcttcccaaggtactcaagacctcagagtttaatgtttgcttttcatgatastctttaccccactctcccttccattcagaggtccagtcacccctgggggattttcatgggagagtgtaaacttctgtactggagaagcttaaaagtctcactttccattttcacgctcaagagaagctctcaaaccctctttggtgtgcccggcatccccttatccccatttcccctctgtaatctcaccatgtgtgcacacacatacaccttgtattggtcctctccatctgttttcttatttagacaatttagactaattttcctccatgggcttttagaaacacagtgctggcagttgtagtaaaagaagcaggaaggaccaactgctgagacacatgctagaacaaaaattgatttactaacttaacttgctgcatctgtaaaagagtgtttacttcttggaatgaggagtaagttatttcatctaggagactgtccactgcccccaaatggttgccaattgggttaattagttaaatgtttctgtgatgaggacacctgtccagtggaaactggaccaaggccaccaatttatttcatgctggccaccagttgtcagttagcaaaacatacgtctccagtttaaaactctggctgaactgaaagagaacattgctaatttctcatggatagttcaattgtttacaataaattgaaaaatactgaggaaaacatgaacatcagtggaatttcccagttctctgttaaaaaactcgctaatttaggtttaattgtcttagaatttgtccaaattcaggatgagctaagtttacatttatgaaggatttttttccctgattactttaatggcataaactatttttacaggaagaacttatttttaaggcttttctaggcaatactataccttaaaatttattaaaaatcaatgaaaaataatgtatagtaaccagtaagtcataaatagaagatggaaaaaagaccaaccattgcttgaaagtattcagtctcactagaataaaaatgaaaattaaaataaaaaaatacttttcaagtattttaacaacacatatttgccaataaatggtaccaattatgattgaattctatgttgtcaaaagcaagagacttaatcttatttcattaatatttctatatgtgtgaccttaataaaactctgcttatcttgaaatattatttcactaaaaatcttcatatatatgaaaatttaacttttcatatatgtgttacatatatattttacttatatatgtgtgtgtatgcatgtgtgtgtatgtgtgtgcatgtatgtatatgtaaaactttccacaaagtcaactgtagctattttaaatttgaggagtcgtggtggctcatgcctgtaatcccagcactttcggaggccgaggtgggaggattgtttgaccccgggagtttgagaccagcctgggcaacatagcaagaccctgtctctattaaaaataataataaataatttaaaaatttagagagtttgcatcctctgtatttgaggtggttggtgctattgataatacaaaaatacatacttgattttatcatggacttttgtatatgtttgaatatgaatatgttggggatacaacaatttactccaaataatataagaagaatactatggagatatgaattgagaggacttagtaagcagcgtaagttgtgttttccagtatctttaccacatacttctgaagactattttgctcacgccttcttttgtccttagataagaactgattctgaaaactatccctctttgtattgcataagggaagaaacacatgagaggtaggtaatatggaagatatgatggatgccactataagcagccatgcctaggttaccacagccttgtgtgaggaaaagctgggaagaagatctatgaccaccttggatggaaggtggtattcagtccccttcctgaggcccctaggcttttggaactgggcttagagcagaagaacagaaaatagggccttgacttgagattaatgcttttgacacatccccaggttctttgtctgatttttttttttttttttttttttttgagacggagtctcgctctgtcgcccaggctggagtgcagtggcgggatctcggctcactgcaagctccgcctcccgggttcacgccattctcctgcctcagcctcccgagtagctgggactacaggcgcccgctaccacgcccggctaattttttgtatttttagtagagacggggtttcaccgtgttagccaggatggtctcgatctcctgacctcgtgatccgcccgcctcggcctcccaaagtgctgggattacaggcgtgagccaccgcgcccggcctctttgtctgatttattgtcattaatgttttcacttaaaatgaggtgaaacgttcttagttatattaatctcttggccccaaatcttgtgtttttaaaccaagacaggatctttgcaatccatagtaatagtgagcaagtgattcttttagatggtagcctggttaacataggctagtttatattgcattactaaatgatcctaatatcttctaacagatgtttacttctcactgatgttacatgtccatgttaggtcaaagggaagctccttgtattcagtatagtcactaaggtacttaaacttgtccatttccatcatacgtactttccagattccagaaatataagaagaaaaaaacactgaaaggtcttgcctccgcagtaaaatggctcagtcaagaagtgacacacaccaccactgcccagaacccattggcgagaattatttacatagccccaccccaaggcaacaaagggtaaagaaagaaaataccctttctacccagaaggagaactggaaatactgcttagcggcactaacatcttcataaatagactagtttacctttctttgggctagctcacatggattacagaagtgagcttactatttatatgaacaaatataaattgacctttactttctctttttttcccrtagttttgcaagaaaaaacttacttttatgatttttacatgtattaatctttacatttccttttcctcctttttgtacattaactgctgaattcagagtttgagtcattatgtggatttttggttgttaaggagagcatccrgcctgttaatgctctcaaatggggtatccctcagaaacctctccttgcaaaagtagcttatggatattatcttttacctgggtagaggggtttcagctgccttgctgacctatatttagtggagggcagtagactaagtgttttggtttggcatttataatgcctattagatgatttagatatgagaatgaaactagcagagtggtaaaattaactaaaagcttaactatctaaaaaacataataatatcttctagatagaaatatgggtcccagattatccattcctsaaatgctctataggattgtgtatttatgtggcaatattaaaaaacgtggaacagataacttgctataaataagccacaacttagaattcatgcttttagttaacttaccatcaaatgtaggtatgaatagttgaagacttgtcatcagagacacatagtgataagaattttgattaggtttcagagtcgcgattgaccctagaatccagcagcctcagtatcataatcgatcctaccttcttgcacataaaagcctgagctcagaaaggcccagtgagttggccaagcccacagcgtgtggcagcacaagttctcattgaccgctgccttacatgtgggccccatgcagtttcccctcaatattctttcctactgcagtcctagctaggttggctttttcttttctaagctaggagtttaagtatggaaataatgatattatccttatgaaatgctttaacttgtcaaaagtgtctctgtaacttgtaggtgttgtaaatctgcggtcttatttctacttacttgtaaggaagtcatattcctgactaccttgtcaaataccaaaaagttcagttttgcagccagagaatatcctgtttgaaagactttgtgatgactcattttatgggtcaacgttggtrggccacagtacccagatatgtgggtaaacattattctagagtctatgaagtatcttttagatgagatgaacatttaaagcagtgggctaaagcagattaccttccttaacgtggattggcctcatcaaattcattgaagaccttcatagaagaagactgacttccatcagagaagaggggattctgccagcagactgtctttggacttgaactgcaacattagttctttcctgggtctctggcctgcaggcctaccctgcagattttggatttgctagtccctactgtcatatgagacaattccttaaaatcaattttaatataaatatatatagtatgtataaaaaacacatataaagatattaattctatttttctggaaaaccttgacaaacgtaggcttccttgtgttgccgtttgaactagcatgctctctacctcccattatatagagtatgtttggttttttttcacttcttttttttttttttttttgagacagtctcgctctgttgcccaggctggagtctggagtgcagtggtgcgatcttggctcactgcaagctccgcctcctgggttcatgccattctcccgcctcagcctcctgagtagctgggactacaggcacctgccatcacgcccagctaatttttttgtatttttagtagagacggggtttcaccgtgttagccaggttggtctagatctcctgacctggtgatccgcctgcctcggcctcccaaagtgctgggattacaggcgtgagcccccacgcccagcccaacttcttgttctttagtaatccattaaaacactaggcttacaattagtgaaatgtactttttgtcctaatagactttgtcttatatatagcatgtgtattgtcctctgaacttctcgtgtaaaaatatgaaaaaccgtgggaactctctttacccttttctgccttactccctagattggttggtaaagagataatttgtgtaaagtgctatattgtctataatttaaagtactttggcatatataacataatatttatgggagtaactttgttttaggaccctttagttaattttctaggtatttcaatcatgaatccacacactaggattagtaagttattatttgaaagacactgattagaagcctgcacccagatattggtactttaaatctacacaagacaatgtattaacgttaagtatgctacaaataattggtgaaatgaatgatgttgaagatacaggggttagcyttagaaatattttatgtaactagactttgggtcaggcgaggcttgcagattaacagcttttggartaataacctaactagtactccatttgatcctgttttgtggtatgtaggattctggtgagtgatccacttagaaggttaaatgtatcctactgtagaatgtagttgcaactgctttaagtaaacctttcacacaggctacttttcaaaatgacttttaaggacagaaatctgggattttagagttttatgagataggcctatgagtctgttttttgcaccttccagttaagcaatgtttttacatgagcagaatttagtttgaaatttcttttcattgtaacatactccttatgttaaaagcttgcagaggagtagactaaagccctcagctgtttacatctttggagactaccagtgtttaccctaaattgtctgatgattataaactccagtttggcttacttcattttgcagcaagcacctaacatactcccgggcacacactggacaatcaatacactagataattctacctattgtcgatcagtgaactaaccttaatttgggggaagaaaaggaaagttgagattatacattgctctaaagctattagaatcctcctttgtgaggcttgccaggttggtttttggaatgttaatatgtggctatcttctccaggcttattgttagtttcaatttagagcttattttgcagagccactgaaatcatgtgaaggtgagtcagggttctgccaaggaagcttgtgatgagtgtaacctgtttgtggaagcatgtgaatgtttggcttatctccaggagcacactttgctagccatcatctgaaactcagcatgctaggacctggaacatttttcatctttgatgtgtcaggaagattttacagaacctggaccatagcctgaactgagaccgtgtggaagcattgtgggagattccttccagtcagtatttatagaatatgctgaatttatttagacctgcattgattaaagaaaatgtgtcataaagaagtgaaggaaataagtttttttcttattgttgaaaatgtattgctgctgttttgaaaaagtgttgtggttcaaactactgaaaatgtatataagataatgattctagttgaaatcttaaaataagctaatttttactttatttgcttttcatagccttgggttgttcgttcagaaatgtccttgctaaccgtgtttgtaaacttgttacccctgaaagcctgtctctgctgtgaagcagtggatgaggtcttgttttgtttcctttgatcgagaaaccagaatatcacttattggctctgaaacaagaagtcttaaatttaaacatcttttgtttacttttctcagtgaaataaaacaggaacaatgtgaaggtagcttgaactacaaaaatacatatatcttgttggtgttgaacattaggactcagaatgctgttggcctttagagttttttgtgttgctggaataccaggaggagtcatgctctgattattatctgattaattatccatttttttgtagagcaattaaggttaataaaaataatagaactattgtaagaaaatggaaagaatcaagatcatgtagatgaaagggcttcctggtcagagaaaacacagaaagcctggcaggccatgagccattgtgtaatgacagtgcattgctctagacataggtggggattttggcagcctaatctatgttctaatactaagtcagttatgcagatttttgcttaaagggcattaaacatcctagtgggtgatatattcaaaacatgtttatgaaagagagtatgaggctgggctcatgcctataatcccagtactttgggagaccaaggtggaaggatcgtttgaggccaagagatcaagaccagcctgtgcaatatggtgagaccccaatctctattaaaaatgtttttaaatttaatttaaaaaaagagagtatgatatgggtagtaggtatcaggggaaatattatccctcatattaccctgagaaagcttttcctctcccctcattgaaccaagcataattacatggactatttcattttattttcctaatactcttatggggataggcattattataaaaaccattttgtaaataaggagactgcgccttagcatggttttacaacttggcaagtgctacatagctagggaatttagggggctttaaattaggttaaaattgggaccataccaattggggatcgtatgaattgggaatatctttctctttatctgcagcatgctcttcagcttaacgatgtatgtatcttggggtcttccatgtcagtagagagatatacatctcttcaatcactgcattgaattacatatttgtatatatcatgatttagcaagccattttctctactggtggacaattaggcaatttcctgctttgggctattacagatagtgctgtaatgaacttcttttgaaatacatctttgtacacatttgcaagtatttctgtaaacacttaaatgtgacatgattatgtaaaagacatttacatttaaaatattgataactactttctagttatgctttcctcttcaaaagtatcctttttttctatatcctcacaaacactggatgttgtagtcttttttttgtttgtttttttgagtcttattatgtcacccaggcttgagtgcaatggcatgattttagctcactgcaacctctgcctcccaggttcaagcaattctgccacagcctcccgaggtgcacrccaccacgcccagttaattgttgtatttttagtagagatggggtttcgccatgttggccagactggtttcaagcccctgacctcaagtgatcggccctcctagatctcacaaaatgctgggattacaggcatgagccactgtgtcctgcctggatgtggtagtctttaaaaaaaatctattcttatggatgaatgcatagtatctccttgttttaatttgcatttgcttaatttttaataaagctgaacatctttatatcattaattggacattagtatttcttctttgttcaattctcaatttcctttacctacttatacatgcaattgtttgagttgataaagccctttatatattaggaatattcatgtttcatcttaatatttggtcatactttctgctaatctgtgacttttcttctaacttcattatggtatattttattgcctagaagtttttgggctttatttttaatcaaattatttatttcctttagaacttctaggatctgtgaatttctttctaacctgttagctaaacattgtcccaaattttcttttggcactttttatatatgtatatatttttgttctgaattgtatttttctttgtgatataaataggaatgtttttcagataggtatctaattcttttcataatttattaaatagaccactctaatttgaatagaaaaggagtggaacagaatagaatataaaaatgratctatcccagagctcaaactatattgccttaataagcgaagttttattatgtgttttgatatccactagggcctgattctacccttattctttttcaaactgcttgttagttttcacgaaaaatgtaggtaggattttattttttattgtcttgaattcataaattaacttagggtaaactgatatttacagttatttagaaatgtggatgtctttataatattaaggattttaatccagggaaataatatggcattgcactttcttcagggctttttgtactcatcacttagttttatagagagaaaaatgcttgtacatttatggttggtaattactaagtgttttattgttttgatcattttgttgtattttctaagtttttgtatataggtattgagttttaaaagttacatcgctttactgaactcttattagttctaatactttttctgttaaagctcttggattttccaagtaatcagttgtttaatctgcaaataacgacttctggcttttctttttcaataatttgcagtgttttctgcatgcctacttaatttacaagcctataagtaagctgaagatgaagagtgtattacattattttctttttctttttcttttcttttctttttcgtttcttttcttttttttttttttttttttttttttgagacagtctcgctctgtcacccaggctggagtgcagtggcgcgggagctcactgcaatctccgcctcctgggttcatgccattctcctgcttcagcctccctagtagctgggactacaggtgcctgccaccacacccggctaattttttgtatttttagtggagatggggtttcaccgtgttagcgaggacagtctggatctcctgacctcatgatctgcccacctcggcctcccaaaatgctgagattaaagaatgaaatggtggcatagtcatctgattgctagatgtctcaaaaattatacacagtatcattttccaatatgcagtcttactgttttaggtttgttttatttaatttcagaatactctcaaatgaactttataaactagcccgaatagggaagaacattctgatatcagagtgtttgggatcctgaaaaaaaaaatgttgggaaggagttatttatttgaaacagttatttcatacttactttatatatagacacacgcatacatatttatttacttactagtattagtgaaattgagtgatgttccagaatgaatactgtttaaaccattgttttgcagtcataaaccgggacctattagcagaagtagagaagtggtaaatattaatgaataatttccagtcatatctgccagtgatttccgggacgcatgagacccaggcccagctaactgttattttgtgtgtaaagcttgcttctataggcattttccattgcagtacactcaactatcaatgttttccaaaaaactatagatatgtgtatgtgtgtgtatatatattttggtctagggtcttatatttgaaatatatattccttctcttctgcagtcaaatatgtgaatttctgtttattcttcaagactcaggtcaaatatctttgccttcacaacttctttaccttctcaggaaaataaaaacaaaatagttggtatatgctgcttttatatcagttaccacattattttgtaggtgcttattttgatttctgtgtccttcctaaactgtaagctactagaaactattccttctccagtgcctagcacaatgtcaaacatgagtttagaactgtaaaatattgttgaatgaataaatgtgaataagtgattactaaaaatataagaggaagtgaaggatcaaaagagctgtctaagagaaagttgtaagtatgacaatgtaagaagaatattaggccaggcatagtagcttaagctggtaatcccagcactttgggaggccaagatgggaggattgcttgagcctgggaattcaagaccagcatgggcaatatagtgagacctcgcctctaaaaaaaaattttttttaattagctgagtgtgatggcatgtgcctgtaatcctagctactcaggaggctacagtgggagaattacttgagctcagaaagcagaagctacagtgagcctactactgcactccagcttggagtgcagagcaagaccctatctcaatgaaaaaaaaaagaagaagaaaagaaaaagaaaaatattagcatgggaaacatgctaatatttatgaatattatgaaaagataaataaaagcactaaccctatactatggaaatgtgcattttgatgcagtaaggtttactatggtgaagaaacatggtagagaccaaatagggatccaagtggcatgaggctatgaaaacatgttgaaagtcaagaagaaaacagtacccactcaggtacaaatcctacaaatgatactatttaagaagcatgtaccattaggagctacattatatctgcttctatatatgcgtatgtatttttggtttataggttaccatatatagaatataggaattacttgttttccaataatacaaatgtaaagtgtccatagaacagcagggccagctttgtaggaaatagacatgatttctttagtctttggccttcttttctgccttctgtttctactgcatctttttataaatattattttaaaatctaatcctagattttatgatttttgggggagcacagtttctttaggcacagtttagatgcataataattattgaattttattgaaaatgccagtgtctgttatgtatattaattggacttgatgaattatacatttatttctttcatatattttttcctgtattaagagagggattggacaactacttcagttccttttaagataaacatttcagcagaaataaggacaatcaagtttcttatggctatatctgaaggccacatttagttgtcttttaaatgatgtaggtaagaaataaacagcttcaatatcctgtttgctgtacagccctttagcgatattttcataataatttcataaaagtttcaatgagaattcaatttaaatgtatatgcaagtaaaatgagggatgacaaacaagagcccaggacagtgttagaatggaggtcaggttcagtgatcttatgattgagacagcattataatactgacaccctgctacttcagggctagtataggtcataccatgaaacaggttcagtgtaggtatttgcttaggtagcttcaagatggtttaccttagttttattgggaaacagcagagcgttccagctaatatgattcattctgattctataaaaggcgataaatattgctattcacataatgtgttctgaggctactttgtctcttaaatgattaaaagtggtactatcgcttacacattttaaaaattagtaagttacttttatactgactcaattttccttttcttaacatctcaattgattttaaagacaaaacagttgtttagaagaaattcatcacatgaatgtttaaacttacatagttttggatacctggcaggtttttttttttttctgtattatcatcttgttggcctcttactacaggttttcaacacatactccaatgaagactatgacaggagaaatgacgaagttgaccctgtggctgcttcagctgagtatgaacttgaaaaacgtgtagaaaagctggaacttttcccagtggagctagagaaaggttcgtgagtgctacagtgttaatatcattatgttgctatgttaataatacagrattatttttccaaaatgtagccttttttctaaggattggataaaattttaattctaacagaggatcttatttattaagtttcaaaaatagttgatatggattctgagtagatggtggattgaaagttttactcccaactgaaacccatctatcttagctggctgcgatggtggttaggatcagggaggtataagtgaggcctaatgctttgttggtattcctggaaagggctgctacagctgagagcccagaaagagctggtatatgagagcttggggcagatggtcgctttcttttgttttggtggataattggaaaattatggagatttttaataaaggcggtagaatccaaggaaatttaaatagtagggctacatcctctccccctctgaggggagaaggttgaaagagagcagggagaagagggagcagaaaggcttccttctgatttctctcccaggaatgacaccctgcctactgtagtaactgctgacccgtgggatcagagattaccaggtaagatgtaagatgggcacccaagaactgaactgtcactcagtgaacagagaaataacacctctgagagagctttgaaaaaaaaaagagtagaacaaacagatgatgacttgaataacaagaaaaaaagaaacaaaaacctacccaaggatactcaagcatggcttaaaaaaagacatttgcaaattatgcctctaacaaaggactaatattcagaatctatgtggaactcaaatactcaacaacaacaacaacaaaaagaaagaaacccattaataagtgggcaaaggacacgaacaggtatttcttaaaagaagacttacaagcagtcaacaaacatgaaaaaacactccacatcactaatcatcagagaaatggaaatcaaaaccacaatgagacaccatctcacaccagtcagaacagctattattaataagtcaaaaacagcagatgttagcaaggatgcagagaaaagaaaatggttagatactgttgggggaaatgtaaatcagtacaatctctggaaaacagtgtggagatttctcaaataattgaacatagaactatcatttgaccaagcactcccactactgaatatctccccaaaggaaaagaaatggtatcaaaaagagacttgtgcttgtatgtttaacagaatactatycaatggaaatagtcttggaaatagcaaagtcatggaatcaacctaagtattcatcaatagatgactggataaagaaaatggggcatgtatacactatggactactgtgcagctataagaaagaatgaaatcatgtcttttgcagcaacatggttggagctggaggccattatccctacatgaaataactcagaaacacagagttatttgctgcatgttctcacttataagtgagagctaaacagtgggtacacatcaacatacagagcagagtaatagacactggggactccaaaagtttacgagggtgggagggggatggggcttgacaaataaccacttgcgcacaatgcgaactattcaggtaaaggttacactaaaagcccagactcaccactatgtaatatatccatatagcacacctgcacatgtactcccctgaatttatacagatttaaaaaaagacgttcttgagcaacttagcaacaagaacaaatttcttgattttgaaatgaaaaatttcaccggaagaattgaaaaggatagttattgttgagacttaagttggcgatctagaagatgacgtttgagagatattccaaaaagaattctcaaatgacagagcaaaaatccaagaaaaatcatgaaagagtcccaatatataagttgtaggcaacagaagagaaaaacgacaatggagaaggacagactaataataatcatagaagaaaaatttcttgtccttaaaaagaagatctgaggcttatattaggaagaacttatccatttatgagtgagagggctaaataaccccaaactgatcccacacttaggcatagcctgggaaaaaatcctaatattcaaagataaagtgaaagagcttaaaaaattccaggccaaaaaatacccaaccaaacaaacaagcaaatatacttgcaaaggcaaaataattagactagcatcagactgtaacactagaagcagggagatgtagaaataattttacatgccactgagggtaaaaaggatggtgatccaagaatcccatatccatcccagaaagcatttacctatcctggtgaaagaaagacatctgctgctatctaaggatttaaagaacacattgcctacatactttatctgagtaattcactgtccaatttagcagggagggagtgaaacaaagagcagcttgttcaaaacagcaagggcaaggaaaaaagaggtgaaaactatgaagtattaaacatacaattgcttaaatgaaaaagtatgaagaatactagtcatattacaccaaacatgactgatggattactcctgttaaaagacactttcatttggagttaaagtgaattaaagagtaatgcttacatttttcatacattttaaaacataaaagccattcttagttcattggccatacaaacacagctgggccatcatattacttattttggtagtagcaaaaaaacaagaccaatccaaatattcatcaatggtagaaagggtctataaattgtagcatatctaggcaataaaatattactcagcagcgaaaatggaggtgccacacttcatgcagcagtatgtatgattcttaacatgatatcgagggaaagtaaaaatagcaaaccacagaagaaaccatttagtgtaatataattgcatttacttacatttcaaaccaaaaaaattaaatagcatattgttttgggatacacaaatgagtagtttttaaaaagtagtattaaaaagtagggaatgattaacacaatgtttagtataatggtcactgaggaaagagttgctgtgtcagggagggatatatagtggcttttgtgatgtcggtaatattctgtgtctttgtacatggatgtttgttttatttttatgctttaaacataatgttttgtagataaatattaaactcatttgtatgttgccatatttcatactaaaaattaaactagaaggtaaccaaatcaaatacaattattggagatttcaatatatttctttcagaactggacagatttatggacagaaaacaaaaatcaaggagtgggttaatataatgaactctatttcaagctgtattttaaaagaaaaagttttatcctttggaaaaatgttaaaggttcctttaatatgagaatttggaaattacataatacattcctaggtagatgtttgattgaagagaaaattataactcatatcccaaaccatcgtggaaaggattaaacttaaaaagtccgtctcaaaaaaaaaaaaaaaaagtctgtagcacacagcaaaacctttactcagaggaaaagctatatccttgatttctttctttaaaataaaaaacttgaaaagcaaaaaatggacctgtcttagaaatcaggaaaagtaaaccaaataaatcaaacaaactagcaaggaagagtagtatatgtaaaaacactattaataacatagaaaagaaaatctagtaaaataaggtaatacaaatccttttcattgaatacatctataaaatatatcaatcataatactgagtggagaaaattgaaagtaaacttatgcaaattaggaatggaagaaaaatatatagtgttactataaaagatcagtcagtcactgcatttctttgtcaaatgaggtgaatgcccagaaataatttatgtcctaacaaaatttgaattaccagaatcaactttagtaaaatagactaattgctatagaagaaactagaatgataactacagataaaacattaaaatgtcatcacaaccagatgattctattgtacctttaaagaatgcataaagccagtgttaaactattttagatcatagataataaaggaaaactcttcatttcattgaaataccatataagtttatacccaaaactaatatgctacaaaaaagattgctataatacaactacaattgtgaatatatattttaaaatgctaaatgaaataaaatatcaaatatagaaatagttgaagagaaaaggccaggtgcggtggctcatgtctataatcccagcactttgggaggctgagatgggcggatcacgaaatcaggaggctgagaccatcctggctaacacatgaaacctcatctctactaaaaataaaaaaaattagcccggcgtggtggcacgtgcctgtagtcccagctactcaggaggctgaggcagaagaattgcttgaacctgggaggtggaggttgcagtgagccgagaccacaccactgcactccagcctgggtgacagaacaagactctgtctcaaaaaaaaaaaaaaaaagaaagaaagactcattaggatcaaatggagttttagatacaaggatatagagtggttcattattcaaagattcatccacatacaatttaaaggaaaagcccttaaattttttaaatttcatgtcaaattgktatgaaaagatgtcaatttggtaacatttaccactttaaagaaagactgtaaattaacacatgatggaagctgcctaaatttatgcaaactataaatttacaatacctacagagaattctaattctaaattgagtaaacactaaagatattttaattaaaaccagaaatcaaatttgtaatgccctttaaatgaaatgaccagtataaataacagcaaataaaagatgaaaagcatcatcttttgctgatatattcatatccatatctatctagaaaaccaaattgattcaatattagatttggtaaaataatttgtggaggaagaggttacattcaagatatgtataaaaatcaattttttctatgtaatcacattaagaatttagaaatgaaaatgggaaaaatattttatttacagtagcaccaaaacaacaaaatatttattactaagaaaaacatgaaatttatctagataaaataataacatctttttgaaagtcatttctatttgaaagcaaattgaaagacaaaccatattcttggacaagaaggctccaaatagaactgccaacaaagttgggttgggagaggagaattgcaaaaaacagtattaaatttttttggtaaaatttaagtctggagaaatacagacttaagtatgaaaaggaatatgaatgacttaattttccaaatatctaaatataatgtaaagcttttgtaatcagaacaaattgtattcaaatggcaattgatcagtggaacaaaatagaaaatccagaaaaagatgttagtatgtgtgagaatttaatatatgacacacatgatatttcagcttagaagtaattatgtgctttataaattgttctggcataactgagaatctatctagaagaatctaaagttggataccttcattacagcataggtaaaaataaataactctacatgggttaaataataacatattaaagatgttgtaaagaaaatttaaatgactgcatatatcatctaggcttgtggcaggagagtcttaaccaaaatgggaaaccagaagttagaaaataagctttgggctccatagtatgacaatagtgtcttccataataacatagtccctctgtctttgccgtcattttatggctgttttgccttrgtgctttgcctgtccctaggaatgtatggagaggaagacagggtgcagctgggttctcgatgggtcagccacaggaataataagtggcctttaaggatgaggttccagacttcactcagagaaagctgtatgtaaataagatgctggagaacatcagtcttctggtctctgtgcgttgattgtgctctttcttgtattgcccttcagtcatcatgttgtccttgtaagtaatttgcattagaattgaggatggcttgagttaatattgctttttctgcaactggattttcagctctgcaaatctgagtaattttccagttaaaagcaatgagaggagcaatggaaggaagaaagagaattctaccaagacctgwgtctaggcagagaaaatggatttagaaaccaagaagtaattttcactcaagatagttgcaggaagaaattatttaatggtgtgacagtatggagatttcacatttgagaggagccttttgtacggtaatgagtatgggaaagtttgactcacagctctacattggcttgacatgtgataagttatactgaagagaaaccctgtgagtataatgaaagtgagcaagaattcagccagaatactaatacatatatacaccagagatttcatacaggagagaaattctatggtatttttctgcatggaagaggctacattgatcatctcttaaacaacacaagagcaatacactaaggggaaaaacttacatggatgtaaacactatgggaaggctttcagcaatcattcatccttcatcagtgtgaaaaaaaattcattttcttgagaaaccctatgaatgtgacgaatgtcaataagaattcagctatccgctaaccttatacacacaagagaattcatggtgggagagagaaaaaccctatgcatgtaaccagtgtgggagagccttcagcacacatctaaccttcatgtacacaacaaatctctgtgtacgaagattttaaagtttctgtggcgaaactttaaaactataatgaatgtagaaaatctttaacaagataaatcctcttgatgaaatcagtctttataccagagaaacaatttgaataaataggagaaatcacatgtatataaacttaataaatgtaatgaatgaggaaagtcttcagagattatttatgttagtcagcattaaagttttcacactaaagagacacctatgcttagaatcaatgtggaagtgccttcagctggggtttgcatcaggcagctcatccaggggaaacactgtaaagattcctctagcataccactgagcaaacaaatcacacttttgccaagtgacatcttttaaaacatatgtagaataaagatataagattgtcaggtgtacttggaaatacttcaggcataagttggttataagtagtaatgtatgagataaaccttcatccgaagaatactaattacaagaatcctggccaggcctggtgactcatatccataataccagcactttgggaggctgaggcaggagattgcttgagcccaggaggttgagaccagcctgggcaacatggtgaaaccctgtctgtacaaaaaaaaaaaaaaaaacacaaaaaattacccagatgtggtggcacatggctatagttccagcacctcggaggctgaggtgggaggatcaccagaacccaggaggttgaggctgcagtgagccatgatggcgccactgcactccagcctgatcaacagagtgagaccttgtctcaaacaaaaaaaaaaaaagaagaagaagaaagaaaaacagaaaaaatgcttaagaaagtgaaggttattgctgaaaagtcttttaaaagtgtcattctgttgagtatatggaccaatatttctttaataatccatcactgttgattagttagtatttttatgctgctagtaaagcatgattacaaagactttgaggctatcagaaaataaccttgaactttaactaaaacatgtggcacgcaaaatagtgtatcttttatatattcacagaaaggacaaatggaaatatggataaacgtgatttgtaagtgaattaaaaaaaaaagtcacacagtattgttcataggaccagtaaaatggaaataaaaatgtgaatacagaatggttggatacattatgataccatctcaccatgaaatattattcagtcattagaaataatttagagatatggacattgaggacattgatatccatgacttatcttttttttagacagggtctcgcagtgttgcccatggtggagcactgtggcatgatctcagctcactgcaacatctgcctcccagactcaggtgatcctcccacgtcagcccccaaacagctgggactacaggtgtgccccaccatgcccagctaatttttctatttgtagtagagacagggtttcaccctgttgcccaggcttgtcttgaactcctgggctcaagggattctcccacctcagcctcccaaagtgatgggattacagacgtgagccactgtgcccaggcgcttcattggtttttaaaaagtaagcagtaaagagaagtaggtataatctcatttgtgtaagcaaataagaaggaaaaacaagctatatatacatatatatacattcatatatgtctaagtatatgtatatattatagttgttgatgagtatatattcttgggtatagaagcacagaggaaagtactcaaatatactatctttttttttttttttttttgagatggagtctcgctttgtcacccagggtggagtgcaatggcacaatcttggctcactgcaacctccgcctcctgggttcaaacgattctcctgcctcaacctcccaagtagctgggactacaagtgcctgcccccacacccggctaactttttgtatttttagtagagacaggctttcaccatgttgccaggctggtcttgaactcctggcctcaagccatccacctgcctcagcctcccaaagttctgggattgctagcatgagccaccatgcccagccacatgtactatcttattaacatgaataaacaagtaaagaagaaaagaccatataaatgaaggaggaattccagatatgttatgatcagatttatttaaaattatatgtttgaatatgtgtactcttacgcctaaaataattcattgcattatttagagaatctaggttttaaggcagagtgactattcaataatcaarttgttaccttttcttgagaccacagtgaattaccaacagtagtagtaaaatgatgctaaatgcatgagccttttggaggatctcattagatacccttactgcgtagcttagaaaagaattctgctaaagcaagcatgttattgtcctatccataaggaaaaataaaattagaaacagcaagtaggtctcaccagctaattgcagactagtgtaaaacttaagttgtttcacctcccccctttttttctttttaatagatgaggatggtcttggtataagtattattggaatgggtgttggagcagatgctggacttgaaaagctgggaatattcgtcaagacagtaacagaaggtggtgctgctcaacgggatggcaggtaaattaaggactgttgttaataacttaaaatctttagagaactttcctggaagtttccttcagttgtagctttttgcttttgtttgttgattttttaggatagaatttcaggtttctcagatgtgaaaatctttaaacacttgaattattttctgatatgcaggcaaaatatctgctttctttaatatatattaggtaaatgagtgggcagatctatcagtctatacctgtctttatccattcatctatctggtgggaagtgggcagaaacatgggtgtatatagttgtaaatgtgtgctatggaggtcagcacatagtttcacttcagaaatattgaaagaaatgataatagttctggcatcttaaaaaatgacacatgtagatggtaagttaggaactctaattctgtattgatggtaattctgaaggtcagtgtttctccaaatatatttatgtaaaaacacaggttcttgggtgcacctaaacctgtagaattaaaatctccagtagaggggtctggcagtctgcaccttggataattctagtacacagcagagcatccagattatcactgttttgtcttagctttcataatctcaagctatttgtctgtctgtctrtctatctatctatctatctatctatctatctatctatctatctatctatcttaggcgaagattttgattaaccctcatacttggctctgatatatcaggttgaggctagaagcagaaggtggtgtcttagtttgttttgtgctgctatggcagaatacctgagactgggtaatttataatgaacataaatttatatggctcatggttctggaggctgggaagtccaagattaaggggccacatctgatgaggaccctccagctgagtcatcccgtggcaaaaggtgcaaaggccaagtgagagagagcaagaaggggcaaaacttgcttttataacaaacccactctcaaagaaataaatccacttccatgataatgacattgatctatttgtgaggccagtgccctatgacctaatcaccttttaaaggtctaacctctcaacactgttgcgttaaggatcgttttcaacatataacattcaaaccatagcagttggcaatataataaaagtagacccaaatatacgactgctaaattcaaagrrttattatgttgttttatgtacatttaatgaatagctttaaatttttttatgtttaagtatgtatcatttgaccatcttatcaagaaataataaagcatgttggaaagaatttgtgaatctgtgaggagacccagagcaccattttttttttttttttttgagatggcatctcattgtgttgcctaagctggagtacagtggcatgatctctgctcactgcagcctctgcttcccaggttcaagtgattctcctgcctcagccttctgagtagctgggaccacaggtgtggaccaccacgcccagctaatttttgtatttttagtagagacggggtttcaccatgttggtcagaatggcctcgaactcctgacctcaagtgacccacctgccttggcctcccaaagtgctaggattacgggtgtgagccaccttgcctggcccattgtttctgttttaatcctaaaaatgcatactgatacccacagatagttctcaaagagagctaaattgatttatgtaaatacaaaaccacaccttatatcttcttttccatgaggttagggataacatcttagttggtagccttgtttgtattcatatagcacttagcataatgctttgcatagagaaggtttgaaataaatcttttgagtgaacattcagctgtctacatttaaaacaaagaatgtggaatatgactatcttgtgtccyaaattaacttattaacagtcttcctccttttcagagtagttaaggaaataacctctttgcccctttaataaattatatataatgatagtagtatttccagttattaatttaccacctttcttccaagagagctaaaacttgtttgtaaaatatacctcatttcttattaagtttgatgaaaattttaagatcatgggaaataatgctacagttagtattcaaacatgcttaattgttatgaaccatccagaaagccaaaccaaagtacaacttgattaaaagaagaaaaagtcagaatattttgcattaatagccatgtaacagatgtcctgaaaaaaaaaagaaagaaaaataaaattttgcatttagtagttaaccagttcctgttgttctaaacatagacatatttatttttccttcaatcattttaaaattaggtttgctttctattaacctatttactaattatttattcttctacatagtttcattatttataactacattagaactctgctttaccagtcccagtgtacatttatttcctcagtccttttaaatgagtattttcctagtatactaatcctgttgttgttataataggtgcttaataaatgcctcagtgaatatattaagacatgtaacttgggccaggcgaggtggcttatgcctgtaatcccagcactttgggaggctgaggcaggtggatcacctgaggtccggagttcgagaccagcctggccaacatggtgaaaccccatctctactaaaaatacaaaaattagctgggcgtggtagtgggcgcctctaatcccagctacctgggagactgaggcgggagaatcgcttgaacctgggaggtagaggtggcagtgagccaagattgtgccattgagctccagcctgggggacagaatgagactcagtctcaaaaacaaaaaacaaaaaaaaacttcatgtgatgtaatggatagaatctttaagaaaatgtaactaggagccttcattccattccctctacttatcatctggggatattcaacaaattacttaattttcatgttatctacatcgcaggttgtggtaagcattaactaagtttgtgtgaataaccttccatagtgctattcatatatatgaaactgttcttgaaccaagtaagagtaagcttgaaacttaataaaaaaaatagttattatgggagaagcctcatggaaaactattaaaggtgtacaacataagtacagaatcaaaattttagaggtcagagaaactttagagtttttataatcaatacattttcttgtctattaataagaaaattgagggtggttgtatatgtgcatatgtgtgtgggtgtcagaaaatgacaaaataaaattattattacacttacaacagatttatatcttttaaattattatttccaccactactggtgtgttcatttgcacagtgtttactgtttactgatgtttactatttaaaaggtatcaacatacaaaagtgcagttcctctagtcaataatacattttaagttatgtacacttactgatatagaaaaatattccattaaggatttacaaaatagtgtgattaatatgatgcccttcttgtgtagggtatatattctatttcttcttttctctctctttgttcctttttgtccttatctctcagtcattctctttcttaaaaaacctaaaattaatatatacaaaagtgttgaatggctctagtgtatgggttttttaaaattttggctgatatagaatatctaattttgtagagaatatataccacttgtgtatagtttctgaattaaaactaaaaatgataagattttcaccccgaggaaattacttgtcagacctcctttattgacagaattaaagttctgggttagatgttctctaaggtagttccttttagccttgaaaggataagattctgtattattgttttctagctttctagcttgctttagattcttaataactctttctatttaagaaaatttatttcaatttaaactcagatttagtcatacctccttcaaggaatgttaaatgagcagacatgtatacatagaaagttttttttctccccctcctccctccttcctgcccccacaagaagccttttcattgtgatcgtttgtattcctgtttaaatggcttgtaaactctcaccacattttgagtagtttaaaaaatttgccgtgggtatttatcctcctgagtttatccagtatagttaaatagttaaaaagttttgacccttccttattctttgatattatctcttacattcaaaattttcttttgtcaagcttttcatgtgtgtactttatcctatgatgccttaaacttacagggtgctcaataaatatttgttgaatgagtgaatccttgtgctttagtcactttttattttttatttttagaggcgaggtctcactgtgttgcccaggctgacctcaaactcttgggctcaagtgaactccccacctcagcctcccaagtaactgggagtataagcgagtgccacagtgcggggcttttagtcacttttgaaacctttacttgggcttatcatttttctctgttttggttttgtgctaccttccttttacagagtagcttttaatttagttgaatgatatgatagccatttctatttcctgtttctaaatttttagtaaaataatattaaatacattgactattagtttttgttgtcataaatgtaatttttgggattgcacagaggacactttcacacactaatgattttccagtcctcattcatgattccataaagcaaaattagtttcataaaaacaattcaaaatgctgaattgtagagtaaatcacatggatggtaactgacaaaggatgttaataatgctgtgctaaattagaggcaaattaaaagtccattttggacacacgttgtttttgggtcctgtttttgtttcacaagcttttgctcatcatcattttcaatcactgtccttttcaattttattggaagagataccacatatgaaattaaggttctatgtagtttatcctcattcaagtttggtttttaaatgattttaattgttttttttcacatcttttgggtaataccaacatatacaatagattaaagagtcctattcttttgcttatcctgcagcaaattcaccccctcttaggacccatctttgcctgaagtacccttcagcctaagagaaccctggatggaaacttgttttaattgaatctgtcatggtcccctattcgatggtttcctctctgtgcacacactctcatgttagtcttctaataaaatattttgcctattcaccccttagatttgggctattactgctttgatatgtattttcacaattttcacatacatttaaaacttcagtatctagcattttgaggaagatctctgttgacctaagtacattaatgttgctccagctggtctccctgtcattcttctttggtggctttgttgacaaaagccccgtgaggtagggttattttttttcccttcccagaaacactgtgtcaataagtaactatccagtaacattaaacaaaccctagaaaaatccaatttatgtattttcattacccttatccctattgattctggttttcagattaagaattgcaggatctcagcaatatcacagtgagactgaagagcagtagtgttgtgcacttttgtttatggtaagcacatggaaactattgaggaactggccaggatgagatagtttttacaaactagccaggtatgttcccataaattccattccagtcgacagtatttccaggggaaacaggctatttcctctgctatcctggaaaactttggaaagtttagataatccatagaactggttattctttgtagtctgggatggtctgatacagaactctgtctaggtattcttttgtttttaaccactgagagtcttcccttgtcttttctgtgcttttcattacagctaagatttaagagagattatcagtgttactgttctgtgaggttgcatctaaaagttgtcttctcatgagataaaagatacaagcaaagtgggtgttagacaccagaaaatttttcccgtcacagtaaccatttttgtatttaatactctgctggctcatgttctagggagttgtaggagcaatctatagtgggaataaacctgaaccactgcctttttcatccattattcccctcatctctcacccaaccctctttacctctctttcctcttctcctcatttttagtttcttgaacttatctccaccttaatcatcacagtttacctccataaaaaggtaaattgaaaagcccgttatatagcaaactccatagaactccacttctcttcctccctccctctctcactctttttaaaaacgttaaagatggtttttatttcctcatttttttaattatcagattttcaaattttttctttaatgaatgtatcactttgaaatgagaaaaaaatttaaatggacacccttttgatgaaaatgataatcaaatagcatgaagctttctttgtcccccttaatgttttcagtattaaggtagacaggaagaactatgtagaatcagtattttagtcataggattcctctttttcacattgatctctgatctctgaatgcaaagagcaaatccagccgaaagtctatcgttactgtttctgttgcatggaatactttgcatcttgtatctcttctgtcttctttttttctttcttttttttttttaaacttttattttagattcaggaggtatatgtgcacttttgttaactgggtatattgtgtcatgctaaggtgtggggtatgaatgatctcatcacccaggtactgatcatagtacccaatagttaatttttcaacccttgtctccctctcttgctctcccctctattagttcccagtttcgcttgttgccatctttatgtccatgattacccaggatttagctcccacttataagtgagaatatgcagtatttggttttctgttactgcattagtttgcttaggatgatggcctccagtttcatccttgttgctgtgaaggacatgatttcattcttttttataggtgtatagtattctatggtgcatatgtgccacatttttctctgtctagtccactgttagtggacacctaggttggttctgtgtctttgctgtcattaatagatttgcagtgaacatgtaagtgcatgtgtctttctggtaaaatgatttgttttcttttggatatctacccagtaatgggattgctggattgaatggtacttctgtgttctttgagaaatctttaaactgcctgccacagtgactgaactaatttgtatgcccaccaacagcgtgtaagcattcccttttctccacagcctcaccagcatctgttgttttgactttttaataatagccatactgattggtgtgaaataatatctcattgaggttttgatttgcatttccctggtgattagtgatatggagcattttttaatatgtttgttggctgcttgtatgccctctattgagaagtgctgtttatgtcttttgcccatttttaaattgggttatttgtttttcacttgttcagttgtttaagttctttgtagattctgggtattcgacttttgtcagatgcatagtttgcaaatattttctcccattctgtagcttgtctgtttactctgttgataatttattttgctgtgcagaatctctttagtttaattaggtcccactcatcaatttttcttttcttttctgttttgttttctgttcgtttgtttgtttgtttgtttgttttgagatggagtttcgcttttgttgcccaggctagagtgcaatggtgcgatcttggctcactgcaacctctgcctcctgggttcaagcgattctcctgcctcagccttctgagtagctggaattacaggcacgtgccaccacgcctggctaatttttgtatttttagtagagacagggtttctaccatgttggtcagactggtctcaaactcctgacctcaggtgatccacccgcctcggcctcccaaagtgctgggcttacaggcatgagccatcatgcccggccttttgttgcaatttcttttgaagacttagtcataaattctctcccaaggccaatgtcctgaatggtgtttcctaggttttcgtctatgattcttatagtttgaggtcttacgtttaaatctttaatccatctggagttaaatttttatatacagtgaaagctaggggtccagttgcattcttctgagcatgactagttagctatcctagcactatttattgcatagggagtcctttctccattgcttatttttgtcaattttgtcaaagattagatgtctgtaggtgatagagtttggctgtgtccccacccaaatctcatcttgaattgtaagtcccacagttcccacatgttgtgggaggaacctggtgggaggtgattgaattttgggggtggaggcattcctacattattcttgtgatagtgaatgaacctcatgagatctgatgattttaaaaaggagagattctctgcacaagctcttctcttgtctgccgccatgtgagatgtgtcattcaccttctgccatgaacgtgaggcctccccacccacatggaactataagtccaataaacctttttcctgtataaattacccagtctcaggtaggtgtttatcagcagtttgaaaacagactaataccccacagaaaaagtggggtattgctgaaaagacacctgaaaatgtggaagcgactttggaactggacaacaggcagaggttggaacagtttggagggctcagaagaagacaggaaaatgtgggaaaatttggaacttcctagagacttgttgaatggctttgaccaaaatgctgatagtgatatgaacaataaggtccaggctgaggtgtcctcagatggagaagaggaacttgttgggaactggagcaaaggtgattcttgttatgttttagcaaagagactgttgtcattttgcccctaccctagagatctgtggaactttgaacgtgagagagatgatgtaggatatctggcataagaaatttctaagcagcaaaggcttcaagaagtgacttaggtgctgtcaaaggcactcagtttcaaaagggaaacagaataaaagtttggaaaacttgcagcctgacaatgagatagaaaagaaaatcccatttcctgaagtgaaattcaaatcagctgyagaaatttgcacaagtaataagtagctgagtgttaatccccaagacaatgggggaaaatgtctccagggcatatcagaggtcttcagggcagcccctcccatcacaggctgggaggcctagaaggaaaagtggtttcatgggctggtcctagggtccccatgctgcttgcaccctagggacttagtgccctgtttcccagctgttccagccttggctgaaaggggccaaggtagctagcgcttgggctgtggcttcagaggatgcaagccccaagccttggcagcttccatatggtgttgagcctgcaagtgcacaaaagtcaagaattggggtttgagaacctttgcctagatttcagaggacgtatggaaatgcccagatgcccaggcagaagtttgctgcaggggtggggctctcatggagaatctctgatagagcagtgtggaagggaaatgtggggtcagagcccccacacagaattcctactggggcactgcctagtggagctatgagaagagggccactgtcctctagacctcagatgggtacatccactgacagcttgcactctatgcctggaaaagccacagacacttaacaccagcccatgaaagcagctgggagggaggctgtaccctacagagccacaggggtggagcttcccaaaaccacaggaacccacctcttatatcatgtgacctggatgtgagacatggagtcaaaggagatcattttggaactttaagatttgactgccctgctggatttgagacttgcatggggactgtagcctctttgttttggccagtttcttccatttggaacagcagtatttaaccaatgcctgtacccccattatatcaactatctaacttgcttttgattttacaggctcataggcagaagggacttgccttgtctcggatgagatgttgaactgtggacttttgagttaatgctgaaataagttaagactatgggggactgtttggaaggtgtaattggttttgaaatgtcaggacatgtgatttggcaggggctggggcagaatgatatggtttggctgtgtcctcacccaaatctcctcttgaattgtaactcccacaattcccatgtcgtgggaggaacctgctaggaagtgattgaattatgggaatgggtctttcctgtgctgttgtcgtgacagtgaatgagtctcacgagataatgatggttttaaaaaggggagtttccctgcagaagctgttctcttgtctgctgccatgtgagatgtgcctttcaccttccgccatgattgtggggccttcccagccatgtggaactgtaagtccaataaacctttttcctttataaattacccaatctttgatatgtcttaatcagcagcatgaaaacagaatggtatggggcattatttctgggttctctattctgttccattggtttatatgtctgtgtttgtaccagtagtatgctgttttggttactgtagcattagagtatagtttgaggttgggcaacgtgatgcctcctgctttgttctttttgcttacgattgctttggctatttcagctctttttaggttctatatgaattttaacttttttttttttttgtctttcaggaggtaggtgctggaatctatctgaatttttaattttatatattttttctagttctatgaaaaatgacattggtagtttgataggactagtgttgaatttgcagattgctttggtcagtatggccattttgctgatattgattcttctaatccatgagcatggaatgtttttccatttgttgttgtcatctataatttcttttagtagtgttttatagttcttcttatagatatctttcactttcttggttagatgtattcctaggtatttcattttgtgtgtgtgttattgtaaatggaattttgttcttgctttagctttcaacatgagtggtattgatgtatagaaatgctactgatttttgtgcattgattttgtctcttaaaactttcctgaagttgtttatcagtttcagaagctttttggtggagtctttagggctttctaggtatagaattatattgtccatgaagatagtttgacttcttcttttcttatttggatgtcttatttctttctcttacctgattgctctggctagaactcccagtactatgttgaataggagtaatgagagtgggcacccttatcttgttccagtttttaaggggaatgctgccagatttctgcccatttggcctaatgttgactgtgggtttatcatagattggttttgttattttgaggtatgtttctttagtgcctagtttcttgaggttttcatcatgaagcaatattagattttatctaaaatttttccctgtctgagaagatcgtatggtttttgtttttaattatgtttatgtggtgaatcatatttattgatttgtatatgttgaaccaactgtcatggcttttgtagttcagtggtgggtgagaaacacacctagcagctcttttcccccacagtttggtgagcaggagggaggattccggtgttacatgaccccttcggtgccgcttcgccagctggaaatctctgcggccgatgtctctttgctcaggctcactgggttcacgctgctcacccgcccgctgcaggctgcacttggcttgcaccccagtctggatgctgcacccgccacaggatccacacttagtctatggctgggctgggtgtgcagcaacctgcttcggtcttgggtgctggcatctagacaagggtaatgtggtgacacccagaaactcagaggtgccagcaactgttgagccccaagtgctgttacagctctcacccagagagtcccaaggtctgagatccccaagaaatgttataccttcttcgtgttacagatcgtttgctcctgctgcctgcagagtggcaaattctgggttcttgtgccatgaccaagaagaattagatactcagacaccagagactgagtagggcagagaagaattatattgagcgacagaaggagatctctcagcagagaagggacccaagagcaggtagccctctgtgaggctgagtccaggatttttatgggctaataataggaaagtgcatgctgattggtccatgggcctgcctggaaaaagcaccattcaattggttaaaaggcatcaaggaagttctcattccagtcacgggctctatggactggtagctcagttttcagtctttaaactgtctttggcttgtaggtcgggtttcaccagggacctgtccctgtctgcctaggaatttgtctgcctccttatgctgtcattcatagcaaataagtagcagagcctgcctgtatacctaggatatctgactctagtgcttatacttaaataatatattactttatataatgtcattagtttttataatagactttaaggatatattatgcagtcgtattatatatatatatatatatatatatatgcacatcatttatatattgttttacgagtatgttgtttcaagatattggtgaggtaagcatttttacataaaaattattgttcatcattctttgaaatgaattcttaggaccagaagaccatgtccaggtgcattacattttatttgatttcattatttatttatttatttggagacagagtcttgccctgtcacccaggctggagtgcagtggcatgatcttggctcactgcaacctccacctcccgggttcaagcaattctcctgctcccaagtagttgggaccacatgtgcacaccaccatgcctggttgatttttatatttttagtagagacaggttttcaccatgtttcccaggctggtcttgaaccaggcagccatcctcctgcctcagcctcccaaagttctggggttaaggcatgagccacaacactcggccctaggtgcattaaattttaaatgctttaaaaacatatatgtttattgcagcactatttacaatagcaaagacttggaaccaacccaaatgcccatcaacgatagactggataaagaaaatgtggcacataggcaccttggaatactatgcagccataaaaaaagaatgagttcatgtcctttgcagggacatggatgaagctggaagccattgttctcagcaaactaatacaggaacagaaaaccaaacaccacatgttctcacttttaagtgggagttgaacaatgagaatacatggacacagggaggcgaacatcacacactggggcctgttggtgggtgggggtcaaggggagggagaacattaggataaatacctaatgcatgctgggcttaaaacctagatgaaggttgatgggtgcagcaaaccaccatgacacatgtatacctgtataacaaacctgcacattctgcacatgtattcactcttgttgcccagtctagagtgcaatggcgtgatctcggctcaccacaacctctgcctcccaggttcaagtgattctcctgtctcagcctcctgagtagctgggattacggcatgtaccactacgcccagctagttttgtatttttaatagagatggggtttcttcatgttggtcaagctggtctcaaactcccgacctcaggtgatgtacccaccttggccccccaaagtgttgggattacaggcatgagccaccacgcccggcctatgttagactcttgataagtattcaaacacatttgtgagtggaatgattccagtttcaggaaccaattttttttcttggcaaatttccttataactttagtttttaatgtttgttctattacttttcctaaaggcaattttcaataatctctagtctttgtgagggtcatattgccatttactttttttaaaaaacagtattatacgttagggctgatgactttcgttatttggaaaaacactgtgacttctgaatccatctattctcagtcttcttgttgctctcattttgttttatcttcactttaaagagtcagcagcccctcctcttaacatcaacctattttattcatacctttcttagcacacttatagtgttttttatagcttatcacactcctgtgtctctaatgcctgcaacacatatcctgtatatgcatatacacatatttacatgtatgtgtacatgtgcgtatttgtgtatgtgtatggtatccttaaacagagatcatgtcttatttaaatttgtatcccagtaactctctgtccttttgctatagtcaggatcaaattacttttgctaaattactaactggattattcaaccaaaccaatgaagcaagcatattattttccctatttatatttttccagcatttttgctatctttcttctgattagattacttagtcccttcagttgtacttatttcattgcattttatcagaattgacaggatgcttattttcagacattttttgatctagtttgttctttctttatttttgcccattaaggcaattatcaccttagttttcgttcacttctgatcattctatctattgatattgtacaaacctgtattttgcttttatttttttcttcccagtaaatactagctctgtacatatttgatttttaaaacttgttttcaaagtttttttataatctattatttagtattcctcttactcactcttaattttttgccctttaaaaaaatatttgccttctcaagtgctcttgccttattaaagttgcattattaatcctttcacttcatgaaagtatgtgacagtgattatctttctgtttgagagattaagctttcagctttactttttttttttttttttttttttttgctggaaagccacctctgttcatccttcaaatgccatggctcaactttaatttggctttcaaaatacaaagtatattataaattaaatatttgaaagataaagaatttcttcttgcctttatcttccgtatacgtccctaagtccaccaacttgtagtgccatgaaagttgcttggcaggattgccatttgtagtcatttgtcactcagaaacattgatgattattgctatcaaagaatatattgagtacttgttaattccatagcattctattttattttatgcataagttaaaaagaaataaaaggcataatttcatgctttaaggtagtctagaatcaacttataacacaaagtctctgctcctaacacatctttacacaacataataacttttataaagcaatacaactaaatattaaattatgtggttgggcacagtgacatgcacctatagtctcagctaccagggaggccaaggtgggaggattacttgatcccaggagtttgagaccagccttggcaacatatcaagaccttatttcaaaattaaaatcataaataaataaaatgatgcaagtcgtatataaacatgcacaaagatataaagttaaaaatggtattaaggtcatgtaacatttagtcaggaaagatgttttctagatagtctgagaaaataacattttaaatgatgattggctaggagaatatgtgattgtgggaaagagaatggcatatacataatgatggagaactcagcaggatatttgcttcttttaagtctcattaacaagtgtgtatcagaaatactttcctaatatttgacatcctaacttttgttccatccagaaaataaaaccacaaataaaaggaattctttcttttcctaaaatgtcttaataagattaggaaaacatatttattgctctgggtttagctataagacccaagaagtttgcactctgtctgcttaaagagaccttatacatcaagaaataccacacaatatctggtaatatgtaatgtaagtttgaggtattcagtgatatagaagaggttcaaaggttggaaaagatcataagcttggataggcaggtgacttcaaagagaagttatttgagctggaccttcaagaaaaggcttttgaaagggtagagaaaggacttatgggcaaagtttcataaaagatgcaagtctttttttttaatgtatctttttataatactttaagttctagggtacatgtgcacagcatgcaggtttgttacatatgtatacgtgtgccatgttggtgtgctgcacccattaactcatcatttacattaggtatatctcctaatgctatccctcccccytcccccaaccccacaagagactctggtatgtgatattccccttcctgtgtccaagtgttctcattgttcagttcccacctatgagtaagaacatggggtgtttggttttttgtccttgcgatagtttgctgagaatgatggtttccagcttcatccatgtccctacaaaggacatgaactcaaaaaaaaaaaaaaaaaaaaaagatgcaagtcttttcagagtgtggcttgccttaaagcttttagttaatgtgaggatgttgctggaaaaaaatcaagtcctgttgaaatgaaattaagggttgatggcagtaggatatttggcaggtaaataaatggaaacatacatgatgtttgtagaacagaaggctcactgtctttcagatgtgaaatttccccatattgatctgtagagtcaaagaaatcccaatcaaactctagcaggttttttgttgttcttgttgtttttggagaaattgacaagattgttctaaaatgcatatggaaatgcaaaggaccaagataacagttctgaaaaagaacaaagttagaggactgaccttatttggtttttcaagacttgctataaagcttcaataatcaggacagtatgccattggtatagaaatatagatcaatgtaatagaaaaaaagtcaggaatagatgaaaacatatagtcagttgactttctttttttcttttttttttttttttgagacggagtcttgctttgtcacccaggctggagtgcagtggcgcratctcggctcactgcgaaccccgcctcccaggttcacaccattctcctgcctcagcttcccaagtagctgggactaaaggtgcccgccatcacacccggctaattttttgtatttttagtagagatggggtttcaccgtattagccaggatggtctcgatctcctgacctcgtgatccgcccgccttggtctcccaaagtgctgggattacaggcatgagccaccgcgcccggccagctgactttcaataaaagtaccatgataattccattggaaaaagtatagccttttcagcaaagtgctagaacaattagatacccatatggagaaataaaaaattggaccacaaaccctgtttcacaccatatacaaagttaattcaaaattaattgtagatctggacataggtctaatattataaaagctctaaaagaatacagaggtgaaaatctttataaaatcatattaaacaaagatttctgagacaggacacaaagtacgaaccatgaaagaaaaaactgagaaattgaacttcattatatccaaattttcgttctttgagaaacacagttaagaactgaaaagcaaagacatagacaaggagaaaatattttcaaatatatataagaacttgtatccagaatatgaagaacactaataatgacaagaagaataaccactgaatgtttaaaatatggacagaagattcaacagccacttcaaagtggaaaacttatgactggccaatagtatgtgaaaatatattcaatgtaatagcaatgcaaattaaactttaatgagatattactgcacacctagtagaatggctaaagataagaatgctaacaatataaagtgctgacatggatacagagaagtgaaacgctcccttatggctagtgggaatgcagaatttcactgccacttaggaaaacagtttggaagttttttttaaagttaaatrtacacttaactttttgatccagcaattccactccaagatattttccaatagaaatgaaaacatatgtctacataaagtcttgcatgtgaatgacaactttattcataatagacaaaatcaggaaacaacttatattagtccattctcacactgctatgaagaaatacccaaggctgggtaattgataaatgaaagcggtttaattgactcacagttcagcatggctggggaggcctcaggaaacttatagtcatggcagaaggcacctcctcacagggcagcaggagagagaatgagtgcagagcgaagggggaagccctatacttataaaaccacctgatctcatgagaacttcctcactatcacgagaacagtatggaggaaaaccagccccatgattcaattacctcctatcgggtccctcccacaacatgtgaggattatgagattacaatttaagatgagattagggtggggacacaaagccaaaccatatcacaactcaaatttctattttgtgcttttgcctcatgtcttctgaatgagacttttgcagaaggtgcaacttcaggaatctgtgattttcaaaattgcttcatgttattctgttgcagtgaggcagtttgggaaccagtgccctagactatcttatccagtaaggtagggacgctgctaattcgtagagtacttttttgcaaatttggaaaaacatgccttttctggaaagatgcagtcttattgatgtatggcctggcagctagaatgaagactgaatttcagctttctttatattccctcatgtgggagctgtagttcattgtttcatgtacattacataaagcaaaacattaaaaaaaaaaaaaaaagaaaaaaaaaaccctgaagctttgactcccaacctcatcatgagtaagcttaatctggcagagtatttaagctagatgagtctggaattagcwagaagactttttgttttttgttttcctttaaagcaaatctctaatactactaccacattgctaccaaaggcattactacttagagctagaggaaaagtagaaagaggctatactggaagaaaataagagaatggctgagtagctcaaagtgaacccagctcttgctacttgctagaaagaaaagaagaaatgaaagtagaagtaggtggttgtagctccattcatttttccactgtaggggagtggagcgtaagctagagagaactagagaaggccatgcttttctaaatttctgggaagaatgactaacaaagggaaaaagtgattatggacctactgtatgagagaacagaacctctgtccctctaaccacatggatcaagtgggagaaggcatatatacagtattctagaatttttaatccactataatatttaatccattaattaattttcaatcaattataattgcttatttcactttatttttttgacagagtcctgttctgttgcccaggctggactgtagtggcataatcttagctcactgcagcctttgcctcctgggttcaagtgattcttttgcctcagcttcccaagtagctgggactacaggcatgccattgtgcccagctaatttttttgtatttttagtatagacggggttttgccatgttggccaggctggtcttgaattcctggtcccaagtggtctacctatctgaggctcctaaagtgctgggattaccggcatgacccaccacaactggccaggagatgagagtagttttagtttttatttttatttttttgagacagagtttcactctatcacccaggctggagtgcagtggcacagtcttggctcactgaaatcctctgcctccaaagctcaagcaatcctcccacctcagcctccagagtaactgggaccactggtgcacactgccacacctggctaatttatttatttattttttttaaagaagtggggcttcgccatgttgcccagtctggtctcgaactcctgggcttaagcaatccgcctgccctgccctcccaaagtgctaggattacaggcttgagccactactcccagccttaattagttttaatgaaaccaccacaataaacaataaaatattcttgaacttaactaacattcctattttctatgggtaaagtatttcagtcttatgcatggtgaaataagggtgaggtgaagtcagataagggacagataataaaaaaatttaaatgtcaaaaatgataatctaggatgaaaataccagaattaggtgaagacccagtgctgaagaaacttgaaaactaggccaagtgattagaaatatattttattggaatgatgaagctgatggtgtttcagataaaattgttctctaagatttatttttttacacctttattgatatgtaattcacataccatatagtttactcatttaaagtgtacaattcagtggttttgtgaatattcaagagttatataaccatcacaattcattttagaatttttaccacccaatatttttaccactcaaaaagaaaccccaaatccattaacagtcactttcctttccccccagctctcctctcccttctctgccataggcacaaatctactttctgtctctatacatttggctctcctggccatttcatgtaaatggaatacagtatgtggtcttttgtgactggcttttttttttttaactagagaaacgttttcaaggttcattcatgttgyagcatttatcagtacttaattcatttttattgcaaaataatattccattgacttgataataccacatttagtttattcattttgatattagttgatggatatttgggttgttttcacttttgggctcttaagaataatgctgcaatgaacattcatgtgatagtttttgtgtggacatattttcatttctcttgggaatatatctagtggtagagtttctgggtcatataataactatgtttagccttttgagcaactactagagtggtttcataagcagctgagtcatattacctattcacgagcaatgtatgagggttccaatttctttacatcctcatgagcgcttgtttttatctctttgattattgagtgggtatgaagtatttcattttagttttggtttgcatttccctggtggctaatgatgttgaacatttttttcatgtgcttattggccatttttatatctactttggataaatgaatattcagattctttccccattttaaaattcggttgttttattattgagttagagttttttatgatattctggacagaagtttcttatcagatacataatatgtaaacattttcttttaacttatgagttgccttttcactttcttgatagtttccttagaaacataaaatattttaattttgatgaagttcaattcatctagttttttttgtcacttatactttgatctcatatcctagaagactttacatattctgagatcataaagatttactygttcatcttcctctaagagttttgtagtttttagtctttcttatatttaggtctatgatccattttagttaattttgtataaggtgtgaggaagggatatattcatagcttcattcttttccatatggatatttagttttctagcatcattttttgaaaagactagtctttttccattgaatgatcttggcatccttgttgaaaatctgttgatcataaatataagtgtttattatatggacaagattaatttttttaatgagtgatatgcagaatgaatttgaggaacacatagagccaatgataatgagatgagttagaggaagtaccattgtgaaactgtatggacctaaaccagtgaagtttgttgggtgatacatgtaaagagacaaagctgaattattatgtcttcagtatgcattttgtgtatattatgtgttatatatattatttatatttccattataatcattccttctcttttatccaatgacttaatattatgttattatttcatactaactggactgtgtgaaatgaatttgggaacagaggagtctcctgtaagtcttctcagctgtgaaatatccttgaatatcccaaggaattctctgaagattggagtcctggccctctttgttgaatttgatttagcacattagggttagaccaagttacttgtattttatatagctgcccatattattccaatgtacagctctggaccctctggctttttataatcaatttctaatgaactgtcgtatcttcctattagttattagttgcttagctttctggtgtcatttgtgattttcaggtatcatctcttgtttttggtctggtttagtctttattggcattccatagctgccaggccattctgccttgctagaagacaaatattacaatttttttctttttttctacttaaaacctcttagatatcataagaccatagatctcagacttattatactgattggtgagatctgctctcagagtggggcccactgtattttaaacacgtacccccaggtaattctgatatagatggttagaggaactctgctttcgagtgtttctaagccaatttgttattttggttgcaaggatattagaggtgattttattggtatttaccctaccgagtcagtagtgcctaaatcctaacattcagttttcctccttatgaaacccctggcagaggcccatgtgagaaaggaatcttggcttagtaggaggctaagagctaatacattattacctgggctggtacttcctgggcattattatctagcaagtataatagacgcaggtctggtcacatgaattagctaatattttatttgacatttcctagttctacttcctgtcccaaatcgtcttttaatttttaatttgtttttttttcaggcttattgaagtataattaacaagtaaaaattgtgatattttgatgtgcatatacattgtgaaatgagtgtatcattaacatattcatcaagctaattaacatattcatcagctcacatagttaatttcgtgtgtgatgagaacatttaaggtctactctactagtgaattataagtacacaatatgttattgttaactatactcactatgctatacatttggtctccagaatttattcatcttataacagaaagtttctactctttgacaaacctctccccatttgccccactccccccagtccctgataaccagccttctactctgtttttgtgtgtttgactttttgagatgccacatatatatgagatcatgcagaatttgtctgtgtctgacttatttcacttagcataatgtcttccagattcatccatgttattgcaaataataagatttccttttttaaggctgaataatactttatcatgtgtgcgtgtgtaaaatcacattttctttatccatttatccatcaacagacactgggtttttttttccatattttggctattgtgtataatgctgcaatgaacatggaaaatactgattccacatagtgattttatttcctttggatatattcccagaagtagattgctggatcatgtggtagttctagtttaatttttgaggaacctctatgttgttttctattatggaatgtaccgcggcacaataaagtccacatatgacaagcccacagctaacatcatactaacggtgaaaaattgaaaacattacctttaagatcagggataagacacagatactcttgccacttatcaacatagtactggagtcctagcctaataattagacaagaaaaagaagtaaaaggcatccagacgggaagggaagaaggtaaactattcctgttgtagatgacatgacctgattaaagaaaatgctaaagcatgcaccaaaatttgttagaactaataaataaattcagcaaacttgcaggatcaactttactgagtggacaacgtacaaaaatcagctgtattttacacactaacagtgaactacctgaaaaattaagaaaacaatcccatttccaataacatcaaaaagaataaaatactttgtaatatatttaactgaggaagtgaaagatatgcacactgaaaactgtaatacattggtgaaagaaattgaagaagacacaaataaatggaaagatacctcgtgttcatggattggtagaatattgtagaaatgtccgtactagctatcccagatctaaatatgtaataaacatttcaagtattcagggaaataatacaatgccacttctttagaggagatcacctaatatttacaagtagaagagctaagataaaacagaaaagagtaccttctcaccttttcatcactgatgctgtctgcagtgaatatattgttagtggtgaagaccaaactatattaaagtttaagggatgcaaataagcatgagaatgagcatgggaaaccagccccaaaattcagtcttcaagattcattaaaagttaaaaccacaaaaggcagaaaaagaattgaagacaaacgttggaagaaagtacaaaggcaaaaaatagaaaaaaagtagcaaatattgtagatattagtcaatatttgttacttttgaatgtcagtggtttaagtacatcagttaatcactttgaatgtcagtggtttacatgcatctactaaaagacagaaattgctgggcatggcggctcacacctgtaatctcactgctgtcaggccctggtgtgtgatgttcccctccctgtgcccctatgttctcattgttcaacccccacttacgagagagaacatgtggtgtttggttttctgttcctgtgttagtttgctgagaatgatggtttacagcttcatccatgtccctgcaaaggacattaactcatccttttgtatggctgcatagtaatccatggtgtatatattccacattttctttatccagtctatcattgatgggcatttgggttggttccaagtctttgctgttgtgaatagtgctgcagtaaacataagtgtgcatatgtctttacagtagaatgatttatatcctttgggtatataccaagtaatgggattgctaggtcaaatggcatttctagttctagatccttgaggaatctccacactgtctttcacaatggttggacaaatttacattcccaccggcagtgtaaaagcattcctatttctccacatctgctccagcatctgttgtttcccgactttttaatgattgccattcttactggcgtgagatggtatctctttgtggttttgatttgcatttctctaatgaccggtgatgatgagcttgttttcataagttttttggccacataaatgccttcttttgaaaagtgcccgttcatatcctttgcccactttttgatggggttgtttgtttttttcttgtaaatttaagttctttgtagattctggatattagccctttgtcagatggatagattgcaaaaattttctcccattctgtaggttgcctgttcaccctgatgatagtttcttttgctgtgcagaagctctttagtttaattagatcccatttgtgaattttggcttttgttgccattgtttttggtgttttagtcatgaagtctttgctcatgcctatgtcctgaatcatattgcctaggttttcttctagtgtttttatggttttaggtcttacatttaaatctttaatccatcttgagttaatttttgtataaggtgtaaggaagaggtccagtttcagttttctgcatatagctagctagttttctcaacaccatttattaaataggaaatcctttccccattggttgtttttgtgaggtttgtcaaagatcagatggttgtagatgtgtggtgttgtttctgaggcctctgttgtgttccattggcttatatatctgttttggtaccagtatcttgctgttttggttactgcagccttgtagtataatttgaagtcaggtaacatgatgccttcagctttgttgtttttgcttaggattatcttggctatatgggctcttttgtggtttcatatgaaatttaaagtagattttcaaattctatgaagaaagtcaatggtagcttgatgggaatacattgaatctgtaaattactttggacagtatggccattttcatgatattgattcttcctatccatgaacacggaatgtttttccatttgtttgtgtcctctcttatttccttgagcagtcatttgtttttctccttgaagaggtcctccacatcgcttgtaagttgtattcctagatattttattctccttgtagcaattgtgaatgggagttcaatcatgatttggctctctgtttgtctattattggtgtataggaatgcttgtgatttttgcacattgattttgtatcctgagactttgctgaagttgcttaccagcttaaggagtttttggactgagatgatggggttttctaaatatacaatcatgtcatctgcaaacagagacaatttgacttcctctcttcctatttgaatagtctttatttctttctcttgcctgattgccctggctagaacttccaatactgtgttgaataggagtggggagagagggcttccttgtcttgtgtcggtttttaaagggaatgcttgcagcttttgcccattcgatatgatattggctatgggtttgtcataaatagttcttattattttgagagatgtgccatcagtacctagtttattgagtgtttttatcatgaagagktgttgaattttatcgaaggccttttccacatctattgagataatcatgtggtttttgtcattcrttctacttatgtgatggattatgtttattgatttgcatatgttgaaccagccttgcatcccagggatgaagccaacttgatcatgatggataacttttttgatgtgctgctggatttggtttgccagtattttattgaggatttttgcattgatgttcatcagggatattggcctgaaattttctttttttgttgtgaagagtcattttttagaaaatattttgacctcattgaaaatgaaaatagatcatgttaaaaattttgggatgctgtaaaagcagcgctttgagggaaattcatattattgaatgcatatatattagaaaagaagaaagatctaaaatcagctatctaagcatcttcattaggaaactataaaaaggagaggaaattaaatccaaagtaaggagaacaaaagaaataataaaaattagggcagaattcagtgaaattgaaaacaggaaatcagtagagaaagtcagtaacaccaaaagctggttcttagcaaagatcgatatttttgataagcctctaaccaggctaagaaaaaaagagagatgacacaaattagtaatattaaaaatgagagagaamaattcactgtggatggcatgggcactaaaaggacaataaaagaatattatgagcccctctgtgcccacaagtttgacaaccaagatgaaatagaccaattttttccaaggtgtaaatctgtcaaaactttacaagaatcggcaatctgaataggcctatatctagtagagaaattgaatcaatatttaacaaccagctgggcacagcagctcatgcctgtaaactcagcactttgggaggccaagatgggcagatcacttgaagccaggagtttattgccagcctggccaatatggtaaaaccccaattctctaaaaatacaaaaaaaaaaaaaaaaaattaacaaccttcaaaaagagagaacaacacagggccaggtggatttactggtgaattctgcccaacacttaaggaagaaagtgtaccaatcctctcctatctcttccagaatataaaagcaaagataataaatacttcgtgttccattctatgaggccaccagaactctaacaccaaaatcagacaaaaatgttacaagaaaagtaaactatagattaatatctctcatgaacataaatgcaaaaacaaatatatatcaatatgtatattgatatatacaaatatatatcagtaaaatattaacaaatcgagtccaacaacatataaaaggaattatatacagagaccaggtgggatttatcccaggtatagaaggctggttcaacattcaaaagtcaatgaatatagtccatcacatctgcaggctaaagaagaaaaataacatgattatatcagtagatgcagaaaaaagcatttgacaaaaatcatccatttatgagaaaaactctaagtatactaggagtagagcagaattttctcaacttgaaaaaaaatacctacaaaacacctagagctaacattatatttaatagtgagaaactaaaaaactttcctgctaagattaggaactagacaatgatatcctttcttacagttattttctagctaatgcagtaggataagaaaaataaatgaacaatacacagatttggaaggaagaagtaaaagtctttgatcacaatgacatccttgtctatgtataactgttcaaaaatagagtaaaaaacctctgaaaattgataagcaattatagcaaggtttcagaatacaagcttattatacaaaagtcattcattttcctatataacagcaatgagcaagtagaattggaaattaaaaacatattaaaattcatttctgttaacacccctaaaaatgaaatacttaggtataaacctaataaaatctgaagtctgtatgaggaaaactacaaaactgtgatcaaagttttgaaataattaataaatggtaagatattctacattcatggataagaagatgtcagttcttccctacttaatctaaagattcaatgaaatttcaatccaaatttcagcaagttaatttgtgtatatcaacaaattgattctaaagtttatatggaaagacaaaagacacaaaatggccaacttaatatttaagggaaataacaaagttggaggagtgacattagttgacttcaagacttactataaagcttcagtaatcaagactgtgtggtactggcaaaagaatagacaaagagatcagtggaacagaacagaaagcccagaaatagacccacataaatatactcaactgaaccttgcaaaggagcaaaagcaatacattagagaaaatacagtcttttcaacaatagtactggaataactggacatccccctgccaaaaaaaaaaaaaaaaatctgaagaagtaccttacacccttcacaagaattaactcaaaatgaattgcagacctaaatgtaaaatgcaaaagcaaaactcctaaatgacaacacagaatatctaggtaagcttaggtatggcaatgactttttattttttatttttgagacggagtcttgctctgtcgcccaggctggagtgccgtggcacaatctcggctcactgcaacctgtgcctcccaagttcaagcaattctcctgcctcagcctcctgagtagctgggattataggagtgtgccaccgtgcctggctaatttttttgtattttcagtagagacggagtttcaccgtattggccatgctgatctcgaactcctgaccttgttatctgcccgtctgagcccccaaagtgctgggattacaggcatgagccaccgcgtccggctggcaatgattttttagaaacaacaccaaaggcataatctatgaaagaaataattgataagctgcacttcttttaaatcaaaaacttgtgttttgtgataagtagtgttaacggaatgagaagagaagctatagactaggacaaatatttaaaacagataaaactaataaaggactgttatttaaagtatacgaaaagctcttaaaacctaaataataagaaaactataacttgattttaaaatgctcaaaagacctgatcatacgtttcaccaaagaagatatacagaaaacaagtaagcatatgagaagttgtttaatatcatgttatgagagaattgctatttaaaacaataatgagataccactatatacctgttacaatagctaaaattcaaaacactgacaacaaatgctgacaaggatgtagagcaataaggtgtctcattcattgctagtgggaatgcaaaatggtacagccactctgggggacagactgacagttctttaatgaaaataaacacactctcatgatctgacccagctgaaaacttttgtccacacaaaaacttacrcatagatgtttatagcagttttatttataactactccagtttggaagccaccaggatgtcctacactgggtgaatgtaaaaagtgtggtagatccagacattggaatattattcagtgctaaaaagaaatgagctgtcaagccatggaagacatggaagaatgcatatcagtaaatgaaggaagctaatgtgaaaagcctacatactttataattcctattatctgactttcttgcaaatgcaaaactatggagacagtaaaaagatcattgtttgccggggatttggtgggagggagggatgactaagtggagcacagaggatttttttagggcaatgaaaccattctgtatgatactataatggtggatacatgtcatccatcatacatttgtcaaaacccrtagaatgtgcaataccaagagtgaatgcttatgtcagctgtgggctttgaacaataatgatgtgtctttaaaggtttttttttttttctgtaatatgtgaaccactatcatgtaagatgttgatgggttgatggggggagactgtgcatgtgtgcagacaggatctatagagaagctctccaaatttcccacttaattttgttctgaacataaaaaaactctacaaaaggaaagtttattaatttccaaaacaggtaggagaagggtaatgttactgtaggaagctttgcttatttataagtttgtttttattttttacattaataaaggaagtgataatgtcagcacatagtactgagaatctttttttttttttttttttttttttttttgagactgtgtctcactctgtcaccaggctagaatgcagtagcacaatcttggctcactgcaacctccacctcccaggttcaagcaattctcctgcctcaccttcctgagtagctgggactacaggtgcgtgccaccacgtggggctaatttttgtatttttagtagagacggggtttcaccatgttggccaggatggtctccatctcttgacctcgtgatccacccgccttggctttccacagtgctgggattacagaagtgagccactgcgcctggcctgaaaatcattctgatgagaagcataatctcttaaaatcccttaataagagaatgctaaataattccaggtaaattgttattttgatatgtaatctattctatgtttacattaagttaatattttacagtaaagatccatgcattcttctttctaatttatattataaggctttcaaagttgagtgaattgtgtcaaatttttaacccatttacagcttccgttttgtcccatatgttataaatcaaggcaaataaaaattcttatttaaaccttcctctcctcactatgtacgctcaagtttttgtcctcattttgtttctttttaattctggagcaacctttcactttatctgagaactaaaattctgtccyttttcttgaaaaataaacatttatcctattacatcacctacatagttacactttttcttaaaactgtccctgctaaaatagactcagttacccatattaccattgttaattaacttgtatttaaccttctctggtggataggaacttgataataatgcctatcatgcacaagcaatttaggtgactaggaaatatcattctctacagccacacccttttttttttttttttttttctttgaggcagagacagtctcactctgtcctccaggctggagtgcagtggcactatctcagctcactgcaaccttcacctcctgggttcaaaccgattctcctgcctcagcctcccaagtagctgagactacaggcacctgccaccatatccggctaatttttttatttttaatagaggtagagtttcaccatattggccaggctggtctcgaactcctgacctcaaatgattcactcacctcagcctcccaaaatgctgggattacacgcatgagccactgcgcgcccagcctcacatacattatatttatgtcttcaagtgacaagaatgagcacattcattaacatgatataaaatcatggtaacatcgtaacattttaaggtaagaagtagagttgtatattgtaagcgctatgcttgctattcaagatcttgaagttaagtacacaagaatcttagaaatcacatttcagaggacactaaaaaatgtaattattgatataaaacattgttagaatcatgattcagttcagtcaaacagttttacttttttatcattttaagctttaggtatggatatcattagcttatctgatcaatacactattatcagaattttaagaagttcaggttaactagtattttctgaaaacagaaactcaacatccctacaaaattatggagaaaacacagctatgtatttcagacaaaatttttaaatcagtctgatttgtccaaagaatcagtttttagctttaaatttttaaacagtttttaattgataccttatattggtacatatttatgtggtacatgtgatattttcttacatgcatcgaatgaggagaattgttgttagttcttgcttgaaagtttggtagaatttggcattgaagccatccagtcctggacatttctttgttgggagactttattactgagtcaatctcattacttattattgatctgttccagttttttatttcttcctgattcactctcagtaggctatatatgtgtatctagaaatttatccatttcctccaactttccagttcattaagatttagttgcttataatagtctttgatgaacttttgtatttctgtagtattagttgtaatgtctgttttctgtttctgtttctgattttgtttattttgatcttatccttttcttggttgcttttttagtgtccattttgtttaattctagtttttattatatgtttccttctactcatttttagttgtggtttttttctttgtatttttttttatgtagagtttatgggtatcaactttcctcttagcactgcatttgctatctaccataggttttggtaagttgtgtttccattttcatttgtttcaataaatttttatatttgctgcttaatttcatcattgatccagtgtttgttcaggagcatagttttaaattttcttgtatttgtacattttttaaaaagtttctcttgttactggtttttagttatattccattgtggtctgagaagatagttgatgtgatttcattttttaaaaatttgttgaggcttgtcttgtggcttaacacatagtctacaaagattcacttttattgcatgaatttagattcgtaaattaaaatctttctaagctgctagcagatcctttaagaagaattttttccctaaattactagtacatttgaagttttctttagatattactatagattcatgaacttcttatactatgtaaaccaattatatcttagctccttaaaattcagagacttctaaattttatttattaatactcttcttaggaaaatacttcatacagaatgagagagaatgacttctgagttatagcaacacagagaaaattgtagctttaattataacaatctctgcaacagattaagtaatcaaggaaacaccaaaatacactgttcaagatttcaaaggattattttcccttctagtagttataaaatgttttatgaaattatttggatacacaaatagagaaacaaagaatttaaaaaatgcaactctcattccttgtcatgtctcatatgaaggacaagaaatccctttaatcttaacagaggtctttaaagttcagattataaaattacattcccaattattaatgcatgcatggggattatcattatcatcattatcatcttctagtggaaactatatccagaaccaaaatggtgaagaactagaaaagaaaatgaaaaattcaaaatttaaagaaaaaagccaacttgtagtagactagcatcacagcaaaggtacagttctattgccttttttttctttttttctttttttttttttttttttgagacagagtcttgctctttcccccatgtaggagtatagtggcaggatcatggcttacttcagtcttgacctcccagtttcaagaaatccctccacttcagcctcccaagtagctggacaaaaaacacagcacatgccggcacacctggctaatttctgtattttttgtagagatgaggtctcgctatgttgcctatgctgatcttgaactcctgggctcaaacaattctcccaccttggcctcccaaagtgctcgattgtaggcatgagccactgcaccaggactctattgctatttgagaatcactttgaggagaaagaaaagtctctcctcctaaacagctcctgaagtacatttctgtgctatcacagtttggttggctttatgaacccactttagtgtctcagtggatcctccaaaagtataacatgttaaaattcaaagaatttaaatggtgacttttgtaaatataaaaagaaaatatatcaaatattttattccacttcctaattaagtagaggactagtgagattataaatacagttcaaagtgcattttaggaactagtttcttaaagacaagttaatgaattttatcttagaataatatagctaagttacatacaatctatttaatattttacatgacaataaagcattattttggggattatcttttttaatagttgaaaatattagaattttccaggttaaaaatctacaaattaataaagaacttcactatgcctagtgtcacaagattcttgggatattgtttttctggctggtgatgtctttgcccaagtcttgcttaggcccgctgggtttgttctgcctacctggcctggcaggctttacttggctgacactactggcctggatcccatacctgccaagggtaagtcaggcatggagtggcaaggggtgtgtgagggagcatggggttcagccagtgtgcaatcggacatgccggctgctgcaatggggcgggcagttacaggtgctggcacaggcactgactctctgtgaggctgtggccagaccaggtgcactgcaggaagcttccccagctggcaccgggaaatgcagtggcacctggaagcttggagatactaggcaccacaggaccccaaagagggagtcacagccctggctcagggagctcccaggtctgggctgcctgagaaggcacagatcttatctccttctctttgccctcaatgtggcaagcagggggcatgtttcagtcctgtgttatagctcttttagctctgccatttggtaggtcccgagttcttgtcctgcaactaggaagcatgaggtacagagccaagtggaggatgagcgagatgaaggggagctttattgatcaatagaacagcacacaggagacctgcagagggtagctcctttccacagccaggatgttccaatgagagttcagctcctagcagaaaggagaccctggagagggaagctcctcctagcaggcaggtcatctcattgtcttcttagctctcagcagagaggtggccctggagtggattgttccactctgcagctggtagtctcgatgtctctgcaggtttctgaagctctcagcagagaagaggccctagaatggatagcttctctcttctgctggttgttgggacatcttctgctgtcagcagaaagggtagctcttctctgcagctggtcatccatcatctgctctgctctggctgagcctggggcttttataggcctattagaggggaagtgcatgctgatcagtccatgggcagccatgggcagatccaggaaaaaccaccacgagtttgccctccaaatcagcactgccagtcctgtccccaggcttcaggccttctctcagggatctgccctcttctgcccaagtatctgtctgcctccccctgctgttcatggcacatgggcttgaccccgatttgctccaagatgggagcaggtgcccacagcagggagaagccaagcagcgggagcaggcacttctgagcctgcaggggcaggggggccttctcagctccccctctccccccccagagtgcagggatacctgggtctgcagccgcaatatgggctgctcccttgaccctagggaagtggagctcctggtcccccaaaagtaaagggaagctccattctgcagccacagctcgggcacctgcagcccttcccaggagggttaggctcctgcctcctccaaggaggcagaggcccaggtctgcagctgcaatttgggcagctgcagctgcacccggggagttcccaccccacctcagaaggagaagggcttacgcttgtcccctgctgcctggagctccatggagcatgtatcctcggcagcacctccctgctgcagtcggcgtgatggcagcggcaggccgtctggagtggctgctgctataactaggatctttaatcagtagtaaacagtgaatcaaataagtaaatttcccttaattatccttatgtggatctgttaatgcattcatatgacattgaaagaatatgttgccctacttttgaccttatttccaagctttgaataacttttcttaacatttgggatcaaaatgtgatttatgccactcttacccaggggtgcttatggtaacactcaaattttctttgaagggaaaagtcaatacgataaagttgtcagttctccccaagggaatctttaaaatcaatatgatttcattaaaactccaacaaatattttcatattacttggtaaataaacccaaaactaattaggaagagcaaaggatcaagaatgactcagacaaatttgaagaaaatgaaccattttaggagaattgccctatgaaatgcaaaaactagttataaagctttattagctaagacaatgtagcattgatgcaaggataaacaaagagataaatagaacctatagggaacctacaaacatgatgatgcacatttgaaaacttgacatatattgcactacttaactctgggggggaaatggactctattaaatgttgtttggccagttgtttatacatttgaaaaaaaataaaattagattgccaacacatattataattttagaaaatttccaggtggataactgcctraatacagaaaatcagaatgttaatgcattttgaagaaaacataggcccaaggcagtggctcacagctgtgatcctagcactttgggatgccaaggcaggaggatcacttgagacgaggagtttgagagcagcctaggcaacatagtgagaccccatcccccacctccccaaaaaaggaagaaaatatagaatctttttataaactttgggcagaaaagtacttcttaaacaaaacacaaaaaaatacctacttacaaatgtggatatactttagaaaattattttcctctaaaccaccatgtttcaaagatatataaaaagacaagctacagatagggtgaaagtatttgcaatatgtttaaggaaatattaatatccaagatatataaagatatctcatttaagttaataagaaaagtcactcaacccaacaacaacagtgtaacaaatgggtaaaagaaatgatttgacaatttgtggaagtagacaggtgacttacaaacatatgaaaaaatgtttaccygcactagtaatcagtgaaatgcaattgaaatcacattgtaatatctttttacagctgtatgattggcagtacttaaaggatctgagcataccaagtattcctgagggcatggagatttgttaatgtctaataaaattgaaaatgcttataatcttttctttgactcaggaattttatttctgggtatatatcctggagaaaactcattcatgtgcataaggaggcatgtatgaagttgactattacagcaatattttattatacctaaattggaaaacaacacaattgtccagctgcaaaataatgaataaatacattttggcatattgataaaagatgatactatatagttgttaaaataaattaggtagaattacagttataatagtcatggttaaatctcaaatgtaatgctgaatgaagcaaactaagttgcaaaaagagaggtatacatcataatttttgaaaataaacgattgtatgtaaattatgcctattcatgcatatatatagatcctgtttcaaaaaatccgtagaaaggtcaaacactttattcttttattattattattagtattatacttcaagttctggggtacatgtgcagaacgtacaggtttgttacataggtatacatgtgccacggttgtttgctatacctgtcaacccatcatttaattagtgtggtgattacctctgtataagcaatgaagagaataaaactagagacaaataataaatgggcttcaacttttctgtaatgtgcttctttagaaaaaatatgactcgggccgaccgtggtggctcacacctgtaatcccagcattttgggaggccgaggcgggaagatcacaaggtcaggagttcaagaccagcctgaccaacatgatgaaaccccatctctactaaaaatacaaaaaaacattagccgggcttggtggtgcatgcctgtaatcccagctattcaggaggctgaggcaggagaatctcttgaacccgggaggcggaggttgtagtgagccaagatcacaccactgcactccagcctgggtgacagagggagacattgtctcaaaaaaaaaaaaaagaaagaaagaaagaaagaaaaaatgtgactcaaatatagcacaatgctaggattttataaaggtgagtattgggtacatgaaagtttattatctgtttgactacatttctcatgtttgaagtatttcattatgaagaataaaaatgatatatataaaatatatatagaaatgtaaaagtattatacaataaacagtatcaatacatacaatgctcataaacataagtatgaacacacacaaaaacacttgtatgtatatgtaagtatacagatgcacatgaatgagcattacatatttgaagtatacaccttgaatgggaaggattccctgtaattcctggttaagtttttccttagggaagataggtgtgttgtgagactaggtattaggcccaaagcatatttcatctggatctcttatgttttatgtacagttattaaggacaaaaatgatataaatatgtaaatatatcatttgcagttatcaatttttgtgataggaatatgtatgtttggtaaactgaatgtctccatttagtattacttgtttctatcctttaaaacagtctttatttttattttttttttcaacttgtatttttgattcagggggtacatgtgcagatttgttacctgggtatattgtgtgaggctgaggtttgggatatgaatgatcctgtcgcctaggtaccaggcatagtacccaatatttagtttttcagcccttgcttccctctcttcctttcccctctagtagtccccagtttctattgttgccgcctttatgtccatgagttcccaatgtttaacttacacttataagtgagaatgtgcggtatttgattttctgttcctgtgttagtttgcttaggataatggcctccagatgcatccgtgttgctgtaaagggcatgatttcattcttttttatggctacatagtattccacagtgtatatctaccacagtttctttatctcatccaccatttgtggacatttaggttgattccatgtctttgctgttgtgaacagtgctgcagtgaacatgcatgtatcattttggtagaaaggtttgttttcttttgaatatatacccagtaatgggattactggatcacatggtagttctgttttaagttctttgagaaatctttaaactgctttccacagtggctgaactaatttatattcctcccaatagtggataagcattccctcttctccacattcttcccagcatctgtttgttttttttttaactttttagtaatagccattctgactggtgtgagatggtaactcactgcggttttgatttgcatttctctgatgattagtgaagtggagcattgttttatgtttgttggtcatttgtatgtcttcttttgggaaatgtctgtttgtgtcttttgcccagtttttaatggaaatagtctttttaaaacattaagtgtttgactaagatctggggcttctatagtcatccctgggaatccacaggtgattctttgtaagacctcagtggataccaaaatctgccgatgctcaagtctcttacagtatagtatagagatagtatttgcatataacctgtgcacatctttcaaatagtttaaatcgtctctggattacttctaatatgtaatacaatgcaaatgctgtgtagttaagttttttactttgtactttttattgtattactttttttattttttcaaaatattttatatccacaattggttgaatccacaaatgtggaacccactgataacaggaagcagaactgactgtatgtaaaagatagattttggatcaaaaagagtatcttaaaaatcacatattttgtcaactgatttgttggaaatgattattacataaattaattttttatgtaatttatgtgggtaattttttcctctttctaaagaatacaagtcaatgaccagattgtggaagtggatggaatcagcttggtgggtgtgacacagaattttgcagcaacagttctcagaaacaccaagggcaacgtcaggtaaatacgtgccttctaatatacaccatgttgttactttagttgaattttaattttctatagtttaacctgcaaataaatgtaattacaatgacaattttacctgaatagtaaaactttgcttttagttttaaatattttcacctttattwtaattagttcatgaaaatagaatttaaaattacaaatcatagtattttagaaagatacaaaaacaagcacttgtcttcatatctttctaaaatactatggtttccaggaagatataatttctagttaaaacctcaataaatatgaattaggtcccaaatctttttaaggaaaacagttatacaatacttgaaatgattatacatatattcaattttctgtgttttttagacaatcaggttgaataaagataagtatattttttaaatgtatacattcttttaaggaatcagccatgaccaatgtttgatgaattataacttttccaacttaatgcacttagggtgcattttttttggaccttgaaatttatattcaaacttgggattgtgaatattgtatattggaaaacaagtaagaagcagtttagagctagttgaagtcaaggtttgaaatcaggtcttttttttgcttataggttacttatttatcttcagtattgcttatatcatatacttttccatacatcttgtgtaagaaacattaaggaaacattatttagtatgtgtaatgatgaaaatggttgggtgttctcattatcaaaatgaaactgctaaatattctgaaaatattaatgagttaacattgctatacaggcagtaacattaggatattattgcagtatgtctaattttgctgaagcatgatttaagttttagactttaggctttttcaactgtaaatcatcttctaatgctaaagggatgccttaaggaatattacctaaactacttctgtgggcgctatgttgatgtttctagaatatccacagtcctgagaaaagaatgtaaaataattgcaaaactgtgtggtgctctctgagttgtgtgggtgggcccattcagtaaatgtgattgtctttttgaagatcactatgtgttcttaagacagcactttcccatgtctgtatagaacttggttttgaagctgtccattagactttaaagtaaattttaaaatgaaataggtaagatatacattcaactcataagaacatttctcagttggaaaagaatttgtagttacatgaaaccatagccatcccttttttcccctctgttgactgcgtaatcttgtgttattattttcagccttgtacaaatttcaaaagtcttcaaatgtcttcttaactggtctgtctgttttcacattctcacttcctcagtctgctctgttcatcattactctcatggaaggacataattacagtttttaagtaaatgaagggctatcatggaaaaagaaattgaccttattctgcttaactctagtacaggttgagtatcccttatgttaaatgcttgcaaccagaagtgtttccgatttcagattgttttggcatattaaaatatttgcattatatacttagtagttgagcctccctaatgtgaaaattcgaaatctgaaatgctctaatgaatatttcctttgggtgtcatgtcagtgctcaaaaagttctgagtgttctgaacattttggatttcagatattttgatgtgggatgctcaacctgtataaacttccatgtgcaggggttttttttgttttgttttgttttttgtagttgttattttttgagacagagtcttgctctgtcacccaggctggagtgcagtggcgcagtctcaactcattgcaatctctgcctcctgggttcaagcagttctcctgcctcagcctcgcaagtagctggattacaggcatccaccaccacatccagctaattttgtatttttagtagagacagggttttgccctgttggccaggctggtcttgaactcctgacctcaggtaatccacccaccttagcctcccaaagtgctaggatcacaggtgtgagccactgcgcctggccccatgtgcaggtttttgtgtggacataagttttctactgggtaaataccaagcatggagcataattgctatatcatgtggtaagtgtatgtttagttttgcaagaaaccaccaacccatcttcaaactggctataccattttgtattcctatcagcaatgagtgagagttcctattgctccacatccttgccagcatttgttgtcagtgttttggattttgaccattcaaataggtgtatagtggaatctgattgctttaatttccatttacctccattgtccattaatatttacaactggtaatgaaaagtttcatgttaatatgatttgtaatcctttatagtattttctttttttacctcttttggatttttttctcttataattgggcttttgtaatttttatcagactgtaactagatctgtgtttgtttatttggttttgtgaaattctgcttgggattcaatctgaagacttggatttcagaaagtttctattatgctttggttatttgctttatttcttctgcattgtctttggcctctcttctcaaaccagtattaaatggggcttagatttcctgggcatatcctctagaatcttattttctctcaggatctccatctgtttgaatttttgctagtataagagtttctttaattttctcttccagattaccatggttttttttcttttcttttcttttttttttttttttttttcaggcatggcctattttaactgttccatgctttattctctattttctgtttttatttctagctccattctctcttcctagagcttaagaatagtatatccagcttcctacttgacatcttcatatggcattctaaaaggaacatcaaatttaatatactccaagtattatcctttatttgtgccattccctgtcttctgccccactttcctgctttgcccccttcccccaaaaaactccatgtcacatgacatacaattggctgcttctaccttatcaagtctcagttcaaatatcaattcttcaatgaatgagcttttctcatatttatgttgtccaaactcaaattcactctatctcaattaccatgttttctacatagcattcatttactgatcctcttctgatcctctccacctggttattgactttcttttgggttttctactgtattgattcctgtctagtctgtatgataatttgaatatgaaagtaatgatctgtgactttttaggctaggttataaaaggcactgtggctttcatcctgctcttttggatcaccagttttagggaaatgtagctgccatatcaggaggctttcaaatacccttttgaagatgcccacacagggaagacgttgggcctaccagcagccagcactaacttaaccagacatgtggggaggcacctttgaagatcttccagccttactaaagcattcagatacctgcagcttcagctaacaactggttgaattttgtgagaatcaccaagccacaattgaacagacaagccttccttgaattcttgactcacagaaactatggaagatagtaactgtttataagttttggggtaatttgtatcagcagctacaacttacacatattttggtacctgaatgtgggctccagtttaacaaaaactgaaaatgtgggagtagctttgggactggactgttagtgaggctggaaggactatgaggagagtattagtaaaagccaaagagatcttacagtgattgctgggagaaaactgatggtctgtgaggaggaagctggtgagggcttaaagaagaaaactataaatgttattgaaaattgggtcaggcgcagtggctcatgcctggaatcccatcattttgggaagctgaggcaggtggatcatctgaggtcaggaattcgagaccagcctggccaacatagtaaaaccccgtctctactaaaaatatacaaaattagccaggtgtggtggcacatgcctgtaatcccagctacttgggaggctgaggcaggagaatcacttgaacctgggaggcagaggttgcagtgagccgagatgcaccattgcactccagcctgggcaacaagagtgaaactccatttcaaaaaaaaaaaaaaaaaagaaagaaaattagaagaaagagtatcttcattatgtaataacagaacatttaacaaaacttacctctagtaatatggaaagtagaatattgactgggacatttaactcataagatttctagccattgttgaaagtgtcactagctgctttttgctgtgtataagtaaaatttatgagaagatagataagctaaaggaagaactgttaaaaataaagcaagttaaacaaactagaaaacttagacaaactggataaatttctggatacatatatgtagcctaccaagattgaatcaggaagaaatagaaaactggaacagaccaataatgagtaacaagattgaatcagtaataaaaattctcccaacaaagaaaagtccaggactggatggcttaaatgccaaattctagcaaactttcaaacaagaactaacaccagttctcctcaaactattccaaaaaattgaagcagaggaacttctccctgattctttctatgaggcaagcattaccctgataccaaaaggagataaggacagaaccaaaaggaaaactgcaggccaatattcccaatgaacacagaggcaaaatttctcagcgaaatactagcaaaccaagtccaacagtacattaaaaagataatacaccatgattaagtgggatttatcccagggatacaagaatggctcaacatatgcaaatcaataaaatatgctacatcacatcaacagaatgaaggacaaaaaccatatgatcatctcagtagatgcagaaaaaacatttgataaaattcagtatcccttcatgatgaaaaccctcaacaaaacacgcatagaaggaaaaaacctgtattagtccattttcatgctgctgctgaagacatacctgagactgggcattttacaaaagaaagagatttagtcaacttacagttccatgtggctgggggaggcctcacaatcatggtggaaggcaaggaggagcaagtcacatcttacatcttacatggatgacagcaggcaaagagagagtgcttatgtagggaaactcccatttttaaaaccrtcttatctcgtgagacccattcactatcacaagaacagcacaggaaagacctgtccccataattcaatcacttcccaccaggttcctcccatgacatgtgggaattgtgggcgtaacaattgaagatgagatttgggtrgggacacagccaaaccatatcaatacctcaacataataaaggccacatatgacaaactcacagctaacattgtattgagtggggaaaagctgaaagccttttctctaagagctggaacaagacaagaatgcccactttcaccattcctattcaacatagtactggaagtcctagccagagtaatcaggcaagagaaagaaataaaaggcatctgaataagaaaagagaatgtcaaacggtccctcttttcagatgatgtgatcttatagctagaaaaatttgaagactccacgagaaaactcttagatctgataaaacaaattcagtaaagttagtcacaggttacaaaatcagcatacagaaaataagtgctgtttctatacaaaaataatgaactagctgagaaagaacacaagaagacaaccaaatttacaatagttaaaaaaaaaatacctaggaataagtttaaccaaggagatgaaagaccttcacaaggaaaactacaaacactgatgaaaaaaattgaagaggacacaaacaaaacaaagagcccatgctcatggattaggagaattaacgttgttaaaatgaccacactccccagagcagtctactgattsagtacaatccctgtctaaatatcaatgtcatttttcacagaaatagaaaaaagatcctaaaatgtgtaagaaaccaagtacggctcaaataccaaagtgattctgtgcaaaaagaacaaagttggaggcatcacattacctgacttcaaaatgtatcacaaggctttagtaaccagaacagcaagatattggtataaaaacagaaacacagaccaataaaacagaatggaggacccagaaacaaattcacacctttatggccaactgatttttgacaaagacaccaagaacatacattggggaaagggcaccctcttcaataaatcatgctgggaaaattgcttatctatttgcaggagaatgaaactggacccttatccctcactatatataaaaatcaactcaatatggattaaagactgaaatgtaagccccacatctgcaaaacaactagaaggaagcatagaggaaacacttcaggacattggtctaggcaaatactttatggctaagacctcagaagcacaggcaatgaaaaaaaaaaaggataagtgggactatattaatctaaaagacttctgcacagcaaaggaaacaacagagtgaagagacagcctgttgaatgggagaaaatatttataaactatttgttcaacaagattctaatatctagaatattaaaggaactcaaagcaacagtaaaaaagcaaaaatagtctcattaaaaagtcggcaaaggatatgaatagacatttctcaaaataagacatagaaatgactgatatatgtgaagatgctcaacatcagtaatcatcagagaaatgcaaaataaaactgtactaagatatccgcttaccccaattagaatggctgttattaaagagacaaaaggtaacagacgctgacaaggatgtggagaaaaaggaactcttacacaccactgctggggatataagttaatacagtcattagggaaaacagtaaggagacttctcaaaaaactaaaaatagaactaccaaatgatccagcagtcctgctactaagtgtttatttaaagaaaagaaatcagtatatcaaagagatggcagcatctcagtgtttattgcagcactattcacaatagcagtgatatggaatcaacctacctaagtgtccatcaaaggatgaatggatttttttaagtggtatatatacacggtgaaatactattttgccataaaaaaggtgaatcatgtcatttgtagcaacgtggatgggaactggaggtcattatgttaactgaaataagccagacacagagagacaactatgacatgttttcagtcctatataggagctaaaaatgttgatcttatagaggtagagagtagaatgatagttaccagaggctgggaagagtgtaggggtgtgggtgggcggatgaagagaggttgcttaaaatgtacaaaaatacagtccctagaagaaataagatttaatgttcagtagcagaaagttaataacaatgtatgtatattacaaaatagctagaacagagcacttgaaatgttcccagcacgtagaaatgataaatagtagaggtaatgaagactccagataccctgatttggtcattatacagtatagcatgtaagaaaatgtcacttttatcccataaatatgtacaaatgtttatatcaattaaaaaatttaaaaattaatagaacttaccctcaaactaaatgtagctctgatcccacattcaaaagccttaaaagcaagcctcagaaagatttgttttttagtactttaattgtcccagaggaatactcaagaatacttattgtattacaaaaaatatctttatatctggcatgcagtcaacaatttctgggcatgcaaagaatgaggaaaatatgagccacaatcagtggaaaaattaattgaaacagatccagcaatgttagaaataaaagcagtagatgaaaacattaaaatagttgttataattagatttcaaaaatacaataaggtagcaaaagggctgagtatgataagtagatacagaaaagataaaaagaaggttctactccaacttctaaaatgaaacatatgtgttatgaaatgtacattggatgggataacagattcaaatatgcagaagaaaaaattagttaattttaagacatactacaatagaaagtatcaaaatttaaacacagaaataaaagacaggaaaggatgaacagaacttcaagaggctgtggcataattataagctactaatatacgcttttggaatctcagaaggttagaatgagagaggtgctagaaaagataactgaagagataatggctgaaaatttttcaaatttgatgaaatttttaagatttataatatcacagatccaagacattcaagaaatcccaaatagaaggaatatgatgaaaactacatgaagagacatcataatcaaaatacttgaaatcagtagtaaagaagaaaattataaaagcattctgagaagaaaggcatattgtgtacagtgaaccaaagatgagaatacagtagactttgcagtagaaataatacatcaccaaggaaagtgaataataatttaaaagttttgaaagaaaaattggaattttatactcaaggaaatagctttcaaaattgaagatgaaatgaagaccttctatacagaagctaaaagaattcattacctggagaatactattataagaaatgtcaggggaagtctttaataatgtaaataatataaaacgaaattctagacctacagaaggaaatgaagagaaatagaaattatgtgggtaaatataggctacttcattttttaaaaaattatttaaaggattattaactttttaaaacaaaggacatgactgtgttgtttgagatttataatatcgagaagtaaaatttagaacaatagcatgtcggtttttatgacaacatggaagtatacttttgtaaggtgattatgctgtgcatgaagtagtagtatattacttggagacagactgaaataaattgaagaggtatgctataagacataaataaacactgaagaaaccccagcaaagagttataccaataaagagttatacaacaaggataaaacataattataaaagtactttatccaaaaaatgcaaaaaagaaaaagagcacaggggaacaaaaaatgaagagatgtatagaaaactaacagcacaatggtagctttaaacccaaacttatcaggaatttcttaaatgtaaatggtctaatgaccaatttaaaggcagagattgtcatattatatttttagaaagtaagtctcaaataggttaaaagtaacaggatagaaaaaatgtgtcacgctagcattaatcaaaagagcactagtgtggttatattgatattagacaaaataaattttaaaagtcagttttgaaaacataaagttagtaaatctttagtcagacttgtttgatataaaaagaacaaagacacaagttagaatgagaaggtgtaattacatattccacagatactttaaggattaaccaatattatgaagaactttatgccagtgaatacaacaagttagactaaatggttaaattttatggaagacagtgctatgaaaaattaccaaagttcactcaagaaaaaattgtttatgtgtatacatgaagatgagtttagatttaagatcctcttaaaaagaaaattgtttgtttcactggtgaatcttagcattagatggagaaataataccaactcaacatatactctttcagaacatagaagatggtatacttctcaactacttttatgaagccaatgttgctatgatagtataatttttaaaaggcattaaaatacaaactatcacaaaccaatattcctcatgaatgtaaatacagaagtccaaattggattataaatccaatagccaggtgacatttattgtttgaatgtatggttgatttaatgtttatgaatcaacccatggaatttttcttactgataggattaaggtaaaagtcatttgttcttctcaatagatgtagatttttttaaaaaagctctcaggaaacttgaaatagaagggaatttcctcaatgagataaataggatcttagtgaagcctgcaactaataacattcttaatggtgaaagacctaatgcttttctcttggtattaagaacaatgcaaatatctctaccctcaccacttccattcaagattgtaccagaggccatagctaattcactgagacagtaataactaattgaaagcccatagaatgaaaaggaggaagtaaaactctttattcacaggcaatatggtcatttatacacagatgaccatgaagaaaatcctaaagtatctacaaaagatgctacttgaactgataactgagtccaatcatgttatagaagatgaagttgtccaatcatgttacagaagatgaagttgatgtgcagaaatcagagtgtatatactatcaacattaataattgaaaattcagattgaaaataacattgatgacagcatccaaaatattaaatacttaaaggtaaatctaacaatatattgcagacttccacacttaaaacaacaaaatattgctgacagaacacaaagacaatttaaatgagggaagaagtagaccatgttcaatgtattataatattcaatattgttaagatttcaactttccctaaattagtctgtagattaaacataaccctagtaaaaattttagaagattattttgtagatgttattgttaaaaaaaatttcggaggactttccctgcctgaaagcatcactaatcaaggcaatctggttgaggtataagaatagtaatatagattaatggatcagaatagaactttgcagtgcagacctgcgcagatatgaagaattgatttttttttataaaggtaccaaggtaattccgtggaggaaattatagttaactcaaaaaatggggctgaaaaaattaaatagtctcattgaaaacaaaatacaaaccaaaaaatgccttgaccttcatctcacagtatatataaaaattaacttagaactgatcacaaccctaattgcagcagctagaacactaagatttctagaaaacaggcaaaaatctgtaattttagatttagtgaaataactcaggaatagaaaatcaaataccttatattctcatatataaattggagctagacatgggtatccatggacatacagagggaaacgctgtaggtaatatacactggggactctaaaagaggagaactggaggaggatgaatgttgaaaaattatctgttgggcacaatgttcattgttaaggtgatgagtatgctagaagctcaaaccccactactaygcaatatatccatgtaacaaatctgcatatataccctctaaatgaatgaaaaaaaatttttaatgcaatataacaatttaaaaatttttttagggcacaaaagcaaaaagtgtaagaggaaataatgataaactgcgtcaaaatttaaaacatttgttacaaaatacccttaagaaaatggaaaaacaagccacttaagaaaatggaaaaacaagccacagaatgaatatctgtaaaacaattttctgataaagaactcttgtaattcaataagattattataacaactatataatggagtttttaaatgtgcaagtcctattaaaatgtacaaatcacttaaagagacagttcatcaaagtagatataccattaaacatgaaatgctgcttaacattattagttattaggggcaggtaaattaaatccacaatgaggttctactgtacacctgctaaaaaggctgaaattaaaaagactgataccactatgcattgataagcatatggactgaggttcacatttatttgctgatcggaatgcaaaatagcacaaccactttgcagaacagtctggtagggttttccaaagttaggcatacacttataccagctagcaattccgcacctcggtatttactcaagaacaataaaaacatatatttatataaagactcatatttgcatattcatagcagctttttcataataactaaaaactggaaacaactcaagtgttctttaactgataaatggatatacaaattgtattatatcccatataatgaaatatttcccagtgatatgaaggaacaaactaccaatcctttcaataccatgtatgactctcaaaaccattatactgagtaaaagaagccagatgccaatagcctgtgtactgtttgaatacatttgtataaaattctggaaaatacaaaactgtgctaatagcagatctatgattgctcagaatcacgaagggagggaattgtctgcaaacaagaaggaaggaccatttctgaggtgatgaaaatgttctatattgtgattactgtatttcttacacaactatgtatacatttatcgaaactcctcagattatacaacttaaatttgatcaattttaatgtatatagattgaactcagtaaaactgaattttaaaatgtgagataatagctatcgttaacttaaaaagcaccatacgaattgattattgttgatagtgatagtgatgtgaaaaggactgtgtctctttaacaaaggcagatgtaatcaatgtgaatttcattagcaatctctagattttatggttctgtgtacttttacttttaaaatattattattgactttttaccagaaaatattttctgtacaatttcttgcatctaatttttttatcaaacatgaatttgcaacataatttttgaaaactcatgtttcttgagtctacagctataaacaggaccttgcctgtcttgttgaccactggcatagttggtgtacctattgttgtgtaacatattactataaaattcagtgacctgaaacaactaacttttattacctcatggtttctgtgatccgcttcccagcgaactcatttgggcccctctgccaggcctctcacaacatgaaaactggcttctccaaaaagtcatacaagagagtgcccaagatgcaatctgccatctttttgtaacctaaaatctgaaatgacatcccgtcagctctgtattttatttgataaaagtgagttaatatgtccagcctacatgcaaggatagataattacattcagacttaaataaaaggagtcaaggatcacttgggtctatgttagaggcagcctatcatagtacggatcaataactagttggatggatggatggatggatggatggatggatggatggatgtggagggatggtcagtcaggcagacagatgatgggcaaatagattaatgctataccacaatataatttaatttatgttgcatacccaacttaatcctgaaaaacttgagactatttaggaaagattgaccaggatggtgagaggtataactattttccttctatatataaaagttaaaatattctataaccctttgcctttaaaaaaaaaaaaacttaaaagacatggtaataattataaagcatttgaaaaagtgaactctggaaaaaggattagatttttttttaactccagacaatcattctagtactgtcagcaatttggcaaaatttgatataagacagagattttgtttcaatttgaagaaattttcaatgatttatatgtttgctcttcagtgtcattcacattaaactttaaatgctttcaagaaactatctgctacccatgatcaataactatgcattcatttcacttttatccctagcatatgggtttaataactttgacagggaaccatataacttctgatggtcataattttctaggaattataacaatagaaaataattaatctgagggtcttaaatatttatcttttttggaaaaggttaaaatacataaaagaaaatataggctgggatcatggccgacaggaggcaggactagattgcagctctgacttggacagacagagcaggatgtgtaggctctcatcatgaattttagctccataacgactgcaggaataatcagaaaacccgagaggacccacagaccctctgaaagaagcagatttctcctgcaggacccaggagacaccccaaatattttgctagtatccatggctgagagacccatagatggttcacatcacaggactctgtgcacacaacccccagtaccagcccggagcctggtggatttgctgggtggctagatccagaagagagataacagtaactacaacttcactgttaggaagccatatccacaggaaaagggggagagtactacatcaagggagcacccatggcacaaaagaatctgaacaacagccttcagccttagacctttcctctgacagaggctacccaaatgagaaggaaccagaaaaccaactctggtaatatgacaaaacaaggctgtttaacaccgcccctcccccccagaaaaaaaatcacagtagctcaccaacagtggatccaaaccaagaagaaatccctgatttacctgcaaaagaattcatattagttattaagctaatcaggaaggcaccagagaaaggcaaagcctaatgcaaggaaatccaaaaaaaaaacaatacacgaagtgaagggagaaacattcaatgaaatagatagtataaataaaaaaaccccaaaacttcacaaaacactggacacacttatagaaatgcaaaatgctctgggaaatctcagcaatagaattgaacaagtagaagaaattcagagcttgaagataagatcttcgaattaacccaatccaacaaagacaaagaaaaaagaatatgaaaatatgaacaaagcctccaagaagtctgggattatgttaatccaccaaacctaagaataatcagcgttcctgaggaagaagacaaatctaaacgtttggacaacatatttggggaaataattgaggaaaacttcccaggccttgctagagacctagacatcaaaatacaagaaacagaaagaacacctgggaaattcattgcaaaaagattatcacccaggcgcattgtcatcaggttaactaaagttaagatgaaggaaagaatcttaagagctgtgagacaaaagtaccaggtaacctgtaaggcaaaacctatcagattaatggcagacttctcagcagaaaccctacaagctagaagggattggggcccaatcttgagcctcctcaaacaaaacaatgatcacccaagaattttgtatctagtgaaactaagcatcaaatatgaaggaaagatacagtctttttcagacaaacaaatgccaagagaattcaccactaacaagccaccactacaagaactgctaaaagaagctctaaatcttgaaacaaatcatggaaacgcatcaaaacaaaatgtcattaaagcataaatctcacaggaccaacaaaacaaaaatacaagttaacaaacaaacaaaaaccagggtacacaggcaacaaatagcatgacgtatggaatggtacctcacacatctcaatactaacattgaatgtaaatggcctaaatgctccactttaaagaaacagaacagcagaatgggtaagaattcaccaaccaactatctgctgccttcaagagactcacctaacacataaagactcacataaacttaaagaagcagaaaaaggcatttcatgcaaatggacaccaaaagygaggagtagctattcttayaaaagacaaaactttaaagcaacagcaattaaaaaaaagacaaagagggacattatataatggtaaaaggctttgtccaacaggaaaatatcacaatcctaaacatatttgggagctgcacacctaaaagaggagctcccaaatttataaaacaattactgctagacctaagaaatgagatagacaacaacacagtaatagtgggggacttcagtactccactgacagcactagacaggtcatcaagactgaaagtcaacaaagaaacaatggatttaaactataccttggaacaaatagacttaacagatatatacagaacattccatccaaagccacagaatatacattctattcaacagtgcatggaactttctccaagatagaccatgtgatagaccacaaaatgagcctcaataaatttaagaaaattgaaattatgtcaagcactctttctgaccacagtgtaataaagctggaaatcaactccaatataaaccttcaaaaccatgcaaatacatggaaattaaataacctgctcctgaatgatcattgggtcaaaaatgaaatcaagatgaaaacttaaaaattcttcaaactgaatgacagcagtgacacaacttatcaaaacctcagggatacagcaaatgtggtgctaagaggaaagttcatggccctaaacacctacatcaaaaagactgaaagagcacaaactgatcatctaaggtcacacctcagggaactagagaaacaagaacaaaccaaacccaaacccagaaaaagaagggaaataaccaagatcagagcagaactaaatgaaattgaaagaaaaaaaatacaaaagataaatgaaaagttggttttttgaaaagataaataaaattgatagaccattagcaacattaaccaagaaaagaagagagaaaatccaaataacctcaataagaaacaaaacgggagctattataactgacaccacagaaatacaaaagatcattcaaggctactatgaataactttatgtgcatacactagaaaacctagaagagatggataaattctttgtaagatacaaccctcctagcttaaatcaggaagaattagataccctgaacactccaataacaagtagtgagattgaaatggtaatttaaaaattaccaacaaagaaatgtccaggaccagagagattcacagcagaattctatcagacattcaaagaagaattggtaccaatcctattgacacaattccagatagagaaagagggaaccctccctaaatcattctatgaagccggcatcaccctaatatcaagaccagaaaaggacataaccaaaaaagaaactgaagaccaatatctctaatgaacacagatgccaaaatccttaacaaaatactagttatccaaatccaacagcatatcaaaaagccaatccaccatgatcaagtgggtttcatactagggatgcagggatggcttaacatacataagtgaatagatgtgatacactacataaacagaattaaaaacaaaaattacaagatcatctcaatagatgcagaaaaagcattcaacagacttcagcattcctttataattaaaactcacagtaacattggcatgcaagggacatacctcaatgtagtaaaagccatctatgacaaacccacagccatcataatactcaatggtgaaaagttgaaagcattccctctgagaactggaacaagacaaggatgcccactctcaccactccccttcaacatagtactggaagtcctagccagggcaatcagagaggagaaataaagggcatccaaatccataaagaggaagtcagaagtgtcactgtttgctgatgatatgatcatttacttcaaaaaccctaaagactcctccagaaaactcctagaactgataaaagaattcagcaaagtttctggatacaaaattaatatacacaaatcactatctcttctatataccagtagcaacaaagtggagtatcaaatcaagaactcaaccccttttacaatagctgcaaaaaaaaaaaaaaaaaatacgtaggaatatacctaaccaagaaggggaaagacctctacaaggaaaactacaaaacctgctgaaagaaatcatagatgacacaaacaaatggaaacacgtcccgtgctcattgataggtagaatcaatattgtgaaaatgaccatactgacaaaagcaatctccaaatgcaatgcaattcccatcaaaataccaccatcattcttcacagaattaggaaaaaacaattctaaaattcatatggaaccaaaaaagcctgtatagccaaagcaagactaagcaaaaagaacaaatctggagccatcacattacctgacttcaaactatactataaggccatagtcaccaaaacagcatggtactggtataaaaataggcatatagaccaatggaacagaatagagaacccaggaataaacccaaatacttacagcctactgattttcgacaaagcaaacaaaaccataaaatggggaatggacaccctttttaacaaatggtgctgggatacagattggctagctacctgtaggagaatgaaactggatcctcatctctcaccttatataaaaatcaactcaagatggattaaggactttaagagccaaaagtataagaattctagaaaataacattggaaaaacccttctagacattggcttaggcagttttgggtttcatgaccaagaacccaaaagcaaatgcaataaaaacgaagataaatagctgtgacttaattaaactaaagagattttgcacagccaaagtcacagtcagcagagtaaacagacaacccacagagtgggagaaaatctttgccatctacacatctgacataggactaatatccagaatctacgacaatctcaaacaaatcagcaagaaaaaaaatcccatcaaaaagtgggctaaggacatacacagttctcaaaacaaaagaagatatacaaatggccaaaaaacatgaaaaaatgctcaacatcactaataatcggggaaatgcaaatcaaaaccacagtgtgataccaccttactcctgcaagaattgggcataatcaaaaaataaaaaaactgatgttgactgacatggatgcagtgatcatggaacacttctacactgctggtgggaatgtaaactagtacaaccactatggaaaacagtgtggagagttcttaaaggcctaaaagtagaactaccatgtgatccagcaatcccactactggatatctacccagaggaaaagaagtcattacatgataaagatacttgcacacacacttttatagcaacacagttcacaactgcaacatcatggagccaacgcaaatgcccatcaatcaaagagtcgatatagaaactgtgatatatatatagatatatctatctatatatatagaatatatatagaatatatagagaaaatatatagaatatatatagtatatagagaatatatatagaatatatagggagaatatatattccatcatatatatagaatagagagaatatatatagaatatatatatagaatatatagaatatatatagtatatatagaatatgtatggaatatatagagagaatagagagaatatatatattccatcatatatatagaatatagagaatatatatattccatcatatatatagaatatatatagagaatatatatattccatcatatatatagaatatatatagagaatatatatattccatcatatatatatagaatatagagagagaatatatatagaatatatatatattccatcacatatatatagaatatatatattctgtcacacatatatattccatcacatatatatagaatatatatattccgtcacatatatatagaatatatatatattccgtcacatatatatagaatatatatatattccgtcacatatatatagaatatatatatattccgtcacatatatatagaatatatatatattccgtcacatatatatagaatatatatatattccatcatatatatatacatatatgatagaatactactcaaccatataaaggaatgaattaatggcattcacggcaacctcgatgagattggagactattatactaagtgaagtaactcagaaacagaaaaaccaaacattgtatgttctcactgatatgtgggggctaagctatgaggatgtaaaggcataagaatgatacaatggactctggggacttgggaaggttggggtggcaagggataaaagactacaaatagggtgcagtgtatactgctgggtgatgggtgcaccaaaatctcacaaatcactaaaggacttactcatgtaaccaaacaccacctgtaccccaataaactgaaaaataaaaaaataaaaatgtatatataggctaggtgcagtgactcacacctgtaatcccaacacttgggagccaaggcaagagggttgcttgagacaggagttcaaggctgcagtgagcaatgatggcaccactgcactccagcctgggcaacagaatgagaccctgtctcaaaataaaataaaatataaatgaatgacacatgagttttttaatagatatgcacgtttatatttggatatacacctggatgtgtaatttctatacatggaagcttttgtttcttttatatttacttaagatcatttccatttgaaatgcaataaacctcaaaatgtttttactttatttatatcatttcattgtttttgttgccactatagtacaaggggcaattgagaatttcactttttattagagcttttagttttgtgattttgaataataaagtgttatatgcagtggagggcagtgagggaatcttcatattcatggaaatcatccaccattgtggattttgtacttattcctaagactaccgcttgccctaagatgagagaagcaactactatggattttggatcatggatgttagatctccttaatgttgaatatatcagaatggccaacaaccactgttgagagaaagagtaaaaccagcaaggatttcaaaaaaactaattaaatgtgattttgccttgatgaggcattttctggtgtcactatatacagattaacattttgcaaactacctttttaatgttcatatacattaatatttaaacctaagacatcaaggctaactactaagcagagaaatgttgttcctggaagggatgtagtatttttggaaaatatcttaagtttatgcctgttaaatagtgtgtagttcttgaagtagcatgtgttaggcaatttttttttttaagaattcaactttttgtttacaatgaaatatagcatagaaaaatactctttcttttttttttgagacagggtctctctctgttacccaggctagagtgcagtggtgcaatctcggcttactgcagcctctgcctcccaggttcaagtgattctcctgcgtcaccctcccaagtagctgggattacaggcactcaccaccacgcctggctaatttttttgtatttttagtaaagatggggtttcaccatgtttgccaggctggtctcaaactcctggcctcaggtgatctgcccaccttggcctcccaaagtgctgggattacaggcatgagtcacccttcctggcaaaaatattcttttttttttttttttttttgagacagagtcttgctctgttgcccaggctggagtgcagtggcacaatcttggctcactgcaacctctgcctcccgggttcaagtgattctcctgcctcagcctcccgagtaggtgggactataggcgcccaccaccacacatggcttttttgtatttttagtagagacggggtttcaccatgttggccaggatggtctcgatctcttgacttcgtggtccacccgcctcgggctcccaaagtgctgagattacaggcgtgagccacagcgcccagccaaaaatattcttataattagtattgggttagataggaaattcatttcaaagaactaatgcctataattaaatttaaatatttcagatccagctttctttattttaaaaattttttattttattctattttattttatttttaaatggagtctcaccatgtcacccaggctggagtgcagtggccagatccagctttcaaaagcaatcatcttcatagatgaatttttaaattttttaatgttaagtatgtagtaaggtatattaatctagctctcaatatagaaaggaaaaatatgtaagaatatgcagttacaaataaggagcaagagtttggttgtctaggacttttaactcttaactactgtcagcaaactagtgaaagtggctggagttaaatttaccactacatgctcatcgaaatcaagttaaatattaaaaagctatcaaattcagagaaaagccatttaatataatcaaacagaaacaattaggcactgtgcttttctaaaacactctaggatcttgtgacccatagttcacgagggtattccaatattcaagtataagttgtgtgcatctgtttttattttttagagatatatgtttcaggtattaaatgtacatacaataaatatttgtttgaatgaaattatttgttatataagaactggtaactatatcctggtgtagctttttcatttaaaaaaattatttcattttatttatttatttatgtcagtagttttgggggaacaggtggtgtttggttgcatgaaaaagttctttagtagtgatttctgagattttggtgcacccatcacccaagcagtgtacactgttcccaatgtgtagtctgttatccctcatcccactcccacctttcctcccaagtccccatagtcccttataacgtttttatgcctttgcatcttcatagcttagctcccacatataagtgagaacatatgatgtttggtttttcattactgagttactttacttagaataatggtgtccaactccatccaggttgctgcaaatgtcattattttcttcctttttatagctcagtagtattccatgctgtatatatatgtaccagcttttctttatccactcattgatagatggcatttagggtgttctatctttttgcagttgagaattctgctgcaataaacgtgagtgtgtgggtgtctttttcatataatgactttcttttgtctgtgtagctacctggtagttaaattgctaggtcaaatagtagttctacttttaagtttttttttttttaatttatttatttttattatactttaagttttagggtacatgtgcacattgtgcaggttagttactccatactgttttccattgtggttatactagattacattcccaccagccgtgtaaaagtgttcccttttcaccacatccatgccaacatctatgttttttgtcttttaattatggccattctttcaggagtaaggtggtatcacactgtggtttcggtttgcatttccctgatcattagtgatgttgagcattttttcatacatttgttagccacttatatatatcttctttgagaactgtctattcatgtccctagcccacttttttatgggattttttttttgtcttactgattggcattctctatagattctgggtattagtcctgtgtcggatgtatagatggcaaagattttctcccactcttggggttttctgtttactctgctgaaaacattctttgctgtgcagaagctttttagtttaattaggtcccatctatttacctttgtttttgttgcatttgcttttggattcttggtcatgaactctttgcctaagccaatgtctagaagagttttttccagtgttatctagaatttttatggtttcagatcttagatttaagtctttgatccatcttgaattgatttttgtataaggtgagaggtgaggatgcagtttcattcttctacatgtggctttccaattaccccaacaccttttgttgaatagggtatcctttccccacttcatgtttttgtttgctttgtcaaacatcagttggctgtaaatatttggstttatttctgggttctctattctgttccttttttctacatgcctatttttataccagtaccatgctgttttggtatagccatgtagtataatttgaagtcaggtaatgtgatgcctccagatttgttctttttgcttattcttgctttggctatgcaggctctttttttgttccatagaaatttttaggattttttttttctagttctgtgaagaatgatgatagtgttttgataggaattgcattgaatttgtagattgcttttggcagtgtggtcattttcacaatattgattctaccaatccgtgagcatgggatatgtttccattcatttgtgccatctatgatttccttcagcaacgttttgtagttttccttgtagagatctttcgaaactccctaaatatttttttaggagggtgaggagctgttgtaaaaaaggttgagttcttgatttgattctcagcttggtcgatattggtgtacagcagtgctactgatttgtgtacattcattttgcatcctgaaatcttactgaacttatttgtcagatccaggagctttttgaatgagtatttagtgttttctaggtaaacgatcatatcatctgcaaacagcgacagtttgacttcctctttaccaatttggataccctttatttatttcttttgtctgattgctatggctagaacttttcagtactatgttgaatagaagtggtcaaagtgggcatctttttcttgttctagttctcaggaggaatgctttcaacttttccccattcagtgtaatgttgtctgtgggtttgtcatagatggcttttattaccttaaggtatggctcttttatgccaattttgctgagggttttaattgtaaagggatgctggattttgtcagtgcttttcctgcatctgttgattatatgattttgtttttaattctgtttatgtggtgtgtctcatttattgacttgtatatattaaatcatccctgcatctctgatttgaagctcacttgatcatggtggattatctttttgatatgctgttggatttggtttactagtattttattgaggatttttgcatctatgttcatcaggaatgttggtctgtagttttctttttttgttctgtcctttcctggttctggtattagggtgatactggctttatatgatgatttagggaggattcccttcttctctgtcttttggactagtttcagaaaggttggtaccaattattctttaaacacctgacagaattcatctgtgaatccttctggtcctggacttttgttgtagttgttggcagtttttaaaattactatttcaatcttattactcattattgatctgatcagagttttcatttcttcctgatttaatctaggagggttgtatattttcaggaatttatccatttcctctagattttctagattcatgcataaaggtgtttatagtagccttgaatgatcttttgtatttctgtggtattggttgcagtatctcccatttcatttctaattgagcttattcggatattttctcttcttggttagttgcactaatggtctatcaattttgttcatcttttcaaaaacccagctttttatttcattgattttttgtattttttgttgtttgtttcaatttcatttagttctgctctaatgttggttcttttcttctgctgggtttggattttgttctttctctagttccttgagttgtgtccttagattgtctgtttgtgctctgttggactttttgatgtaggcagttaatgctatgaactttcctcctagcactgcttttgctgtgtcctagaagttttaatatgttgtgtcactattattgtttagttcaaagaatgtttaaatttctatcttgatttcattgttgacccaaagatcattcaggaccagattattttatttgcctgtatttgtttagttttgagggttttttttgagtcgatttccagttttattcccctgtggtctgagagggcactggatataattttgattttccttaatttattgagacttgtttaatttattaatttattggtctatcttcgagaattttccatgtgctgatgaaaaaaatgtatactctgcagttgttgggtagaatgttctctaaatatctgttaagtccatttgaagtccattattttgttgactttctctcttaatgacctgtctagtgctgtcaggtgagtattgaagtcccctattattgggttgccatctatctcatttcttatatctagtaataattgttttataaatttaggagtgctgcgttaggtacatacatatttaggattgtgatattttcctgttggactagtcctttcatcattgtatgatttccctctttgtcttttttaactgttgttgctttaaagtctgttttgtctgatataagaatggctattcctgattgcttttcgtttccatttacatgaaatatctttttccacccctttaccttaagtttatgtgaatccttatgccttaggtaagtctcttgaagatagcatatacttggttggtggatttttaatccattctaccattctgtatcttttaagtggagcctttaggtcatttacactcagtgttagtattgggatgtgaggtactattttattcatcacactagttattgcctgaatactttgtttgtttgtttgtttttgtttgtgtgtgtgtgtgtgtctgtgttgtgttttgttttttttttttttttgagacagaatctcactctgttgcctaggctggagtgcagtggtgcaatctcggctcactgtaacctctgcctcctgggttcaagtgattctacttcctcagcctcctgagtagctgggattacaggcacctgccactgcacctggataatttttgtagttttagtagagatagggttttaccatcttggccaggctggtcttgaattcctgacatagtgatccatctgcctcagcctcccaaagaatactttgttttttcttcattgtgttattgttttataggccccatgagatttatgcttcaaggaggttcaattttggtgcatttcaagggtttgtttcaagattcttgtagtgctggtgtggtggtgatgaattctctcagcatttatttctttgaaaaatcctttatctctccattttgaagcttagttttgctggatacagagttcttggtttgtaagtattttgtttgaggatgctaaagttaggaccctaatcccttttggcttgtagggtttctgctgagaaatctgctgttaatctggtaggttttcctttatgttaccactttatgttcctttaggttaccgcttgcttttgcctcgcagctcttaagattctttccttagataacctgatggctacgtgcctgggtgatgatctttttgctggtggtcatctttttgtgatttatttcccaggtgttctttgagcctcattgtatttggatcctcttcctcctcaggaacaccagttattcttaggtttggctgtttaacataatcctaaattttttggagggtttgtttattctttttttttttttttttttttgagacggagtctcgctctgtcgcccaggctggagtgcagtggcgggatctcggctcactgcaagctccgcctcccgggttcacgccattctcctgcctcagcctcccaagtagctgggactacaggcgcccgccactacgcccggctaattttttgtatttttagtagagacggggtttcaccattttagccgggatggtctcgatctcctgacctcgtgatccgcctgcctcggcctcccaaagtgctgggattacaggcgtgagccaccgcgcccggccgggtttgtttattctttaaaaattatttgtctttttctgattgggttaaagaccttgactttgagctctgaagttctttcttctactcattcaattttattgtcgaaattttccagtgcctttttttatttctctaagtgtgtacttcatttccagaagttgtaattgtttttctttatggtatctgtttttctggagcatttttcatccatatactgtattttttccttaatttctttaagctggttttcatctttctctggtatctacttgagtagtttagtaatcaaccttctgaattctttatctggcaaatcagagatttcttcttggtttggatcccttgcgcatgttatagaatcttgttttgccacattaccagaattacttttccgattccttctcatttgagcaacctgtttcagtggaaaaatatggaactcaagggctgctgttcagattcttttgtcccatgggtgatcccttgatgtggtacatttcttctttccctagggatgggacttcctgcaagccagacttcagtgactgttattgctcctctgggtttagacacctagcagggttactaggctctgtgttagtgctgggaaatgtctgtaaagaatcctgtgatgtgatccttcttcaggtctcccagccatggataccagtacctgctctggtggagttggcagggctgtgaaatagactgtgtgagagtccttggttttagacacgttgaggatgctggctttcttgaatgctggttatgccagcagtaaagttgtcacgtggacacactgagaaccactggtttgctgggattttgcaggcagtgaaattagctgttgtcttctccctccttggaacaggattgttctgtcatgagttgctgtaatgtcctaagttggtcggcctccatccaggaggtggcgctttcaagagagccccagagtttttggcctgtctttcagaacttgcagtggcttgccacttctttcaaagcatctgtgaattcttttagttttcctggtacattcctgtggtggttcctggattaaaagtccacattgtgagtccccacacattgttctgtctgtccaagtgggagctgcatgtcagccctgtctcctgtctgccatcttgactccacaatcagctttttcatttttactgaaacttaattccacattgagagtttttaaatttcagcattgaataagtgccatttttgactagtatataaattttattaaaacaactacatctgaaaaataaggaattcataaattatcatttttataacctctcgtcatttacatggaacatgtagaatctttatgacttcaatttagtaaattgtaaatacagtttaattgttgtttaacttgtatttgacagcttaccaaataaactaatgaaatgaatcccacgtaatctagatacctacactccaaagaacagtacatggatatttcttggcctgataataaatgaaaagaaaggaataactgatgtatctgccttgacttattgtatctcaacatgaaggggagagagggcagttcttagtgaaataatgcacattaaaacaagataaaaaattttaattgacataatgattgcatatattgaagtggtacataattatgttttgatttataatgtatagtgatcatatcatggtaattagcatatctatgatctcaaacattatcatttctttatgttgggaacattcaatgtcctcctagctatttgaaactctgtaatatattattgttaactagagtcatcccacaacggtatagaacactagtatttattccttctatatagtggtaattttgtccaaggtaattttgtttaacacaataaaaaaccatgctaaaaacataaaccttaattgtagattttagttttggtattgtattatttggcgatgataagcttagaaaaaatacttaatttttaatttaattcattagattttgtttctgttaatttattctttatagctaaaagataaaaagatcacactattttactatcacacattatttttgtttgttgaagcaaagaaaaaaatttagaatgtgacaagagaaaatattattaatcttaaagaaaatttaagttttaaaacaggctgattcaacacatgttgtcagttcagtttcagacaatgtataagatatgaatcatagttgtgcagaaatatcaattgatttggtcacacatatttaggactgattattgctgactattgttatatttttgaaggttttaaaaattcaattaaagtgattatatagatttatactttaatatttcagtggcaacagaaattttggttttcagagcacatctgagattaaagattttatccttttcctatggttgactcataaaaaatcaactctattttcaatactgtgatcaaataaaagggaattgggacagtgtgtagagtaagtacttttttttcatcatttcatcgtgtttattacctgctctcagattgcccagcaaagatattgtaacagtgtgcgttgtaatcaataagtaatgtataaatatgcagtttcaccatggcctcagcactattaaattttattattttaatttattattttattattaactggatagataggaaatggcatctctattttcttttcaatttaatgttctttgcttactagtgaaaagatgatacatgatctattgatgttgccaccaaagtttcagaacagtctataggaggtacttttaaatgcatttggccttgtctagattaaaacaacagcttacatttattaaacactcactaagcaccagatacttagtttttttaaggattatataatatttgttctggttagtatactcattttacaactgtggaaacaaaggcttagaaatattaatacatccaaggtcacagaatcagtaggtggtatttatagtttggtggatttgtcccatcaaagttggttttcccttttacttaccattttaactcctaagttgtactatcatagcatacccatactctgaattcataactgaaataataaccttactttaaattttacattttctgctgaattctctttatgctagttgcatatataatcttacaggacatatttataaagacagcttaaaatagaccagacacttaagaacgtataggaaggtaatttgaatgttacagatttttcaatatgggagattttatcagtttcatcataataacaatagtgcattcaaattctttcatgtatgtaccacatcttattcttttatcactccttcagacacatgaggttatatactgatctccacatgaggaaaatgaggcaggggactgttgtttggttccacttctgtgtgctttccatctggatcgtacttatcaggatgacattctattattgcaaatctgtgctttaaatttattggattacaaagctttaaagatgtgtggatctgggtgctataacactgctcaaaatagctgcctgaatgaagagatatatgtactttaacattacacttttaaaagtgagtatatttcatgagatgaattgtctgtcttatgcgcaattataaatcatttctatttcataagactgtagagtgattttgaatacaaagcaatattggacaaatagcaaattatgttaaattgtagggcaaattgagaaagcgaagctgtgattttgagcaactgtgccttcatgatttaaaatgcaactttcttatgcagtatggaacaattcttatttcctctcaaacttctattataaatgcatttattctttttaattttagcttcacagataattctggtttggaattagggatctttttttgaggataggaagaaatttgcaaattatatttgagttttgatttattgtgataattgactaatttattatataacctgttataatctgaactatttaaaaataattttctgctttaaaatctctcacagggtctttcttaagacactttcattcacctctggaaatagcagcagtagtttctaatctttggctagcagataatttctaaaatcatttttctttctccccgaattgtagtttgagtagcacttgtctttcagagaaaatgaactttattcctattagaaaaactgttaaactaaaagatctgacaacaacattcttgaataagtttaaagaatttatggcttaaattaatctgaattctaatttaccttttaccttgagcttggctgctgttttcaatttatatgcattttatacattaactgctaccctcaatytcctgtcaactttgtagtaagtgatactctgtcaaatgctactctatgatgcatttaaataaagataaaaggtcaatctaggcttttctaaagttaccattctaggatataagcttctgaattgctttgtatttgtatcattagacgtaatttctgacatttaaaaatttaccaaaaatgtaatgaattcaaggtagtcattatatgtctatggattctttaagcatgttaaagactttatgtatctttaaccataaaaaacataatattgctaaataaaattattctgtgtatctctaggcagtctagaactcatattctagaattctagatcagcagtgaacaaagtgaggatgtctactcttaccccttctttttaatatatgttggaagttttagccagggcattaaggcagtaaatacatagacaaataaatagacagataggaaaggaagaagtaaaatatgtatttcttcatagtagatgtgatattatatatcaaatgattctaggaaatctgcaaaggtactaggattaataaatgactttagcaaggtcgcagaatacaaggccagtattcaaagatcaattatatgtctatactttaaaaacaaataaccagaaacagaaatttaaaagccagtatcacttacaataccaaaaaaaaaaaaaaaatgaaatacttagaggtaaatttaacaaacattttttaagacctatatactgaaaaccatagtatattattgagagaaagtaaaaatctgaatgaatatagagatacaccatgttcagggatcagataagtcaattttgctaagatgtcagttctccacaaattaatttagaattcaaagcaattctaaattaaacccaatgggctttattttagaaattgacaagctgattttaaaatttatatggaattgcagaggaaaaacaattgatacagagttagaaaactcacaccacctaaatatttattatatagtaatcagagaagtgtgttattagcatatgatgttgaaacaattcattatccatttagaaatacaaaaggaaactccacccttaccacacatcatacatggaaatcaatttacaagatatcatagacctaatataaaagcaaaacataaacactttaaggagaaaaataggagaaaatcttagcaatcttaaatcaggcagaggctttttagataggaagcaaaagccatcagtttttttttttttttcttgagacagggtcttgctttgtcacccagtctggagggcattggtgcaatcatggctcactgcagccttgacctcctggggtcaagcagtctccccacttcagcctctcaagtagctaaaactacaggtgcatgccaccacacctggcttttttttttttttttaagggacgggtctcattgtgttacttaggctgatcttgaactcctgggctcaaacattcttcccaccttggcctcccgaagtgctggggttacaggcatgagccaccgtgtccagcatgaatatttataacaaagtgataaattagacttccttgagagatacaatttaaaaaatgaaaaagcaagccacagactaggacgagttaataaataaattaaatgcataaacacctacatgtatattgtgtatgtttgtatatgtatattgaacatacatggacaaggatatgtgtcaagaatatataaagggccaggtgcagtggctcatgcctgtaatcccagcactttggggggccaaagtgagaggatcacttgaggccaagagttcaagaacagcctgggcaaaacaatgagatgtcatctctacgaaaaattataaaatgagctttgccaggcatggggcacatgcttgttagctactcagaaggctgaggcaggagaattgcttgagcccaggagttctaggatacaatgagctgtgatcatgccactgcactccagcatgggtgacagagcaagactctgttttaaaaataaaatacacacatacgtgtgtgtgtgtgtgtgtgtgtgtatgtgtatttttgtctataaagaacaattataactcaataatagaaagacaacccaattttcagtaatgggtaaaacagttgaaaagatatttcactgcagaagatatgtgaatggtcagtaagtgcatgaaaagataatatcatcagtcatcagggcaatggaaattaaaaacattatgaaataccacaagatacctactagaatggccaaaatttttaaagacagtactaagtgttgatgaggatgcaaagcaactacagcttttatgcattgctagtgggaatatgaaatgatactattactttgaaaaacaatttgacaatttctttataagttaattatacatttaccatatgacttatcaattccattatttgtctaaaggaaatgaaaacttatgttcacataaagacttgttcacaaatgtttatagtaactttctttataatatcaacccaaatgcctatcagtagaaaaatagataatccaaatgtggtatattgaatacaatggaaaactatttagtgataaaaaagagcaaataactgatacttacagcaacatggataaacctccaaatcattgtggtgagcaaaacaagctagatactctaaaattccatttttatagaattctagaaaagattaatataggcccaggatgaagatgacttactggaaaggattataaggaaatagtttgggttgatggaaatgttctgtatcttcattggtgtggtaattacacgtttacatatgtatcacagttattgaactgtacatttaaaattcatgtattttattgtgtgtaaattgtacctgaataaagatgaaaaaggtagtatttataaattctattaataattgatttccaaaggaaaataacacaaaagataagtgaacacttaaagataatttcaaagtaaatcttgcttgaaactatataaaagtatttattaaaaggcaattaattactaacatccaagtgtgaaaattttgacctttagtgtattgtgcagaaaaattgtggtatatttcatttaaaattgatcaaagacagcaacatacattaatcagaggaaagcatcaattaaatgtagaaacaagatttaaacaaagattcatattaaaataatgataagtaatacttagaaactgcatcctagagacacattattcgtatttttagaaaaacagaaacatattagtgtgaaaagatgttaaaaaatgaatattaaattgttgagcacaacacattatgttggcaacaatataccataagtgactgtagcttgcaataaggaaatatcttacttgtttttctctttaggctttttttataggcattaataacaaatatttcctttcctcccttatttattgaaccacaccccttctcatactatctttccccccaaaggaagtgaattaattcactacctcttgttattacagtttttcattttaaaaacaaraaacacttaagttttccttttctcttatttcaaagttatatatttagccacctgagttatgctatgcgtcaaaatgtttgttgttgttgttgttgttggtttgagacagagtctctgtcacccaggctggagtgcagtggcgcggtcttggctcactgcaacctccgcctctcggattcaaacgattctcctgcctcagcctccagagtagctgggactacaggtgcgcgccaccacgcccggctawtttttgtatttttagtagagacgggattttgccttcttggccaggctgctctcgaactccggacctcaggtgatccacccacctttgcctcccaaagtgttgggattataggcttgagccactgagcccagccctcaaaatgtttttgaagtaatttttgttatagttacacaaatgcttctttagttcaatggtacaggaaattatgagcttgcttctattttgtatggcatcaaaaatgtgtaaagtactgcagaatgggttacgtatattacatcttctcttaaaatgataatttttatggtcctttacttttttcccccttcttttcctttatgagctgtgtccctaaaaatcactttaattgcacatctaagctttcttctcacccaagaaaaccattttgaagtacgtaggtgatattactttcttgaggcttgatggaccctgctgagatcaaacctgtttacttttcttaaaactcctttttgttggagagtcttaaatattagtctttgttaacctttccacagatttgttattgggcgggaaaaaccaggacaagtgagcgaggttgcccagttgataagccagacactggaacaggagaggcgccagagagagctgctggaacagcactatgcccagtatgatgccgacgatgacgaggtcagtagtgcttgcaaagattctttttcccacattttctaattcatgaaactctctctactgtataacagtatgacaggttttatgcagtttcttgaggaaggtgtgtccacattgaactaaaattctaccttagaaaagaaatactactcgcatctgatatacgcttaagaatcaagtcatggtatcctgtttacagtatgaagactgtggacacaaataagtcttatcttttgcactattataaaggaagtcatagaaacagaaaaggataaaaacacaaaaatgtgaataatgtcatctttattggtggaattgggtgattttctctctctgctttatattttttcaatcttttccaaatgttctacaatagtatgtaatgcttttccaaaaaatcagtaaacacacccatacacaaacaaatatacatagaaaagtactaaagattgctgagtgtttccagtgtctttttcccccaggaagaaaaagttctttggatctgcttactatgatttgtgctaacataatgcagaacaaagctttccactagcacatgttccatagagcagatacatattggaataattttacatcctgctttctgtaaaagatcaagtaaatgaatagaagctaacccccaagtgaaaacagctctccagaacccttgtgtgctgtaatataatacagatgctggtctatttctaatgtctttgaaatgtacattgatataatgggacaacatgctttattataaacacgtttaaacattcatrtgtttcatattggtgtgtcaaaagatccatcaacaatttaattgtagtattttatactccataaactagtacatattcaggtaaaacaaatattcttcattccagctaatataaccacagtgaaacttcatgtattcaaccccttcttatctgaatatataatttttcagaattttgctttctagccaggatatagatattaataaacagacattcaaatattttcacatatttttaatctgagatgttttaatcccaatgtatattaagatctcatgaatatgtggtataatgaggatatattctccacttatagcagaaaattagaggtggtatatccgttaacttttgatcaaagaataatatattagaaatcctttaaatgaatgaattagactcttagaacttgatttaatttattttcttacttggtgagtccatttgaaatggcaagtatattttcattacactgagatattttgtatgaaaaatgttctcttgaattttcaaactaaaaaagggatttcctcaaatattttgaacttgtatcttacctggttttcaattctttacattagtattttgtattttatcagagacactgatttgcttttgctgcaagcttattctgagattgtagaatcattttctgcaggtttgatttttgcgtcctcactgtgctaggatttttggtcttaggttcaggggagtacagtgacatcaagtggtggaaggggacatggccaggctttctagtctgtgtgccttggtgtctttggcatgaaagcacagggattgggctagatcacaaaattccttccagcttctaatgttccatgaatatgaaataagacatcaagtctaacaagcagagggggcaaagaaagaagatagtcacatttttaaggcactccaagtaaaacatttagatcacagaccacacattttctgcaggtattttgaggcgctgatcacattcatccccaaaagttgatataaaattttgctctttttttttttttacgacacagggtcttgctctgccacccaggctggagtgcagtggtgcaagcatagctcactatatccttgagctcctgggctcaagccaacctcctgccttgcctcagcctcctgagtagctggggcaacaggcacacagaaccacatcctgctaattaaaaaaaaaaaaattttttttttatagatgaggtctcactatgttgtccaggcctgtcttgaactcctggcctcaagcagtcctcctgcctcagccttccaaagtgctgggattacaggtgtgagccaccctacctggcccagatttttctttaacttgataattggaatagatggaaaaagaatagtttttacttgacatttatacttaggaatgtatcacatcttaaatggaagattgtttatagattttttttgtttgcctgtttttgtaaagtaatcagagttgtcacctgagcagatattttcaggggcaaggaaattaagtaaatattcagtggcaagcactttgcaaggtgtctttcttacatgatctcatttaatctttaatgcagccagaagagattttctttttttccctagaaatgcagcaactgaggtttttttctagtggtacatccagtagctggcagagttgaaattggaataaagtcttgctggctccaaagcctggactctttgcaacacactgtgctgtttttgagtagcatgtaagaacactcctgcagacacagaataactgggtaacaaaagatgttaagagaattactgtttgcggtgatggagtttaggttctatgattctttgttctgtatttctaataatagggaaatcaagtctttggataattattttctctatgcaacagtccataagaatcatctttatagagtttaaagagaagaataattgagtactcaaattttttttaattagtttagctttaagttaaactgtttttctttctgcaagttgtagaagtaaaaacgaggtgcttgctatgttactccaagtaactcactttatggaaaaaagtcaaggagacttctcctttgtatctgtctctcatcctctgtgacttgggttttttccctttcttgtatgttacacactgcctcaacaaaacatgcccagataaaaccaactgttaattttcagtgcataggagagatgaaagctgtacaaatagtgaaaatccactccaatgttaaaacttcaaattgtcacttgattcaaattcttttttctaatgctgaaaaaattattaaatggattgatttgagtgctttttccctattttctatttactctctgtctttctttgtgaatgaagaataaaatgtccaagaggcataaaggaaatgagaagaacaaatattggatagctaatggataaatgctccttgaataattgagttaatttcatatataattgaacaatttattgattaatatatctttgttaatcagtcacttggtttttttacttttatgatttatagaatcatcttgtgatttcaaagttagagttatttttatttgacagtatctcctgtgacattccctgcaccagccaggaaaacctccatttagatacagaacaaccaagttcatccaactgatttccagagccagctcttagtcagcattttctgctgaaggatagatagcttctgtttttgatcaaatcatccaaagttgattgtaacttggaacttgtcacattgacagagggtatttgcttgcttgcattcactacatggaaaacatcacaatgggagaaatagatcctgaaattataaacctacagtggagctctaaaaactatattgagaaagattaccttacaatatattgcttatgcttagacatatctgtttcaatgctttaggaaattataagtcatactctagtagaatttaagctatgtagataattttcaaactatttaaatttctgctttttctgtttttttcttcctctacatctttagaagggtttaaaataagcaaacagccaattttattttaatttgcatccctgtttttgtttactctctgttaaacattctgattaaaaaaaaatgttaaaatggctctgcctaaaagctgtagaataaaaaggaggatcctatttaagaagagggagatgaatatttgaacaattgaaaaattttaaatgtatatctgaatatatctgtgattcatgatttaatttctgtttaatcgaagtattgatcacttgtttttttttttctttctttctcttttcttttttttaataatctgaaaggttgccatggaggatttcaataaatctctcagacaatcagcactatttcatgacactcggggggtatgataaatttttcaactagaatttaactttttagtaacatttaatctcttgtcatactccaccactatcagtttgtagccttttagtagtgagatgatgtaattatggtatatattttgtgtagtgtgtatatattatgagtattttttatttaagagcattatgccgtttgaaatgctgcaggcttagactggaaatacagtatgaactagtgctatattccatttttgagttagaaaataggtatggtcattgaaattaaaataaagtattacactttaaaaattatgattatttggcttccttaaatattcttttaagatatagtatttgttacattgtaaagtcttagctatagatagcatttcaaagtctccttaggcagtagttcataagaaggttaatcatcactccagaaactgaagccccttctatactgaagcccctaaaatataatttaatctttctttcataatttgttttcattactggaaattaatatcattataacaatattatagcaactttttttttagaatcttttaaagtattgaatacagtttagagtagctgccctcatgggtatggttttttattgcttgtgttagcatgtcataattagaggcaaaaatataatggaagctttggtttgcataagtattaaaaggtatacaataatataatatttatgttataaaaagtgttagagggataacattaagtttgactcatactgtttgccattcctagttggaaacagcttgtgtgtgtaaacaagagaatgcaattattatggttggccttttaataatgtgaatataataatgtaaatagactttatactgtatctataatactgagaaaccaagagtgtgggcattttttaccaacatgccgcaatattgtcttagtacttaacagtgtgtattacagtaagcactgggactcagtgtttttcaatcctttatcaggctgctctctgcggtgggggttaagccttctttaatattttttgtcaaccattttagaacactgtggctgaattgcaaggaatgtctggcaactgcaataacaataacaactattttcttaaggtttgttttttggtttaaagtaatgcttacctgtactttcctgcttcatatgtaaaattaaatattctttgtgtcttattaactatctgtatgttctgaagaacttctctagagtgatgtgttttgtgcattgaataatagtttgaaaataatcattcaaaaaacaattctgaaacatagcatatattttaggtataggttctgcaatttagactcatttcttaatatttagccatggatatttttaacccctaacactttaaatatcttgtgattcaaattaaagggaaaaagcaaatgtccaacagcaggtctgtatgatgtttacacagtaataatgcacatagtgatttatactgtctgtaaatccagtacttttttagaaaataatcttttgatacaaaattcttgatttctcaaaacactaaatatatctttaaattatagtagtatttagttgcatgatttatatggtagacatatcaaaatatctaaaatatcaaaatatctaaaatgatactatactttaaataataaaataattctcgttatgtttagttgctgttaatatagatagcagtgcttaaaaatggaggttgagtgtatgtaaaaggcaggctgatttatggcaattagaggaaactgaagaataaaggaaatatatttaacagcctgttcacagactccaatttggtctaatctctaaaatcattaaatttaattatatcctttgttttatgatccccaaatctatagcaacagtcattgtcaccaaagccaagaatcacaaggtgcttggaaaacattccgtttaagaccctatccatatgtgcactggcctaagtagtgtatacacatgcttaacacacacacacaccacacacacaccacactcacaccacacatacccatgcacacacaccacacatatccacacacacaccacacacacaccacacatacccacacacaccacacacacacaccacactcacaccacacatacccacacacacccaccacacatacccacaaacaccacacacacacaccacacacacaccacacatgcccacacacacatcacacacaccacacataccctcacaaccacacacacaccacacacacgacaaacaccaccctcacacaccacacacaccacaaatacatacacacctcacgcccccacaccatacacacaccacatacccacacacgacacgcacacaccacacatacccacacacaccacagacgcacacaccatacacaccacacacacgccacacacacacacactcactctgatcccacggggtagacatcctcctgtacttgaaagattctctctagaaatattcttcatatatggagatgttattttttaatacactgtgtacagacagaaagatgggtaaaggggagatacaggttaggataggaaccttcatctaaacaatgtcatctttttgcagatcattttctttgatttaaaaaaattatgatgcaaatgatttgaatatattttccttcccactgccacattgtgatattatttactcatgagctagatacgaaataccaaataaactttatcaaattcttccatgtaattaaatttctctgaaagtgtagactttgtactccctagaaacaatgctagaacaattcaatattacaatgatgaaacacagagtttgcagtgttaaagagatgtcatagaaactaccacaaatgacagtatttttctgactttaaaaacatatattttattagttgaataatttaccaaaacattctaaaatgctaaaagacatagtgagagacggatgcctgggaaacagacttactttcccaggggccatcgggatcccctggattttctatgccttttgtttcctataccttttatggtgtctagtacactgactctgttgcccttgtatgtcagcttaatcctgtgcacctttcagggttccatttaagtttcatctccttcacaaagcattgctgggctagtggtcttttaaaagtgtgtcagtagcactgtgtgtatctctttctgtcattatttatccataaattccccccattagcctgtaatctcttcaatgacaggtttcaatgggcttttgcttgctacagcattttaattgtcttgagagtccatgaatttgcaagaagaccctatctctatcacactaaaccacaatcttcttcatgtaaaaccagaaaaaaaaacaaacgtgcatattttagcccttgaaaacctttgggaatatcaaaatagcaacttggtgactcacagtaacatgccttctttttagtcataactgaataaacctgcagttgaaacagaatagtcaaaatggcctaaattacaatactgcatatatgtccttatctccttcccaatgtattcacttagaaatagccttaaatcatagaaacatattttctatcacagaaacacatttccatttgcaataaaaactgaatggtgatgtggccaaggactgagatggtaaagctgctttatcatggagttttgccaggcttgataaaagatgttaaaaactctaattgatttctgaagtttcagttcctaaagggatttttttaatggatttattgagataaatttgacatagagtgaaatgcacagatcttaaagatataattttatatattatcattacatagctccatttaaatattaactttaatgagtaataatttacatacaataaatgcactaattttaagtgtatttaagttaatggtttgatgagtaaccaccaccataatcaagatacaagacatttttattacctcaaatagttaccttagggaactttgtagtcactctcagcctgagacaactattcagtctgctttttgaaactataagttaatttctccaattctagaatgtaattagaataaaagcacaacatacttaattctagaatataattacaataaaagcagaacatacttttcttgaactgcttctttcactcatcataatgtcataattatcgttaatgcttaaatgttatgatgatactgtaattggtattgctttgagttatagtagacaaaacccagggtccacctgatatgggatgcctaattaggaaacttcatcataaagctggaaccccatggactacacctttctgtaaggtgaaaataaatctatcaccccagggactgcatggaaaattgccagtgtcaaaccttgggtgctgagtggaaaagccaaaaaaattttttctaacaaattatgatcacaagtagccttaatttatgttacttttcagaagaaaaaaaaaagcatatctttccttgggcgttcatctttactcaaagaaaaaaagttaaagtttcgagaaatatgagttgacggtttcaaggtacaaagttcgcaggaaaataaagcaccatgagtaaaaaacagcagaaaatagaagaaagggagggaggaaaagaaaaaaaagagaagaaagaaaataaatataaggtcaaaatcattttattatcaattataccaaactagaacaaatatctccaattgcatataacttattccagaagacagaaaaacaaaagtagtacaactttgataccaggaatgcagtaaaactttgacagtgtgagatgtatgaagtaataaaacataactttggtaccaaaagctaacaatgatgagaaagaaaacttataggtccatcccattcataaaaacaatgcaaaaaggtcctaaacaaaatattagcaaaccatatgaagcaacatataaaagagataatatatcatagctasgttgggtttagccaggaatgcaagtatggtttaacattggaaaatctgtcactttttatatttgacaytgtactggaaggcaagtaaaagaaattaaagaaataaattgtaaagaaatgaaactgttattcacatatgatgagattgtctatttaaaaaatctcaaaaagtacctatagataagttattagaaataatataaagttatagcaactttgctgaatacataattaatgtaaaataaaacatctatttcaatatgtctgcaaaccaggagaaaacataatttataagttaccatttacaagacttcaagacataaatgatagggaagagcttcatagagaaaaacaaaattgtattgagatataccaaagaaagtgtataaaataggacaaagaaaccttgttcatggattggaagattcagtaactgttgatttggtgcaattctagtaaaaataatttcaaaagatttttaaatggaatttgataagctattgctaaaatatacatgaaagggcaatacatgagaaataaccatggcatttcacatgctttaaaatggaaataattattattaaactttaataaatttatactttggggcaaaagaatgggcaagttggtcagggagcccagaaacagcactgtagatatacagaaacctgatttatgacatagattacactctagaagagttgagaaatgtttggctcttcaataaagagaatatagtgaagttgagcccccatataatccatacccaaaattccatctcaagtggactgactacgtaaatgtgaaaagcaaaaatataaaatttggaagatagcatagaagaatgcctttatgacctcagtttttagcaatgtttcttacagctgggtgtggtggcttatgcctgtaatcccaggactttgggaggctgaggcaggtggatcacgaggtcaggagattgagaccatcctggctaacacrgtgaaatcccgtctttactaaaaatgcaaaaaattagccgggcatggtggtgggtgcctgtagtcccagctacttgggaggctgaggcaggagaatggcatgaacctgggaggcagagcttgcagtgagccgagatcacaccacggcactccatcctgggccacagagcgagactctgtctcaaaaaaaaaataaataaataaaaataaatgtttcctaaatgagccactaagaaaactgactacattaaaacttaacttctgttcatcgaaagaatacttttaagacagtgaaaagataaaccatacgctggagtaaaatgtttaaaaaatacacacaatattattccatttatataaagcataaaatcatgtcaaaatgacacatagtttggatataaaaatatagcaaaactaaaaaaaaaaaaaaaaaaaaaaaactctgataaaattcagcagaattactccagaagagtaagcaactgaaatggaatcaaggaggcacacacagaggacttcaatgaaaatgagtggttctgttccttttccttaaataagttgttagtttattggtggtggttatataattattcattatgttttaaatttatttattgaataggctttatgtcaactcagtatttaatataatttaaaatctgctgtgtataatgtactttgcagttatgtgattatgtggatataaaatgaatatgacatagttcctgctctctgaggacttacaaaatggcttaaaactctgtgtcttcaacttgcttcagtatgagaatatcatggtacttctttaaaagtacagatttacccacccagcctcagacctaccaaatctgaatatggcttgcaagggtgtcacctgcgggtgtttgtgggaagcggttacatgcaatcagtattggagtggtccagtgtaaagatgccaggaatcttgcagtaaagatctttgagtcctggtattgcaagcactttgcaagaaggaatggctgccacaaaccacaagtcagccatgtgaggaaaggactagaattattctccctagaaggagattgtaagattgagactatgtttatcattaatctatgtaataccataatccatgtaataccaccaatgacatttgtgttggttttacttttttttgtactttaaattctgtaactgtaatttctggttctatctgatgatctgatagcatttttgcaattacacgaatcaatttttatataaacaccatatttttcaacattcaattacttgtacaattatagaattactaaaataatgataacatgtctcttcagtcactcatagctgccctcttctatagaggaaaattcagggaaatacaaatctcttagtttcttcccacagttctactggcatcagaataagtacttcattgttctcttggcaagtaaaatgaaactcaaggaagactgccagtttgaatttgcagtgtgacatttgaattatagaggtccactttggtctgtcgaccgtttagttcaggatctcagtgggaaaaaagatcactggttcccttctcatatagaatatatttatcagggacttaaagacaatagcatttctctctttataagtaggtaaatgtattaaatggaattgaattaagaatattaagacatggtgaatatattttatgctcacaagcagcttattttgctgtggaaacagtaaatatgtatggtaaaaaatttaaatccttttcaaggcaacctgtcaaaagatccaataacgatagtgtaaaagaatcatcacaattttaaggcataaaaaataaaaattaatttgatatttctggtttctatttttatttgaaaggatatttttgttgtttttgtttattttctgtagcacaagcagctgtggcaatgaagggtgtgttcaaaaaaaattttttttttttgagacagagtcttgctctgtcgctcaggctggagtgcagtggcatgatctcagctcactgcaacctccgcctccccggttcaagcgattctcctgcctcagcctcctcactagctgggactacaggcacatgccaccatttgacccagcaatccaattgctgggtatatacccaaaggattataaatcattctactgtaaagacacatgcacacgtatgtttattgcagcactattcacaatagcaaagacttggaaccaacccaaatgcccaccaatgatagactggataaagaaaatgtggcacatatacaccatgcagtactatgcagtcataaaaaaggatgagttaatgtcctttgcaaggacatggttgaagctggaaaccatcattcttagcaaattaacacaggaacagaaaaccaaacaccgcatgttctcactcataagtgtgagtggatcaatgagaacacacggacacagggaggagaatatcacacactggggcccgtcagagggtggagggctaggggagggatagcattaggagaaatacctaatgtagatgaccggttgatgggtgcagcaaaccaccatggcacatgcatacctatgtaacaaacctgcatgttctgcacatgtatcccagaacttaaagtataaaaaaaaaaaacattaaaaataataataaaaagaaattgaatgtctgacccatggacagacaatacctttggcctgatactctcagtttgagatgggtcaacttgaactcatgaccaacaggattggaagggttcaacaaacattgtttgtcaaatagaaatgacagattccagaaagctgccaacctggctacaagtggtagccttctgtttgattaaaactttgtctctctgcctcctgaaacagggagtttggcttgatgatgtcttcaattcataggttttctttaaatccctggtattggttcactgatagttctgccaagttgttcaatgttgtcttctggtttttcaatctcagcactagttatgcagacaccagaatggacatggccactctgctcaataggcagcactcaagcccatttatatcactggccaatactccccttgatgaagcatgttatatttttactaactctgggtctattacgactgacttgttgggtctgtcactcctaaaattacagactgacatataaaagtttgggatagatagggttaggagtggtggctcacacctggaatttcaatactttgggaggttgaggtgggagaataacttgaggccaggagttcaagaccagcctggacaacatagcaagacgtgtctctaaaaaaataattttgtaaaagcccggcatggcattgctgcatgcctatagtcccaactgcatgggaagctgaggtgggaagatcacttgagcccaggagtttgaagctgcagtgagctatgattgtgccattacattccagcctgggtgacagaatgagtccctgtctctaatcaatcaattaaaaaaaagtttgggatggcaaacagtggaagcaaattgtggcaactggtcacattctttgaactgcttatgtagctgcaccttagaggaatttttatatatttaaatgtatttaaagaaaggcttttaaaaatagaatcagaatctgcagtttaataggatctccaggtgattcttttaaaaatatttttattgatgcataagatatacatcatttcagggtacatgtgacaatttaatatattcatttaatttgtaaagatcaaatccgtttacttgggatatccatcaccaaagaaagacctttgtaagaagtcttttcttaaaaataaagaaaaaatgaaatcttttctttaggatattttaaagaattttaaaatatatatatgtatttaaagaaagaccaccattagatcatgtagccttcagatgattatagagatccctccaaaatgaggctactcttagttactaaagggagctttcctgagggataactaatttattatttgtatgagccctacaggcaattgtccttatgattaaagtcatttaatcagataagatcttatgaaaatggttcctgattttaggtaatgtggttattggtaccacctcagtcctggaaggcagtcakgtcagcctcaaccttttggccagggtttttctggacagtagaattgctctaacccctagacttcctccttgtatgccaaggtttgagtctatgtaattattgatcctgctgtacctggttcaataccttaggccaagtggaaaggtcaatacagaagcttaaggagaaagtcctgggtttctaaggtatatcctgatggtttatgggatttctttaaccagttgggtctgggagcctagagaatatagttgttatcaatgccgaaagttagactaattctgctgcttggaatcctattgatagtagtattaatcatatgctctgagatagactgaatggctttggtcctagccactcttggttacattgatcagtgtggccaagggaatgccatactcggagaaaattcacctcaagccaagactgtgtagaaatgagggtggacgttgtttggagacaattcctccatgggttctcccttctctgcttgttttttgagcagcagcagcaccagcagcctatgtttcagattatctttccaatgatgttggtatcattgggagacagtatgtccctttaggcagtgacaggtttgtttatcactcattattcaaaaatttgaatttcctaagggcagaattcttaagattttattggttgtactatctttctttctctttctttttttttttttttttggagacagagttttgctctgttgcctagactacagcacattgatgcaatcttggctgactgcaatctctgccttacgggttcaagcgtttctcatgcctcagcctcccaagtagctgggattacaggccagtgccaccattcccagctaattttgtattttgttttagtagaaacaaggtttcaccatgttggccaggctggtctcaaactcctgacctcaagtgatccacccacctcagccttccaaagtgttgggattacaggtgtgagcctccacgcccagcctggttatacattctgcttcatttttaaaccgcattcttctggcagttccatggatttgaactctgtttggaagccatttcttaactgtagacttaattttaagactttgaaaaccatcaagtttctgtttaaacagaaagaattcctttctgtttaatagtactctcarctgaactctattctttttacattttactacaagcagcaagaagaaatcaggctgcaccttcaccactgtgtttagaagtctacttagccagatcaccctgttcacaaggaacacttcctactttctcgttagagaaggtgataatgttgctaagctttgtgtcactacataataagcacgctcccttccagtttccactcacaatctgtgcagtgcaatttagtcttgctccaatacactcttcggaatcctagccttcgcccactgcctgtttccaagccacttccctgtttttttctgtatttgttttggcagcatccctcttcaatttgctgcattacaaactaccaccaaaacttagcaacttaaaagaagaaatatttgtacattaccgtgtctgtgggtcaatttagctggatgcctctgactcagaatctctcccaaggctgtaagtgaggtgttagccagagccgtggtcatccaaatgctccactgggagaggatctgcgtccatgctcactcacagctgttggcaggactgagaagacccacttccaggctccctcatgtgacctggcaggcctcaggtcctcactggctgttggccagaaacatcagctccttgggatgtgggcctctccctgctcataagatggcaacttgcttcccaatagtgagggctgagagagagagagcaagaggacaaaagaggcacaaatcacagtctttttttttcaactaatctgagaagtggcattccattacttttgttgtattctggttgttggaaatctgtcattcagccctcactcagtgggaagggattatacaagggcatgaacacccagaaagcaaggtcattggggtcattttggagtctgcctcctatagtaggaaatagagtcccagcttctggagtatactttctaaaaggaaggggataaaaactaaagaatggatttgagttgtcggaaaatattttattggcaaataatgatttttttggtcaaaattttaggaagaataatttttcagcaatattaccaatgacctgacaaggtgagagcctgaaggtaaggaacacagacgccatatgagtaatctagagaaggattttagatgtttcttgagtgggtgactagacaatgagaatggagtgaaaaatcaggaaatattctttttttttaatatatataaactttaagttctagggtacatgtgcacaatgtgcaggtttgttacatatgtatacatgtgccatgttggtatgctgcacccattaactcgtcatttatattgggtatatctcctaatgctttccctcccccctccccccacccacaacaggccccggtgtgtgatgttccccttcctgtgtccaagtgttctcattgttcaattcccacctatgaatgagaacatgcggtgtttgttttttttgttcttgcaacagtttactgagaatgatggtttccagcttcatccatgtcccaacaaaggacatgagctcatccttttttatggctgcatagtattccatggtgtatatgtgccacattttcttaatccactctatcattgttggacatttgggttggttccaagtccttgctattgtgaatagtgccacaataaacatacgtgtgcatgtgtctttatagcagcatgatttataatcctttgggtatatacccagtaatgggattgctgggtcaaatggtatttctagttctagatccttgaggaatcgccacactgtcttccacaatggttgaactagtttacagtcccaccaacagtgtaaaagtgttcctatttctccacatcctctccagcaccttttgtttcctgactttttaatgatcgccattctaactggcatgagatggtatctcattgtggttttgatttgcatttctctgatggccagtgatgatgagcattttttcatatgtctgttggctgcataaatgtctacttttgagaagtgtatgttcatatccttcgcccactttttgatggggttgtttgtttttttcttgtaaatttgtttcagttctttgtagattctggatattagccctttgtcagatgagtagattgcaaaaattttctcccattctgtaggttgcctgttcactctgatggtagtttcttttgctgtgaagaagccctttaatttaattagatcccatttgtcaattttggcttttgttgccattgcttttggtgtattagacatgaagtccttgcccatgcctatgttctgaatggtattgcctaggttttcctctagggtttttatggttttaggtctaacatttaagtctttaatccatcttgaattaatttttgtataaggtataaggaaaggatccagtttcagctttctacatatggctagccagttttccatttattaaatagggaatcctttccccattgcttgtttttgtcaggtttatcaaagatcagatggttgtagatgtgtggtattatttctgagggctctgttctgttccattggtctatatgtctgttttggcaccagtaccatgctgttttggttactgtagccttgtagtatagtttgaagtcaggtagcatgatgcctccagctttcttcttttggcttaggattgtcttggcaatgcaggctcttttttggttccgtatgaactttagagtagttttttccagttctgtgaagaaagtcattgatagcttgatggggatggcattgaatctataaattaccttgggcagtatggccattttcacgatattgattctacctatccatgagcatggaatgttcttccatttgtttgtatcctcttttatttcgttgagcagtggtttgtagttctccttggggaggtccttcacatcccttgtaagttgggattcctaggtattttattctctttgaaccaattgtgaaagggagttcactcatgatttggctctctgtttgtctgttattggtgtataagaatgcttgtgatttttgcacattggttttgtatcctgagactttgctgaagttgtttatcagcttaaggagattttgggctgagacgatggggttttctaaatatacaataatgtcatctgcaaacagggacaatttgacttcctcttttcctcattgaataccctttatttctttctcctgcctgattgccctggccagaacttccaacactatgttgaataggagtggtgagagagggcatccctgtcttgtgccagttttcaaagggaaggcttccagwtttgggccattcagtatgatattggctgtgggtttgtcataaatagctcttattattttgagatatgtcccaacaatacctaattcattgagagtttttagcatgaagcgctgttgaattttgtcaaaggccttttctgcatctattgagataatcatgtggtttttgtctttggttctgtttacatgctggattacgtttattgatttgcgtgtgaggaaccagccttgcatcccagtgatgaagcccacttgatcatggtggataagctttttgatgtgctgctggatttggtttgccaatattttattgaggatattcacatcaatgttcatcagggatattggtctaaaattctctttttttttgttgtgtctctgccaggctttggcatcaggatgatgctggcctcataaaatgagttagggaggattccctctttttctattgattggaatagtttcagaaggaatggtaccagctcctccttgtacctctggtagaattcagctgtgaatccgtctggtcctggactttttttggttggtaggctcttaattattgcctcaatttcagagcctgttattggtatattcagggattcaacttcttcctggtttagtcttaggagagtgtatgtgtctgggaatttatccatttcttctagattttctagtttatttgcgtagatgtgtttatagtattctgtgatggtagtttgtatttctgtgggatcagtggtgatatcccctttatcatttctaattgcatctatttgattcttctctcttttgttattagtcttgctatcagtctatcaattttgttgatcttttcaaacaaccagctcctggattcacggattttttgaagggttttttgtgtctctatctccttcagttccactctgatcttagtgatttcttgtcttctgctagcttttgaatgtgtttgctcttgcttctctagttcttttaattgtgatgttagagtgtcaattttctatctttcctgctttctcttgtgggcatttagtgctataaatttccttctacacactgcaaatgtgtcccagagattctggtatgtagtgtctttgttctcattggtttcaaagaacatcattatttctgccttcacttccttacgtacccagtagtcattcaggagcagcttgttcagtttccatgtagttgagcgattttgagtgagtttcttaatcctgagtgctagtttgattgcagtgtggtctgagagacagtttgttataatttctgttcttttccatttgctcaggagggctttacttccaactatgtggtcaattttggaataagtgcgatgtggtgctgagaagaatgtatattctgttgatttggggtggagagttctgtagatgtctattaggttctcttggtgcagagctgagttcaattcctggatatccttgttaactttctgtctcgttgatctgtctaatgttgacagtggggtgttaaagtctcccattattattgtgtgggagtctaagtctctttgtagatctctaaggacttgctttatgaatctgggtgctcctgtattgggtgcatatatatttaggatagttagctcttcttgttgaattgatccctttaccattatgtaatggccttctttgtctcttttgatctttgctggtttaaagtctgttttatcagagactaggattgcaacccctgcctttttttgttttccttttgcttagtggatcttcctccatccctttgttttgagcctatgtgtgtctctgcacatgagatgggtttcctgaatacagcacactgatgggtcttgactctttatccaatttgccagtctgtgtcttttaattggagcatttagcccatttacatttaaggttaatattgttatgtgtgaatttgatcctgtcattatgatgttagctggttattttgctcgttagttgatgcagtttcttcttagcctcgatggtctttacaatttgtcatgcttttgcagtgggtggtactggttgttcctttccatgtttaatgcttccttcaggagctcttgtagggcaggtctggtggtgacagaatctctcagcatttgcttktctgtaaaggattttatttctccttcacttatgaagcttagtttggctggatatgaaattctgggtttaaaattcttttctttaagaatgctgaatattggcccccactctcttctggcttgtagagtttctgctgagagatccgctgttagtctggtgggttgccctttgtgggtaacccgatgtttctctctggctgcccttaacattttttccttcatttcaactttggtgaatttgacaattatgtgtcttggagttgctcttctcaaggagtatctttgtggmgttctctgtatttcctgaatttgaatgttggcctgccttgctagattggggaagttttcctggataatatcctacagagtgttttccaacttggttccattctccctgtcactttcagataaaatcaggaaatattctgataacaaaagattgaaaagaaaattttgaatgagttgataagtgggagaaaaaaataaatatatatgctgggccaggcatcattttggatattttgcatatttcatttcttcgaatcctctcaatatcctatgagattggtatcttttacaccattttatagaagagaccacaaaagatacaaactaaatgacttacttactgttatgcaactgggacattaggatttttctctcttctggccctcatctctccaaccccaaatgctttttttgttgcattagtttatggtgttgtcctggagaaataagggatggtgaaaacmatcataatcataacgtcatgcagtcagttagcatattctaggcactgtggttaactctttcatatcactacaatgaattctcatagcaacctctttaaatgaagaaggtgctgttatttccattttatagatgaggaaacaacattcaaagagactaagtgtactaacattataaaattaggacacacaggagtcactgacaaaaaaatggaaagagagatgcttcggcagagagagggatgtttttgccgaaaggcctctggatggttggtgcagatttaggaattttaaacattaaaatgtgagtttgacgttttcctcctccagggaagaagcagctctcctttattctctcacagaagtgcgtctgaaaatacatagcaccaaattcaaatccggtaaacaaattccatcaaaaactgcataattaaggctatttttgtgattagcgccatttagtttccctgaatttaccagagcaaacattgctacagcaaaaattactgctaatggttgaacctaacaacaagagaaaatccccagaagggtcatttaggccccagctgcagctgtgtttcactatatttcatcctggaaagctgagattaacaggaaaatcaggctctactgtgctatgcagatgtggctacaactatctgaatttattcagcaaacatttgttcagtgcccactatatgccaagcaatgtactagccacaccgggattgcagggataaattgtacctggcactctctaggaatgttcagatgaaagaagttgatgagagaaggcagatatagaaacatcaaagcattatgagtgatgtcagctatacagtgggagcataaaggagtgaattaggagagtcttaagggcagcagcttcacaggatgttctcatgtacacggttattcatcttgaatccttggggcaggttggggccagtaaatgaggaggacagaggcatggaagttttcttgggcttgggtagaagctggtgcctaccccaamctgggaatataagtagaggaacaggtatatatagaggaaaggaaaagttttacttcagaaatgaccaatttgcttataaaagattcatgtgttgaggtcttctaggaacttacatttatgagaccaaagtttagcaaatgtggttacaagatacagatgagaaaatcgttagcattttgctattgcagtattttgacaccagcagcagcaacaatagcggtcactcgttttgagcacctaccatgtgccagmccttgtgttaaatacataggcaccatctaacttaatcttatgacagctttcttatgctaaggaactgttttgtccttactttatagatgaaaagattaaagcttagatatagacgctaattcccaatgtctcaggaccaggacttgaacacagttctacgtgacttcaaaaccaaaatcctttcattgatccccacttaaccaactccccaatataacagatactctctgttccttctgcaaaacctagactgatatctatagctctcatgagtgtcccaggctctagtatgtctacatacgtctcccactagtcaaaagttatatgtttaccaagagacacaacctgttggttgtacttgttactataattatgttattttataaaatattaagtgatgtaatatgtgtgtaaatgaagttgttgtatctatgaaaactaaatacagtgctttgggaagatttaataaagactggcagctcaagaaaattaggtatgagaaggaaatataaaagaggggaaaaccataaaattctatagaaattttgcattcattttgccttggaaggatctttttcatctgttttaaagatgctacagtaatttcatacactatatgttatggttgtagtttatacaagagtgcataaaatgtcagtcagcagacccataagccaagaggaagacttggccctgcaattaaaagatgagcaaataaatgaatacttctgtgatttaagttaacataaaatggtatgcatatgtgtgtgtgttcgtttgtttgtcagcgattcctctctgtattgcaattaacccacaagtactgctcccgattctttcaaaggggaattctatattcttgtccagggtaagcatattatgagagaagagaagaggacaagaactttggagcccactatacagaggtgcaagtcttcaaagtgaattcagtgataatgtttaaagccgtggaaggtgaatttcaatacaacaggattatccacccaggtttggggatgggatcattaaaaaatatattcccaatttttttttctgcagaactttagtttctgtagactggaagcatcatagcataaaagaaggagcatgggctttaaaatatgttgaatgcagcttcaacaacttaattaattgaccttaggtatggtctctgagtctcagtttcctcaaattaagatagtatggtaacacccatatcccatagttgttgaggaatgtccaatgctgggcacacagtaagttgcaaaagtattgctcttcattttttacccctttgtgtggggctactaaaaatatcatatattaatcagaaaggtaggtaaagacatgaaagggaaaatttactatctctgtcagttttttacccaaaaaactgttactgccacatttgaagtggatttgcgtgttaggacaaagaatttcaagagtctctggttacttgaaagatttttaatttgaacagaaatagagctagataccaatggaaatactttgttatagtaattttgggttttgttggttttgggtttttttggtacaacattgttcatcttcctttgtaaatggcagatttaatccaatctaattttgcggtttacaacattctgctgacacattccatgttacttattttatttgcagtgtaaccacaaaaataatttccattttcaataaagataaaatattagaagaacctatttttcttagtccactaagtgtaacttttttatttccaggtatttatgagattctgtagtaaatgtatcatcctaaagcctatttaaggttggaatggcaaatgatcagcaagagagagttataacataatgttttaaacatgccatccttagcctataataagtaataagtagaatcaagacagcaaaagacatatttgtcctcaggatgcttataaggctaattggagaaagaaggcattagtaaatgaaaagatgaaatgagtgataagaattttaacagtactgcaggtaatttgggtattgggaaggagaggatactggcaaagtccacaaaagaatcaagaagaacgcttaacaacgtatgtttattaagataattttcataatgaaagtatatatggatgacaaagtgcagctaaaaggtaagaattgcatatgttatgcataccctaatcctgttattcacagtaaggttgttagtataatatactactgccttcttaacaagtgaccacagttcattttcttgatattgaaaatctccttaggaagttctgtctattaccaagttaatgcattggcattcttggatttattcttttaaaaatatttgctgagatcctgttatatgtcaggtcccatcctaggcacatatttatattaattctctcacatgtagtgaacaagtatttattttcaagctagcaaaaggaaatcaaattgttcatttcaactcatgtttaaaacgtgccacattgttagggcttagtcatactttaaatttagcataagagtttcttgagtcattcaatgctgtatatagtgagttctatatacctggtttaagccttcataataaaggcttgggttttgctgccatttgtaatgatagggttaaaaacaagtacacagttttatacctctatatgaaaatttttcagcaaggtatcttgagattatttacttgccagtcttgctgcattcctattaattaacttcactggaatttaccaagtatttgttggttctagaaatgggtatgaacaggagatgaattgattcaagaatacaaaagaaaaaaaaaagccaaatctggaattagagttttttaagatttgtaggatctcattgtgctaataaataagtacaagctatctgaccaaccagctcccattcttcagctaccttcacctgccagtggcaaagacacttgaattggtatttatagtttagacattttcagactgatttctacagagatctagagttccaggtactcaggagatacataggatccaactggaggccaccaacctcttttcctttcagtcaaatcacctgtgattatatttggggaaagtaaaggttccaactaacctgtaaccagtttggaaaatcattgctccacatggaatattctgagcttacttctgtacacagatgccaccaatgtcaagttctccatgataatagcctctgtgtggggaggtagagtgtgaaggatgctgtggcagtgtgttcatcatggttgatgaccttcaaattccttactagaaactgtgtctactttcaggctctgcaatttagagaaatgtggaaaagttggagagaaatcagagcacaaccacaaagacaattacagcaaattaccttggaggcaactagaattattttatttgaaaaagagaaatctgaaggcaatttaataatggtctttcagacattgggaattattagattgggattaaggaccagatttccttcacgtgcaaacataggtggggggaaaggggaagtgaggggctcctgctttggcaggaagaatataatacagaatcaaaagaaaaaaaaacagcaatcagatgctgagcctatttactcaaaggaatagatcattcagtacaccgttcatggaagttttttaaaggcaatatgaattcctgtctctgttttatgtgttagataacgtgctacctgaaggaacagggatgagttcaatgaactttgtttttttaaccctgtcagtgatttatctttaaattatatcataaggtatagatttcaaacaattattttgaattacagtatcatagcttgatgctgccaggagaggatctactttctaataaagttaaggaagttagtggcaaagaggaatgtttattccaggggtcaggaactcagatacctacagggacaggtgggtattacaaaggagtgaagctaacaatatagaactatatgacattagaaaaattgtggggtattagaaagcatataactcttctaaaaggggcaaccactactaactggccaattgttatcatgtcccaatatgcctaatattaacggatgcttggctttctcaaggaaagctggaaatctagaactttatgtgaaacatttttctcacattgacagaatactcagatttgtaaatgtgctaggcaggcaaaacaatacacttggtgcaggctgcaagttagaaacctttggtttattctttagctcactagttcaccacaataattaacaagcaaacaaaacagaactgtttgaactctaacgcttaggagaattaatcagctaaacctttgcaaggcttaattaaggtcccttccaactctgtgattcattaaactccccttcccttttcattgctctcagtattgggtggcgtattcacaaagagaatttaaagaaatgacttatttccctcagcaacataattttatttggtaaaataatcaaatrctcagaaaaaacaactcttgtttctgtattaaagatgccactgayactagtagatttttagaaacgcacttgtatatggcataggtttgtcactttggatctttaaactaacatttgtttataacattggctgcatgaggcatgcttggctgaaaaacctacttacacttttaccatttgggtacatgtcttacttgtcttttataaaatattttcaaataactcacctccacctggggtaaggacagctggatttctgaaatccccttcctttcagacaggagaatatgccacagatgaagaagaagatgaggtaggacctgtccttcctggcagcgacatggccattgaagtctttgagctgcctgagaatgaggacatgttttccccatcagaactggacacaagcaagctcagtcacaagttcaaagaggtatgccactaagctgcaaaatatttctttatgcctgtccatttcattaagtatatatttctgttcaaataatatattaagaataatcagtttgcaaatcaaagctttttaataacaggttgtcttgagtctcattgaatttcaagtagaatttaagtagatctcgttccacggtcattgatttaaacgcttatttgtcatagtgacatacctgtagcccataatttcaagcagtaacttaaatgtgcagttttatgatgtttaagttatattttttcagttttacagaagttttggtaactagtgataagcttttctctcaaggcagagacttcctaaaaagtctctttttgtctttctgttcatgaaataggtttctaataagcatcagatggcatacccaaagggtttacttgaagagagtttaatacacagactttgaacagagttaatagtactaacaaggggtggtgaagtgcacagggactggcaacagcaggaggctgttaccatcaacatctgcagctttataagatgcacagccactggtaaaagctgcatccttggggcaagggtaagaatacaccctgactctgctttccttttctgctgatgcttccaaacccaggcaagggagtatggtgatgcagtctcagagtttgaagagatcagactcctgaggcaatgtgctctcagagaagggccaagaatagaaccttgggagaggaaatgtggataactcttccaaagtagcttctcagaaccatgacacatgtaaaacagaaacagtgattaataggtcccaaagcagtttatctatccttcattgttttggaagagtatcctccatcattgaagagaaatgtgtcattatttacaacttgttcatttcttctaaagactttctaaattaactgatatcttcaaaccaaagagcaatgcagaaaaagaaaaggtctgcagaaagtggctgagtgggagaaagaggtgtaatctagttacctgtttctctgcagcccttatttggycaaagaatataagttatcaagaaaagtaggtagatgacttgttctctaagaatattttaactcacaacccaactttaacaaatattgaaggcagtgagatcaaaatagtattccctggcgaaagcctataatacagctctttcattttaccagttgagtatgacccctagtctttggtagataattgagctggaagaagggtccacattcttttatgggaggtgaagagcctacagggcacagataatatatggaaagttatatcttccattttcaaaattgagctaaggactcaaagttccataaatattgttttaagcatgcaccattgtgtagagtgatctagaccaggggttagcaaattatgatacattgtccaaatctgggctactttttataaataaagttttatttgaacacaagcatgcccatctctttattgtttgtggctgataacatactacaacagcaaagttgagtagttgcaatagagactgtatggcctgcaaatcctaaattatttgctttctggccctttactgaaaaatgttactgaccctggtgtagactgctgtgtgatctcgattcattctgtgtaatgtggctgatttatttttagcttgagtaaccagatctgtaactttattttagttttggtttctaagaattggaatttcatcctcacctcaataacaggcaatatcacatcgttccacttaacaattcttttatcctcttttgttttacatttaacattaatatattcatttcttcagaatattgcccctgtgtatcacctgtgtggcactcttttgtgacatttgtatcttgtacactgtcactatcatagtcttaaatttctttatgtgattaatatacatgtccaaataytatatagcactgggcacttttcacaggatcatccacaaaacttggggtgagtgtgaaggatcatattgtattagagtctttacaaagtttcatgttacaggattgtcttaattattttaagcaaaagtatgtgttttactactcgggcaaaatacattagactgacattatctcaatcagtcatactttgggcctgttttgtatctatcttcctgctaaactcaaagctcgcatgtttttgcttattatcatgtcctcagtctttgtacaattcttggcatatagttagtggtgaaatatttatggaatgaatggtgtcaaacatatactggaatttgttgtatgatataagacatgtacccaatttaatgtttccaaatagccaacaaaagttggctagcccttttattaaatgctcctttaccaatttccctttggtgggagggccaacattattatctaaagaatttgtgcctttaccttctgaactgcttatggcttcatagtctgctccatcttctcatttttcttcagtgcaatactattagaatatacgtcaatattgatgagctaagtcgcatcattccaacttttcaaaaatgcctttatttttcaacttattcaagaaaatatttgaatcactttataaatacccttgaaaaatacgctgcattttttgttgtaattatgttaaactagtaaatttctagagaactggcattttaaaaatcacatcgaatcttttaatccaagttcatggaatatatttgtttaattcaagccttttttctcatcctccctaaaattttatcgtgccctttattcattatataagtcacatacatacataagttacctaagtatcgagctataagtaacaggacatattactggagtgggttaaataaaagctgccacatggccagtcatgctggctcacatctataatcttagttctttgggaggctgaggtgggaaaatggcttgagctcaggagttcaaagttacaatgagcaatgaaggttgccacagcactccagcctgagtgacagaaccacacaagaccccatctcaaataaacaaaaactgggaggattaagatggcaggtaggagggagaactgctgcagcttctgcttggttggacagaacagcatgtggagactcacattgtgaacttttgccccaagaactaccacaggaaaataccaggaaagccaagagaatccacagaccttttgaaggaactggatcascgctgcaggctccctaaaatgccaaaaaagtgtgagtctgcttgctttctcaacagggaagctcgtgatttagggtgagttctcagccctggtcataagctgcctggaaatagacttggtgctgttgtggagggcacggtgggagtgagactggcctttaggactctgggctgcgtgggagcagagtgaggcctatgacttccggctttcccccacttccctggtggcgtatatgactcatcagaggcagccataatccccctgggaatataactccattggactgggaaccacaacctcctcccccacagcagccatagcaagccccaccaaaggagagactgagctaagacactcctgtccctcccccaacctggtggtcttactctacccaccctggtagctgaagacaaaggttataatctcttgggagctctgtggccctgctgactgcctgagaaacctgaatacttgaccaggtgttcctagggcaaatttgcatcctccctataggaccccagctcatgtgctcttgaaagtgccaactcctggctggaatccaaccaatacaagaccagcacactcaataaaaataacaaccaaggaccctgcagagtccacttcactcccttgctacctccatcaaagcaggtgctggtatccatggctacaagacctgaagatgaatcacatcacagtactctttgcagatactcccaagtaccagtgcagagcctggtagctccactgggtgctagatccagaaaagcaaaaataatcactacatttcagctctcaggaaaccccattcctagggtaagggagagaacaccaaatcaaggcagcacactgtgggacaaaagaatctgaacagtagcccttgaatcccagatcttccctctgatgtagtctatccaaatgagaaggaatcagaaaaacaattctggtatatgacaaaacaaggttctttaacacccccaaaagatcataccagttagccagcaatggatccaaaccaagatgaaatctctgaattgccagaaaaatattttagaaggtcaattattaagctaatcaaggaggcaccagaggaaggtgaagtccaacttaaagacatcaaaaacataatacaagaaatgaaaaaagtttttcagtgaaatagatagcataaataaaaaaacagtcacaacttctggaaatcaaggacacacacaaatgcaaaatgcactggaaggtctcagcagtagaatcaaacaagcagaagaaagaacttgaagacaaggctttcaaattaacccagtccaccaaagacaaataaaaaagaattttaaaaaatgagtaaagcctccaagaagtttgggactatgttaaatgtccaaactaaaaataattagtgttcctgaggaaggagagaaatctaaaagtttggaaaacggatatttgagggaataattgaggaaaacctccccaaaacaaagagaaacaaatcctcgaaatacaccaaaatagaaccttcttcaagcataaatctcacaggacctttataacaatagcacaatagaaaaaaaggtattcaagcaataaatagcacaatgagtagaatagtacctcacatgtcaatactaacattgaatgtaaatggcctaaatactccacctaaaagatacagaatggcagaatggataagaattcaccaatcaagtttctgctgtcttcaggaaactcacctaacacgtaaggactcacataaacttaaggtaaaggggtggaaaaagataccgtatgcaaatggacaccaaaagcaagtaggagtagctattcttagacaaaacaaactaaagcaacagcagttaaaaaaagacaaagagagaaattatataatgataaaaggactagtccaacaagaaaatattacaattctaactatatttgcagctaacactggagctccgaaatttattactgttagacctaagaaatgagatagatggcaacacaataatagtgggggactttcatactctactgtcagcactagacaggtgggtcatcaagacagaaagtcaacaaagaaacaataggcttaaactataccctacaacaaatggacttcacagatatttgtggaacattctacccaacaattgcagaatatacattctattcatcggcacatggaacttctccaagatagaccttatgataggccacaaaacaagtctcagtaaatttaagaaaattgaaattatctcaagttctctaagaccacagtgaaataaaattggaaatcaactctgaaaggcaccctcaaaacaatgcaaatacatggtaattaaataaccctgctcctgaatgattgttgggtcaacaatcaagatggaaatttaaaagttattcgaactatatgataatagtgacacaacctgtcaaaacctctgggatacagcaaaagcggtgctaagaggaaagtttatagcattaaataactacatcaaaaagtctgaaagggctcaaactgacaatctaaggtcccacttcacagaactgaagaaacaagaacaatccaaacccaaacccagcagaagaaaagaaataatgaagatcagagcaaaactaaatcaaattgaaacaaacaaatgcaaaagataaatgaaataaaaagctggttctttgaaaagataaataaaattgatagatctctagcgagattaaccaagaaaagaagagagaagatccagataagctcagttacaaatgaaacgggagatactacagctgataccacagaaatagaaaagatcattcaaggctactatgaaaacctttacaygcataaactagaaaatctagaggagatgtttaaattcctggaaatatacaatcaccctagattaaaccaggaagatataaaaatctctgaacagaccaatagcaggcagagagattgaaatggtaattaaaaaaaattgccaacaatgaggaaaggattccctgtttaataaatagtgttaggaaaactggctagccatatgcagaaaactgaaactggaccccttccttacaccttatacaaaaattatttcaagatggattaaagacttaaacryaacatctaaaaccataaaaaccctagaagaaaacctaggcaataccattcaggacacaagcataggcaaagacttcatgactaaaacacaaaaagcaatagcaacaaaagccaaagttgacaaatgggatctaactaatctaaagagcttctgcatagcaaaagaaactattatcagagtgaacaggcaacctacagaatgggagaaaatttttgcaatctatccatctgacaaagggctaatatccagaatctacaaggaacttaaacaaatttacaagaaaaaaacaaccccatcaaaaagtgggctaaggatatgaacagacacttttcaaaacaagaaatttatgtggccaacaaacatatgaaaaaaagcttatcatcactggtcattggagaaatgtgaatcaaaaygacaatgagataccatctcataccagttagaatgacaatcattaaaaagtcaggaaacaacagatgctggagaggatatggagaaataggaatgcttttacactgttggtgggagtgtaaattagttcgaccattgtggaagacagtgtggtgattcctcaggggtctagaactagaaataccatttgacccagcaatcccattactgggtatatacccaaaggattataaatcattctactataaagacacatgcacacctatgtttattgcagcactattcacaatagcaaagacttggaaccaacccaaatgcccatcattgatagactggataaagaaaatgtggcacatatacaccatggaatactatgcagtcataaaaaaggatgacttaatgtcctttgcagggacatggatgaagctggaaaccatcattctcagcaaactaacacaggaacagaaaaccaaacaccacatgttctcactcataagtgggagttgaacaatgagaagatatgggcacagggaggggaatgtcacacaccagggcctgtcagggggtggggggcaaggggagggatagcattagaaatacctaatgtagatgatgggttgatgggtgcagcagcctaccgtggcacatgtatacctatgtaacaaaactgcatgttctgcacatgtatcccagaacttaaagtataataaaaaaaagaaaaataatgtaaaaaattgccaacaaaaatagtccaggaccatacacattcacagctgcattctgtcagacattcaaagaagaattggtaccaatcctactgacacttttccaaaagacagagaaagagggaatccttcctaaatcactctctgaaactggtgtcaccctaatacccaaaccgggaagggacataacaaaaaaagaaaactacagaccaacatccctgatgaacatgggtgcagaaattctcaacaaattactagtgaactgaatccaacagtatatcaaaaagataacctaccatgatcaagtggatttcataccagggatgcaggaatgatttaacatatgcaagtcaataaatgtgatacatcacataaacagaattaaaatttaaaaatcacatggtcatctcaatagatgcagaaaaaagcatttgacagaatccagcatccctttatgatgaaaaccatcagcaaaataggcatagaagagacataccttaaggtaataaaagccatctatgacagacccacaaccaacattatactgagtggggataagttgaaagcattccccgtgaaaactggaacaagacaaggatgcccactttcagtacttgcattcaacatagtactggaagtcctagccagagcaaacaagaaaaagaaagaaagggcatccaaatcagtaaagaggaagccaaactgtcactgtttgctgttgatatgattgtatacctaaaaaactataaagactcatccaaaaagttcctagaactggtaaatgaattcagcacagtttcaggatacaaaattaatgtacacaaatcagtagctctgctatacaccaacagcgaccaagctgagaatcgaatcaagaactcaacgccgttcacaatagctgcaaagaaaaataaaatacttaggaatatacctaaccaagaaggtaaaagacctctataaggaaaactacaaaacactgctgaaagaaatcatagacgacacaaacaaatggaaacacattccatgctcatggatgggtagaatcaatattgtgaaaatgaccatattgcaaaaagcaatctacaaattccttgcaattcccataaaaataccaccatcattcttcacagtaccattcaggactaaaattcatatggaaccaaaaaagagcccacatagccaaaggaaggctaagcaagaagaacaaatttggaggcatcacattacccaacttcaaactatactatcagtcaccgatatagcatggtactggtataaaattaagcacatagaccaatggagcagaatagagaacccagaaataaacccaaatatttacagccaactgatgttcgacaaagcaaacaaaaacataaagtggggaaaggacacattactaacaaatggtgctgggacaattggcaagccaggtgtagaagactgaaactggatgcttatctctcaacttatacaaaaatcaactcaagatggatcaaagacttaaatctaagatctgaaaccataaaaattctagacgataacatcagaaaaactcttctagacactggcttaggcaaagagttcatgaccaagaatccaaaagcaaatgcaacaaaaacaaaggtaaatagatgggacgtaattaaactaaaaagcttctgttcagtgaaagaaacaatcagcagagtaaacagacaatccacagactgggagaaagtctttgccatctatacatctgacaaagaacgaatatccagaatccacaaagaactcaaacaaatcagcaagacaaaacaaacaatcccatcaaaaagtgggctaaggacatgaatgaatagacagttctcaaaagaagataaacaaatgtccaacaaacatatggaaaaatgctcaacatcactaattatcagggaaatgtaaatcaaaatcacaatgtgataccacctcactcctgcaagaatggccataatcaaaaaatcaaaaaataactgatgttggcatggatatggtgaaaagggaacaacttttacactgttggtgggaatgtaaactagtacaaccactatggaaaacagtgtggagattccttaaagaactaaaagtagatctatcatttgatccagtggaaaagaactcattgtatggaaaagatacttgcacatacatttttatagcagtacaatttgcatttgcaaaaatatggaaccagcccaaatgcccatcaatcaataagtggataaagaaaatgtggtttatatgtaccatggaatactactcagccataaagaggaaagaaataatggcattcacagcaacctggatggaattggagactattattctaagtgaagtaactcaggaatggaaaaccaaacatcgtatgttctcacttaaatgtgggagctaagctatgggtacacaaaggcatgagtgatacgttggactttggagactcaagtgaaaaggtggggtggcaagaggttaaagactacacattgggtacagtgtacactgctcaggtgatgggtttaccaaaacctcagaaatcaccactaaagaattttttaatgtaaccaaacaccacctgttccccaaaaacctattataacaacaacaaaaaaattttaactgccacaaagattatatttgcttcaatataaattaggaagtttttccgyatttttttattttcagaaattacttttataaaagagacttaatgatgtagataagatagaaagtaccgttcctggaagtttgttattattcagcttttaattcagcatattaaaggtaatgacagaaaccacaattacttttgcactaaccttatataaaccatctgtgcattagtggaggaatattttaagtacctttcataataattattactctgttcaagttttcaatttcagggggacgattttggtattttgcatttytcaagaaatttagatatttcctttaggctattatacttattaacttatatttttataaaataatttttaagtattgaagtattttatatttataagtagttatcccttttatattctttcttctctttatttgaatatttttacttttttaggtttttttgtagaattttatctgtcattctagctttttagttcctaattgtttcttctttgattaaaaaaagaaaaaaaacaaagaccaatatttcttttttctttcttctttttttcttcttggttgattaattgcacttagtttatttatttttaataactcttacattctgacacctgtactgatttttttctgaatattgctttaactacatgtcacaattttttacagatagaatgccattgttatttatatgtattttttcttgcaattttctttttaacaaaagaatgatatagtgttttttttcattttccagacatgtagaactttattttgctatattgtgttatgggttgcaactttattgcactctgatcagaaaacatattccatataatagctattgtgtagaattttttaagatattttatattaatagcttgatacataaacagtttttatttaataatcctcatttatgcaaaaagcacccttgttccatatttagatgtgaagtttatgtgtgtgtatgtgtatatatatatatatatatttttttttatggttttttgttttttttttgagatggagtctcactctgtctcccaggctggagagcagtggtgccgtctcagttcactgcaacctctgcctcctgggttcaagtgattctcctacttcagcctcccaagtagctgggattacaagtatgcgccaccacacccagctaatttttgtatttttagtagagacgtggtttcgccatgttggccaggctgttctcaaactcctgacctcaggtgatctgcccaccttggcctgccaaagtgctaggattacaggcatgagccaccatgcccagccatatttttttatatataaataagattaataatacaaacacatatacacattttttctgtactatggcttatattttgtctatttgatctaccaaatctgaaaaagcatatattaaaatcaccagttaccatcatttatttcttcctgtaatcctaccagtggtagttttagatattttacatctttgttgttaactgcatatatgttgaggattattacaacttctttatttataatatctctcttgtcctttatggtgcactttgtcccaaattatattttgtctcataataaaaaattaactctggctttcttttgctttatatttgtttcacagcatctattttttccatcttatgtatgtattttttccaacttatgtatgccaccttatttcatattttacaatgtccattcttttttcttatttcttttttaagtctttctacctacttgccattaggtacatcaaattttcatctgctgctttaaagttatacatttgtattttattaccttgacttattttgacttagtcttaggttattttttcctggcaatatataaagcagatcaatatctatgtctttatcgtttaacaaaataatacccatagcataccatcctctacctctcctcttgttgccaactttttgtatttcaggagttttagttacatatatttgtaagtgtactttttacaaaataattagttccagctcacctatacttctttctgtccaactgtaatgggattctggtgctgccctagtgttaattcactattatctctggtgctgcagcttacctaccacattacaccaaaggtttctaccaaaggcaccaaaggataataagttagtgtctaggaggtctaagcttcagggcctgaaataggctatccctgatgtacctccagatacaggcttactcaggttatgtggagaagactaaagattaaattgctggcccccattcctggttactgtactctcctgcttcagatccttagttttccaaagacatctgcaactacttgtgttctgtatgagtttctcatcagctgttttattaattgatgaataagaccctgaagcccatacaaagtctatttttcttttttggcatctccgaagttgaattcaagagagacagggaatagctcatgttagtttgctatgttgtactgcactggcactttccccctccctaactttgtatttttatttattccatcatcctgtttctcttaggaatgtttgattactcatattctaacttcttgaaaccaatgctgaatttattgtcatacttgattgtttaaatatgagagcagttaaaattatgaacctgtctcttattatgcctttggccacatctcgtttcaacgtgcattcttctcattttcatcacttcataaatagtctatattttttatttttactttcattttctctttgacttgaacaattggggaaactttttaatttgtaactttttaatctatttaatgttttattacattgaggccagataatagtgtcttttcaagtttttctttttttgaatgtgttgcttttattgtagactaatactggtgtttttggtaaaagtgacacgatgtgttttagaccttctggatccatattcatttttccttaatctaggaaattgagaattatatatactgaaattatacctcattgttgtattttgtgtcttacagctttggttatctatgttgatggcatgttgaaagtacataaaatatgacttcaagatttatcaacctttaagtatactttgatgttaatattcttactgctacttttgtttgcagttgctggataaacaccagtgtataagtgtgtacctatttttaacataaacataattgtagcactttgttttatagtagctttaaaataatataatcacctgtggttccagctattcagagggctgaggtgggaggatcacgttagcctgggaggtagaggcttcagttgagtggtgattgtgccattgcaccccaatctttgcaagagagtgagaccttgtctcaaaataaataaacaaataaaaatataatattggaatctgtattttttacaagaaaatttaaccaatttaagtttataattataattatgcaagatataggtgttcccaccttattttatgctatatgtttcttttatgtttattggctttcacactaaggcttgtctttaagtttttgaaaagtgtttaaaaatttaaggacaaaataaaaattaaaatattaaaaatgaaattaaaatttaatttaaaaattaaaaattaagaacaaaatataatttgaattcaaataatcatttgaatgtttcatatggaagattttgatacactcttgggttctaagcgagattattaaaatataattgttacattttttaaaaacttatgtttttggttagttttctaaagatatttacaacagatagttatactctcaggttaatcagtatccactattattccttttaaagaataatttcttcattcttatattctgaattttttctcattctcagagtatatctttaagtaatttgttaagtatttgtggaggatatagtttccatgagcttcccatactgagaatgacattctaattcatttatgaactttttccctgaaaaagtggtagggcaagttttattgttttaagagtgttttaaaggaaaagtctaacataaagcttgcatttggatgcttgtattgttttcaccttgtactttaaaaatctttagcacaatttattgaagtaggccttctttcattgattatttgtctttttaatttgctttcattgctctgtttttgttttgttttcattttagttcattaatgtttccttcagttttttcctatttctgttttttttctagaaatactgtcatcagtatctattacgtttttttatggttttattttgtctttttttcgtgtctgagattgtttcttaaatttgtcttgtcatatcagtgattttattttttatagcattaattatgctttttgttaattttttattgggtaaaatatacatgtatagtttactgtctttaccattttaagtgtacagtttaattgtaattaaatatgcttttaaattcaaattcatttatgctttttagcacttctaacatgacttaattctcttattaaatgtttagtcttcttactcttcattctttctcgcttttctttactttctcttcagcctagaatttcaaaaagtgatcttaaaatatttttttacttatgggatacatcattttcacaagtttacttatttgtgtgttcaagttgatattttctttaccttgatttgcagtatttgttaatagacctaaggtgacctgttttttctttccttatcttgaaatgaaacaaaaatcttttagtaattggttagtcagtaattattcactttttgattatgaatctcatttctagacttagatcaggagggatatttaggtgcctcgtgtccagcccagttgctattttctagcagtctgacatctagggcaattctctgtactaaggtcagatactcccaagtattgccacacagttctctaagttaaagagataaaaaaggtaatttccagtcttcactgctagcaaggcacttactgaagccacccatgtctatataggtctgcagctgaaagtatgcagtgtgccatgcatcagccaccttcctgcatttccccctaacagttgctttctgagcaaatatggaatactgaggaagttagagagcccagtttgaggccccattcctgggcaagacagtaggggttgtccactttttgcttgggacagaatggatctcaagccatcagtgagggtggtacaaagtgtctccctgatgtcagaggggatcttggatagatttttcttaattcaacttcatgactcttttatattctatgaactgttgtttttagttgtggtgttcatttttgattgtgagtttttttgtttttaatgtgattacactggcagtttaatggaaggtacggcgaggctggctcaggaactgttagccaggtaccatttaaagtgactgtccaatttctcccttgccattcctcctcaggagtcacagcaattgcaacaattaaaaaaattcgacatttctcttgaagaaaaaatggagtctaaaagttggtttattttatttatttaattctatgaaaaagaatctagaaaagttataaaatgcatgggataataacattaagttatctttatggaaktttccactaccatgtagggaagctataaattgctgcctacttaatagcaaacagttacttatttaaaaaagagctgtaattacaggccatcaactacatccagcagcagcatcattaataacaagtttatgagtacctacttagggagtgaccttgttagagaatctcacccaatgctacatatgctgccattagtgttaccattcagattagattgtgatattgttcagtcagccagttttagttcattttgcatacatgattccctaagtaaaacactttcgttaatactggatagataccatatgtaaacttttcagcagaaattacaaagaaatatggcaaagcttcatcttaacaccaaaatgtagttaaaaacagctttgatttcttttgtgaagctatattgttgtaggtaagacatacatcactcaaatactcacaaagataactaaaaatttagatcccaatctagaaagcactttataaagttctatgcaaatattagttattgatttgcttttgtaaagcaacagcagaaaatgttgcccttatctgattgtaatatttctagaactagagctctcttaaaacatttcctgcraagatatttttcactttttaaagaaaaatgtttccatgctctcacaggataagtagagagagggcaaaagttcagtctcactatttaagtttctgtgtaaaggatgtttctatttctagcacagttatatttggattatatcgatccggtaatatgagtgcatgttctgtattcatctttttgaaaaaaaaattatacacagcaggtacaccttcagaatgttaaatgaaagctcctgttctcataggaatgtgtatgtttatttgtgctgaaatcctgaggtgcatatctatggctttcatattaaagatgactgaagagatgaaaatgatggtcttgtaagttaaaagacttttacctgcagtccttaaccttttctttttatttatgccctcctaatcccaactcttttctccaaacctagcttctctgaagcccaaaaactccaacaggcatctcaggctctatttctattaaccagccctgttaaccttctatccctgcagtcagcgtgcctgaccattcttgcaaactcttggacctgtactttgaaaaggttattgattcttgacataaatctcttaaacatgtggaaagggaactgctctagaataagaaaactcaaccttttaccaactatgcttcatttgtcgaggtccttcacccctgtgaaaagcaattttcttttcctcatgaaatggagataacttgggtccatcttgctcactttgcttggaaagtagggtccacgtctggacaaacaggccaaagacacatgacatctgatctggctataggaacaaaagactaaacaagccatccagcagcaggttgcctctgacctttctcacagggtgatctggagaattcttacaaggtgtttttattaatctccctgaagtatcttgaaagtagattctatgtcatgttcatgtatcctcagtgattagcatagtacctagcacgtagtctcagtcactaaaggccaattgattattaagggaggtggaggtctgctttctaagcttcattaataataacagcagctgattgagcaccattttgcattcactgtcagaatgctcagagactaccagaagtgatccatggtttccagttggagtaataacttctcatctgagaggttatgatgatgacatatggcttggggtttgggggaagattaaatgaaaaatatatcccaaagcaactggttcagttagatacatggttaagggaggaacagaggtaggaagagtcaaatctggttttgtttccgctccatcacctgtttctagtgggaacttgaaaaggtgtgtgacttccctgagcctctttcctcatctgaaccatgaggttcacaacacctgccctgcctcccccagtcatttgcaatgataaagggagatgattaaaaataaaggggcctacaaatgtaagaaatttagtattagtggaaagaaccatgggctgggatttctaaaaccttgctttggcacctaatagccttccaaggtaagctcactagacacaggtccatactatataaaacaaaaagggttcagttagtgtattttgatgcttttcttgtcaaaagtgatggatttgtagaaattctcttaatatacatacagaattaaaataatcgcatatttttaattttaggcctcatgtgtactaagaaaatcttgtccattctgaataatgtgaatttacacaattcattctgctttcctatatgtaaagaatttagctatacttagtaacactccaaactttgcgcagttgttctcacctcactgctaattagttcagttccctcctgttatccatttttggtgagatggaaagggtagaatagatcaacatgggctgtttcacagttttacctgggtttgtcccacaatttgtggattaatctagtgtatttattcacaagaaggaaaatattggctcaggacaagaatttctaagctctgcaaccttgacaactaccttcaggttctttgtttcataaatgtcacacctgttgtatgtgaaagggcccttggagttcctcacatctagcatttttcatatgggaaactgaggcccagagaagcaacttatagaagacacagtgatctgagaaaagaaagtccaaaatgccaacaagctgcatgccacgtatttggttaccctacgaggagttaataaaatctgtcacttgcccatagtgcagtgttcactgtggaatctgcccttttgatttcttgtttctctttaaattgaatcagaggtgttcattttacttcaggtgtgacattttacagcagttagcacatttaactgagaggtgaagctggggtaatcatatttgagttattcagatcattctttcttggtcctagctgagtttattgaggacatactatatgctagccactgtgctaagtgctttatatgggttttatcacttaatcatccaataaggaaggttatgacttataaggaactgaattttacaggcaaggaaagtgaaatgaaagaggttaagtaattttctaatgctccatagagtacatggtagaccagagatgaattcaagcagtctaagttaactactcttcatgcttggcacatggttgaaagaacaagaagtatatcttgtcaatagcgattgcaaatcctmtaaaatcacctaagtgtatggattttctggatgccttagcacatagccatgtatgtttgtgtgcatatacattatttgtttttgtagatttatatataaataatgtgtctaatgtctaagtacttttgcccttttttacgttattagtttatactggtgggggagattagccctaatatttattagagggagaaaaagtcatttttacagcatcctgcacatagcaactcttcaacgaatgcctattgaattcatccttattttctaaggaaagtggcaatggatcagaacgagaagatccaggttttagttctggttttaatggtgatycactgtgaggaaaagaccaggttggctgtcttctccaatctttagtcttcccgtgtctaaaatgagttcagaagagcctacagttggagcgtccactgggcattcaagcctatctgactggctagcctggtgtgtcaggattccaaaagatccatccagactaggacttaggatgagtatagacctcatcagtgaaggggtaggaattgcagggacttctgagcagcactgttgtgtctttacaccttcttccaatctagtcattgagaaaacttgtgattaggttccttgccaggtgcactaatactctgagcatctgctaaaggcaggtaagtaagaattgtaccacttgtgctgtggtaagaaactaaaagagccagattttgtgtcttataaaaataacatttccacatagggtcctactctagaaactgttcaagcatagaagcccctaggagccggtgagggtgcaaggagcaatagccacaccagcaagatggccagagtgaccaggtcaggaagaatgtaagcagtgtgagtgcggcagaatcaaactgaaaagtttcaaaatcactctcagcaccaagagcagtaacaagagctgtggcagtgcagacctcatgccttttgcataacaggaggagcactttacaaggaacttaggaaccctcaggttctgggcagttagccacaggcatccaagggggtcgaatagacctgtccttggttcttccatcttccctttatcatccttcccatgtgtccccatgaacttggtaaaaacccaagggaatacaggttgcaaacccaagagagggytgaggtttatgaggtgctgtggtctccacaggttcacattgctagtctgaaaactccacatttctgtccttctgtcagactcactcacttctgataagaaaacctcttagccttacttgattacagtaatagtaaaagtttatggtccctcatgtacagtcttaaatccaaaacgctcccagtcttttttgtaattttgtgtcaaactaatttagtggtacaacctgacctaacaggatgctatttacagtcttcatgtacctcgcttagtgggaatattcatgtttggtggcaaaaataattcatgtgtttttgactatagagtgcctccaaagaccctgctgtggataataagcaatttgtagaagatacatcgtaactacttttctgaagttggaagaatgctgacttccaaaaacatctggccccaaggatttcagacaagaaattgtgaacccataagttgtttttcttaaatttgggagtatttattgatcccctaaggaaacgaatgattcgttcagttccttcttcttcccttacaaagaaaacaaagcggggggagggacaagcaaaacaaatgtaaactgtgactcttattgctaataagctgtggcagaagctgttgggggtctgagtcttcaaaaggagcagatcttttggaggacagaaatctggatctgtacctttcctgcaattaaaagaaaaaaatatgtatcagagatttccccgtgcaactgcagtcctcctcctctctccctttgcagtggagctgctgatcagaatgtgcttgcaactcacaggaccatagcgccacctttcttgcagatttggaataaatcttcacacgtccaggtttggaattaaatcacactatcagctcacttgcctgtgtatgccgttcagttagctagacttagcaaggaaacagttccttgacgctcaaatcataaaggaagagctgcaaagagggcaataaaaagtgttttcttctcttggtccctgagcaattaaaytggtaacctaatctgatgttagggagtatagaccataaactgtgtttaattagtttgcacccagtgtcatttcacacagtagacactttaatttacaacttgctgcactgcagcacttttctaggccttttactatgtaataaggcattcttgtagctgctgaggcttyacaaatatagatacactttcttagttcagattttttctttcttttcaattttcagttgcaaatcaaacatgcagttacagaagcagagattcaaaaattgaagaccaaggtaagcaccgaaacatggtgtttgaattttactttttaaacttcagatactatgaataaatccaatcctaggactaaaggttttgtccctgtatatttgaaagaatgcaaatgtgatagattcattttcactgtcaggtacgtagacaaacctgccagtgagagcaaacacccacatccccctcagtgcaaataacacaatattttagatatatatatttatgtatttgcacatatgtggcctctgagatttccttaaaaagtaatatttttaatggttcaagtatgcaaagtatgttttgattactaattccttaagcaaagctactatatctcctcttcacttaccttattataaatagatttaatcatttgtaggaacaaatttagtatagcacatcaatgttttataaaccatttctaatttctaataattaaatcttataaacttaatacatgcataatttaagtgccaggtactactggaaatttttagttgtttggttcacataatttaaatttgtgggggagaaaaggtcttgataaaagggagtatgtattattagtctatatattttcattgacaaactttaaggcactcgtatgagacacaattctagcaattttgtttagttttatcaaatatacaatttcaaagatttaaaaatatattttaaattacttttaaagcaatattctttattgtttcaatggtcttttaaaaattaaaacataattaccctcccccgcccccaatcaccaccaccactaccactaatgatctcttttgttgttcacattgaacacttgttttggtttctccgtgtgttttaaatggagatgaattagcaaggctattttggttaaatgctattctcagctaattcactctgcagctctttagtcaaaatacgactatacatcattcacggtgttagtccagctccgtgaataataattttaaattagtggcggttgctaaataaacaacttgatacaaaacattgcttaataaaagatgcagtnnnnnnnnnnnnnnnnnnnnctccgcctcccgggttcacgccattctcctgcctcagcctcccgagtagctgggactacaggcgcccgccactacgcccggctaattttttgtatttgtagtagagacggggtttcaccgtgttagccaggatggtctcgatctcctgacctcatgatccgcccgcctcggcctcccaataaaaatatattttaaattacttttaaagcaatattctttattgtttcaatggtcttttaaaaattaaaacataattaccctcccccgcccccaatcaccaccaccactaccactaatgatctcttttgttgttcacattgaacacttgttttggtttctccgtgtgttttaaatggagatgaattagcaaggctattttggttaaatgctattctcagctaattcactctgcagctctttagtcaaaatacgactatacatcattcacggtgttagtccagctccgtgaataataattttaaattagtggcggttgctaaataaacaacttgatacaaaacattgcttaataaaagatgcagtaaataacctattcctgttttaaattgtcattgtctcttgacatagaaagaattgaagattttttaaattgttgttttaaaaagatctctttttccctgtgattgtgttttaatggcgcttatgtattagactatagacatttaacttagaaaatactataaattagcattttatattttttcatcattatattggcatgtaatatccacagattagcactttattatgattctttattattcattttgataatagaattcctaatcttgacattgttttggatgctttctaactttgtaaactgttttgcaaatgtgtttagttaaaaatatttgcaaaaacatagatgtgtgtgtatataaatacatgtttacttttgctaagtgctatatgattttgaacattgatagtttataatgactttgcatccttttgaactttaaagaaggcatataaagtagataaagtaccagtttgaaggccagagagttattgggaatgacttttgagccctcacctaaatgatcagtattggatttctgtagaaatgagggtattagactagtttactatctattcctaagagtccctagaagcagaaaaacaaaaagctggttatggctttctgttccgtgggagggaattaaattaaccaagcaaaaatttatacttttacttacactatcttttatatttttatgggaattgaggtttataaagcttgagaaattcattacactacatgtaaaataatgagctatagaatatgttcatgttccttgaaataaagaatgaaataagatcaccaaaagggttaaaagcagagtgaaagtggttaatgtttatcagatgattcttatgcccaaggagctatttcaagcattctgatgtgttatatcacaattctgttgtatggatgatgtaattgagtcttggagaacttcaattacatgtccaaggtttaatggccaataatgacagaactgggattcaaatccatgctgaatgactccagagatcccctcttaaccattaagccatactgtgcttctaactcctctctcctccctggccctctccactccctttttagttaattttttatatataattatatattttttaaaaactctcaaaacatgttgacattcgttggatatatcaaactctgaaacatcttttactgctcacagaatttcagatcacctggtgtgatggaaatatcatgtgaggtggaatccaatccatgttttatcacttatcaaatgtgtgaccttggacaaatcatttcacttttcaaggcttccattttatcatctgtggaattataaaaataatacctgcttttctcatctcaagtggtttcagtgattgtttatgataatagaacttgatctacaacatgctataaaaatgagagatttttgccacaaaagtggccaaattatctttgccttgacgtttgctttctccagctgcaggcagcagaaaatgagaaagtgaggtgggaactagaaaaaacccaactccaacaaaacatagaagagaataaggaaagaatgttgaagttggaaagctactggattgaggcccaaacattatgccacacagtgaatgagcatctcaaagagactcaaagccagtatcaggccttggaaaagaaatacaacaaggcaaagaagttgatcaaggattttcaacaaaagtaagccgcttctaataactaaagaatagttatgtttgtctaaagaaggtttatgtccaataattttgtaatatctagtggaacagaaaagatgaccttagagatatctttcctatccaggagcatagttacagcataaatacacattaagttttggaagtcacttctatcactttttcatgagattatgttttgtatattttatagtttttggctgccagggcctctttgctatttttgataattaatcgttgtttrtaactgttaaaacatctgaatttctttattctttttgaaacacctctatgatttagaaacaagaagcccagcggaaagtcatgtagaatgactgactattggatgtggagcacgcaagccacagctggggcctgaatcaggctgctcctctctattcttagatcagtaactacagaatttcccactacagacagtgcacatatcgactagcaaggccccctgccctgccactctgcatttctcagctgttgagagaatcaggagggcctcctttcactgcagggagagagaccattaccacattctgcttttgattttcaacagctgtttctgagctactgctcctttgcttccatctcttggatctcggtgtaatgtcacggagactgaccacggagatttttactagatttttttcatcagttacttctggctagttagaacaaataagtagtaccagtaccttttctggtcttccatgccaagcctcagaagctaagcatatatgtaagattaaccatatttctgttatttcctattatgtggaagaatgtttttaatatttaaaagagttttgctatcaaaagtttcttgttaaaaggggagtaattattctctgtgactataaattcaatacatcactgttttaactatttgccaaactctttttcatgaaataattttatagtaaattttgctaaatttgcatattctattccaggttttcaaaatggaactgtttctcttctccccatattatccttaggtctataagtgagtgcccctctcgatgtttctgacccacccagccccctcttcactgttattcatagaaatcttacaattatctttttcgaactcttatctagttacatcagtttactatactatgcttatgacattggaaaaatggaattatttctacctgacaagtaattatctccactaaattacccaatgtgggtcattagtgcagtctttcctatctaaatatgtatgggtgttctagaatcaggagctacgaaagaaaattatagtaagcagaatcgaatcatttttctttgccttgtgacccattaaagatgttttagtttctttcattactatactttttcctctaactgattgaatgttgtccatttaaataactgttcagttgcttatcctactatgcagtttattgtttcagataagaactttcatttattgagtgtatgatataatcagaactattattttcttcttaagagagcttgatttcatcaaaagacaggaagcagaaagaaagaaaatagaagatttggaaaaagctcatcttgtggaagtgcaagscctccaagtgcgggtaagttgtgttccctaagacactaaataataagatggttttgctgtacttggaggggagcgctagtttagagttttataaatggatttgtttttcctagattagagatttggaagctgaggtattcaggctactgaagcaaaatgggactcaagttaacaataataacaacatctttgagagaagaacatctcttggtgaagtctctaaaggggataccatggagaacttggatggcaagcagacatcttgccaagatggcctaagtcaaggtttgtttaacccaaccacaaaaatcatttttgatgactgtgtaatttggccttttatttttctttttctgacccagagatttaaaagttggaaataccttcctactatgggaaagaagaaaaggcttatcaaaataggagtcaatcattttagctctcgtcttatcaaaaataaatactttaatatgtagcattaacaaatcacaactaaagataagccaaatactattttaaaatcatcatacaattgacagatttaataaactgccttacaaattgtagttcatcctatctaggatgaactacactacttatgtgttaatgactaaggtttagattttttttttttttttttttttgagagtctcactctgtcatccaggctggagtacagtggtgcaatctcagctcactacaaccttcgcctcccaggttcaagcgattctcatgcctcagcctccccagtagctgtgactataggcatgtgctaccacgtctggctaatttttgtatttttagtagaggtgggcttttgccttgttggccaggctggtctcgaactcctgacctcaggtgatccacctgccttggcttcctagagtgctaggattacaggcatgagccaccgcgcccagccaagctttagaatgtttaagtcactagaataaagatctttttcataatatcagaaggcagactgctgctttcagcacttgagattcatgtagttaacgaagtccatatagttttgtgcttttaccatggtgtactgtgtatacttcttaggtctttcatgtcaaagaccaagtaagaccaaaacactggaaacatttggtattataaatgattatcttcattcatacaccaaccataaataaattacttatgttcttacacacacaacattcttagattgcacgtgtatgaacatgaatgactgttttaatatctgtggtatatttgcaaattagaaaacacataataattataaagataaatacacaggaatgtgtggcttcatctttttaaatatatacatagtagtccctggaaaatgaaaataaaagaatgtggtgcagcagggttgtcatgacaggaccgacaactcagaggcaacactttgacgtgcagtaaaaccctgttataatgggctttttagttttttcgtgatctttctcacatattaaactgtctccagtgaagttttcctgataagcaagtgtttatatcctatcatgaacttttagaactaagctcttagccattaaaaatggaaaggattagaaatcttcatttaaaattaaaatgatatctagagatttgaatccattcactgggtttatatccttctaatgggttttccctaaataggatgtaatttataaatagtgcctcttaggcagctgaaagaggaggatttagcattagcattacgactaagtgaggagctgtgtgacttcaggaagagtatttagcttctctgggttgatattactgtgcatattattttaaaagtagtatttccttcttcaccactttaaggcctgttttgaaactatatggtttagtctttgaagccaaaaaagtaatttatttgagctcttatggaattataatttttatacctggaacactataagattgatatctaaagaaaaacatcaggaatcaaaccaaattttttacctttttgaatattttaatttttaaaaaattatagtttatatataataaatacatattcctgctgtggcatactcaaagtatgagcagtatctagtagcttttcatttctattcatttctttcagtttagaaatctgtatcttttcaaacatataattaatggtgtttattaaattatatgactacagaagatcaacacactatactattaacatgctgatttggatcaaaaccttacatttcatctgaaccctttttctattctacaccctccattttgccacataattatcagtttccctagcaacactgttggttcacagtgagatgtggagactactaattcttactgaagccaatccatgcttgtgcagtagaggtagaatcagtcatctcagacattagtagcatacatatcaagtgctcttccagttttgctgtgaggacagtcagtgataaatctctttgaatttcagttgcttgatcacataaactaaaatggcgtggtcagtagctagataggaatgctctggaaagcacttttctaaattgatcccttgcttctgttgctagggaatgctgaaatactagaggtttagaaaggaaagtaaggctgcagacctaacataggccattccacatttaaaaatccaccaccaacgttttgtaccaggagaggtatagcacttccagtagttcccaaagttcctagatgcaagtgttatcctcccgaccttctactgactgtccaattctgatttgcttttcaggcactggagtggtaggatgagtggtttagcatgtttttaggcattgaggtagctcatgaagcaaaagaatgatcaagtgtaggtcaatgaaaatggtcagaatgaaatagtaaaaggaagggaaggcaagctaaggaggaagaaaggaagagcctctgagcagccgtttcttcatgtgtactcatgctcttccaaaatgatgtgactcttaatattgaattataaatttttgaggagtaaaacctttttccaaaccatacagaaatttagcacaaatttaaaattacgtttgaccaccatttgtatgtttctcactaaaacctaagccaactcaagtattattaaaattttgataacaatcatcagtacaaatttgttatttaatatattgtaacacttttttcttatcatgattacataaagcagacgtaacaaatttttttccaccaagagccataacagaccccaaatccattctagtttatatcaatgtgctggtcaagtattttccttgtgttccaggaaaggaaaaatgataattatgccctgctgctatgtttcatgcttgtcatttcttagtgcctaaataatgccaggattaggataaaaacagagaataggtatgttagagtgatcttggtaggctaaaagcttgtaatattagttttattggatttcctagaaaagtcacagaagcaatacattctgagcttctagatattccaggatccttatgttgataccatttgctgcttcaaatattttgaaggctggtttgctaaaggattgtgcatatcccatagagatactgaaagaaagactagggccagtaggtggaagttacctatgaaggcatatttctgactattctaccgtgagagatcaggagtaagtgtgatatcatttaaaaaattattttgaacaccgaaaacctgcttccaggcaggccttaggtggtacactgacttgtaagagaaagtggctactaggcagaaagaaagtactaggtcctgccgattatactgcaaggtatatgatttgtgggatcaagaatgaaagaggaaaagtttggtaggagacaaataaatagaatttaaggcactatgtaagcatctcaaaagatgagagggaattcaaagaagagaaaattgaataacattagcataattttttttctgattcatggtctttatgttgaaaaggtagagccatttgaaatgacatagtgtgttcttggagtagaagtgggctttgactgcagaagggtttgtacataatcttgtaagcattgtgacccattcacagttttgaagcataacaggaacttagtcacttgtaggtttgtaaatgtgattcaaggatttctgtgaaatttgaatattgctaccaagtgctgcttcatttcattttcacacctacctactcagtgagtggaccaccagttaggtaatactgcatgttatcttcccaaaagtgtgaacaaggagggttatataaggcattttatactttgttcccttagttacttactgttccttagctctaatgagaactgagcaagaaaaaaatatactccagcctgagtgatagagcaagatcctgtctcaaaaaaaaaaaaagtgacattgaaagctattaaatatcctgttaatattagcaacctgaatccagaaatgtaattaaaatatatatgactaacttgagtctatgtaaacaacacaaaattgttttaacattagaaaacctactcatataaaatcaacacattaactagaggaaaaatacatataattatttcaatgaatgaagacaaacatttaatgaagtttaataccttttcaagtttaaaagttttatcaaactaaaaatatggaggaacttccataacttgatattgtgaggctaacaaaagtctctgtcacacattatatgaagtggaaaaatgttatactccaagaatttcctttaaaattaagaatgcttttaatatttcatcactaagtgtattactactgcttctattcagtgttgtcctagaggtcctagtaagtactaccagataagcaaaagaaatcaaaaatttaaggagtgaaaataatcaaaattttcattattcactcataataaaattgaatacattaaaaaactcgagtcttctgattattagatgttataagaattaacagggtagatggatttaagaagcatcagacatcaatcatttccaacaaacaaaatgtaattttctaaaatatgccataaaaatagcaaaaactatgtataaggtagtcagtgatgaatttaacaaaagatctcaagacccatggaaagacatgaaagaagacttacataaattgaaagagaaaggaagcctcaatattataaaaatgctttttatgcaaaattaatctatatatcccatgcagttttaattagaattcaaacaaggcttttaacttctttagaatttggtaagttgtttctaaaatatatatggatgaattgcttggcccagaatagggccaaggtgaattgcttggcccagaatagggccaggttctcctgaggaagaacaaggtgaggaacttgttcttctagatactgagattcattatgaagtaaaagtgattaagaccacgtgatatagtcccagcaattgtcaagtggtctaatatgcagaatacagagtccagaagcagactgacacatttatgtcagtttgagaataatacagagcagacactgcagttctgtgggtaaaggatggactaataaatggtgctaggaaaattgaccatccatatggaaaaaatgaattggattctacctcacattattcatgaaataagttccaaatggattacagtctcaaatttgaaagacgatacttaacactcttagaagaaaatgtgggatttcatatgatttctttttttttttattattatgctttaagttttagggtacatgtgcacaatgtgcaggtttgttacatatgtatacatgtgccatgttggtgtgctgcacccattaactcgtcatttaacattaggtatatctcctaatgctatccctccctgctccccccaccccacaacaggcccctatgtgtgatgttccccttcctgtgtccatgtgttctcactgttcaattctcacctatgagtgagaacatgcggtgtttggttttttgtccttgccatagtttgctgagaatgatggtttccagcttcatccatgtccctgcaaaggacatgaactcatcattttttatggctgcatagtattccctggtgtatatgtgccacattttcttaatccactctatcattgttggacatttgggttggttccaagtctttgctattgtgaatagtgctgcaataaacatatgtgtgcatgtgtcttaatagcagcatgatttataatcctttgggtatatacccagtaatgggatggctgggtcaaatggtatttctagttctagatccctgaggaatcgccacactgacttccacaatggttgaactagtttacagtcccaccaacagtgtaaaagtgttcctatttctccacatcctctccagcacctgttgtttcctgactttttaatgatcaccattctaactggtgtgagatggtacctcattgtggttttgatttgcatttctctgatggccagtgatgatgagcattttttcatgtgtcttttggctgcataaatgtcttcttttgagaagtgtctgttcatatccttcgcccactttttgatgaggttgtttgtttttttcttgtaaatttgtttgagttcattgtagattctggatattagccctttgtcagatgagtagattgcaaaaattttcttccattctgtaggttgcctgttcacaaaaattccaaatcgtaaaaaggttggatgaatttgaccacagtaatattaagaaaatctgatcattaaaagacattataaagtaaatggaaagagaaaccgaaagttgaagagggtatttgtagcacgtataactaagaaaaaaatattgttgtccacaataaattaagaactcacataaatcataagaaaaacacaaccaacatagtagaaaaatgggcaaaacgcataagaagttcacaaaagcaggaacctaaacattagtaaacatagacattcaacttcactggcaaaaatcaaacaattggcaaagataaagtgtcacagtaaaatgtgatagccagcacatggaaaaacaggaaaattcayaaaactgtttcattaaaataatttggcattatccattaaaatagaagatgtgaaaatcctatggcccgacaaatttacttcgatgtgtatatatatcctccagaaactcttgtcagtgtataccaaaaggcatattcaaaaacattccatgtagcattgtttgtatagctgcagtaaaaagttaattaattttagttacacctttcaacataatgttaaacaaaccagctaactaaaaaacaatttgcagaatattatatacaattcactaccacgcatctgaagtttaaaagcaagaaagactaatcaatatattctttagggataaatttatggaataactagaagaaaatacaggggttacaactagaaatagagaacagagagggcttcaaaagtaataattttatagtttaggcttgatggaggtacatggttgtctttttttttttctttcttcatatgagttacatatatggtatacatttttatataaatgttttagactagaaactttaaaataattaaaaggtaagaataagaaaaccacaaaagagtttttaagctaaaaaatatatattagtttaaggtttagtaagaaaataaaaaaggatagcatcagccagacatttatatccataagggtgctcctaaggtcattggactcctccaagaaatcatttcctttgtcctttttgcctttctcttgagccctcaaaatcagcagctcttttcagatacctgtgggtttgaggccaggccagacccctaccaccatatctgatttatttcctgatagagtttgagagtacattaagcattctcttttagcataggaacctagaattttaaaataaggttaaaggcatgattaaagccagaatttattagatggaaagtcattaaaagaaaagtgaatgcttgcactgcattatcaggagagtctcatacaagagcattagatacagagcaatgaggtaattatttcatgctgtcacactgtttagttctaaattggagcctagggaattctagagtagattcagcctttttaaaaatatatatatattttttgcatacagatataatgtaaactttcacaattttcatttttcctgaaaacttattttcaattttgtttaatccccaataaataattttgaccatgaaatattgaattgcactaataattaaagggtgaacattcctggtaaatcactatgggaaattttaatgaacaagccaagtgaatgagaaatcaatatttattgattattttctggtgtatcattaaggccaaaatctgtcctcttacttaaaaagcaaagcacctaaattgcctgtctagttttgtgcaagttttgaatctgactacttgtaaactattaaaacttttgttgccaaatcagtgagacattctaaaggaggtattcagttgcaaattgacagctctgcttcattcatatttctcactgcatcttcataagttcgtagaatccaccagacccttcagtcatactgagttataaaatagtactgggagatatctaggccaggcacggtggctcatgcctgtcttcccagcactttgggaggccaaggcgggtggatcacctgaggtcaggagttcaagaccagcctggccaacatggggaaaccctgtctctactaaaaatacaaaaattagctgggcctggtggtgggcacctgtaatcccagctactcgggaggctgagatgggagaatcacctgaacccgggaggcggaggttgcagtgaaccaagatagtgcccctacactccagcctgggacagagcaagactctgactcaaaaaaaaaaaaaaaaaagttgcttcaagaggaaacacaatgttactttgtcagaatgagctttaacttagtaattttctgttcattttaggaaaagtgggctactttgttttggcttttgaattttacttgcttttaatagaacaagatacattatgatcttttataagtaaagatcattttaacccaaatgtgagtaatttcttttcaaggaaacttcagaagactactgtattccaaattatttcttatattgatatatggtctgattcaccatgatatatacatattatggtctggttcacctggttcaccatgaaattctaattatagattaaataataaccatatagctatgctaagataaaattgactaggctaggatatcagggtagagggatctaaaagtatgaaggagaagatgctacccagtgtggtttgtatatgaagtgttgccctgggctcctacattgttttcaaggtgggtcacagtgttcacgtaagatatctaatagccaagagggaaacatgaccagtcacagaggttgaagcatctgtaaagttaaaactgaacagatgaacagttatttagtaccagaaaattctgctctgtgtatggttctgaaaattgtgccaaccatattatttcagcaattagagtatcaggtccatcaggttatgactgagttcctttaagtagacatgaaataattctgttttaatactatacagtaatcatgtctaagacctataaggaataaatccacttacaaggaaactaaagaaacattagaacataggtataccaaaaaacactgttgcttgtgagtttttgatgacactaagggtttttttttgaacattgaaaaggtcattcaggtattaatttttggttttaagttaatgtttgatttactcaagtgacattatcaaaaacctaattctttaaatcttttaatttgttgaaagtcactgttgagggatttttattatttatttacaaactttattacaaactatttccaagcttaactaatgaaacacctataaaaatttaacgatacatttacaaatttgatatattccattttctattaaagtactattaagtactattactaggagactgacagtctttgcaagtacttaaaaaattcttatacatctattatattacacttccaaggattgtgaaccttcagttttcttacattttctaatgctttacataacaaaatcttcccatgattgaaagatgctttcctttttagggaaataactatcatctcaggtaactgagtttactttctgtaagaggcctacaatctgaattcttcctgtactaatcaaggatgctattgtatcacaatatgtaatgggagggtgtctacttagcatgcttggggttacctaatatccatagattttgattgagaaactgattagattcttgtaggcaaccctgagtgaaaacacagaatcttgcttattgttgccatgtcaaagacactacaatatcaatgtcaagaaaaagacattcacatatcctagctcccatgacccagcttatccacatgatgtcatagttctactcatagatgcctgcagtccccaactagtttgtcatttgattacatttttgtatttccctggcttttaggttatgcagatctcttttccatcagaatctaaagacatctgacactgaaagaaccctgagatatttaaatgcctttccctgtggtctaaatctaaattccatatcctttcatagtctagaatcaagcaactcttacaagtgtttcaaatgatatttgatagcagttaggacatttcctatagttttttctgactggtagtcactgcctttccaggtagtctagcggtattactgaagagttgtttctgagatatggataacagaatttaagcctctctgtccactgagaacaggagtgtaggctgatcataaactgaagaagggtatattagatatcagattgcaccagagaagcactacactaacaaataaccaacttacattttgaaggctatacagatagttttgagattgcatgtattgacaaaaaaactgaaaaagggatttcttaatattctttcaatgattagcaaattaaatgtatagctcatacaacaaaagttcagacctagttagaagattagaaaatagcaataatcttctgcttgttctggaactgttgaaagatacccttcctccataaccgtgtctaattcagtacatcttccccatacaatactaaaatgaagtaataactgaaagctaagccatagaccttaggccaaattatctggcagttagtaaggtagcaagccaggcagacaatcaccacagatgtaatgaaagagcagccttctctcatggggaagactgatagtcatgcagattttgacaaagttccctgggcttatatcaacatgtggagatactgagtcctaggacaccagatctaattaaattaaaatagaattaaggtgcctttaagagaaaatatactaaatatatgtttttctctatttttattcattttaactacgcaagtaatacataaatgtaaacaattacataatacaaaatataataccaaatttttaaacattgcaaataagattaaagtaccctttgaccaacatctcctaatctaataccttctttgtaagtaagcactatatcagtaggaagtatatctttccagtttgttgttgttgttgctgttgttgttgttgttgttgttttgagacggagtcttgctctgtcacccatgctggagtgcagtggcccgatcttggctcactgcaacctgcctcctgagttcaagtgattcacctgcctgagtagctgggattacaggtgcacgccatcacacctggctaatttttgtatttttagtagagacagggtttcaccatgttgttgaactcctgacctcatgatctgcccacctcggcctcccaragtgctgagattacaggcatggcatgagccactgtacccggcctctttccagtttttctatgcaactatatgcatatgtttaccactagaaaatgtattttgtgttaatgttttctaaatattttaaatgagtgtacatgttattctgcaacttgctttacccacttaacatcttgctaatctctttataaagatatttattgagtgcttattacataccactcttctaagcacttttatatctattaatgcatatataatcttcatagcaatacagttattatgttttgttatcatgactgttttgcaattgaggatcctgagggacagaggttagataaattgcccaatttaatgggacagccgcttgttctgaattctattcaaggaacaactccaggtctactctcatggtaactgttttacactgcctctctgagatacataaacttacctcctgaaggcaattatctattaacccaaaccccagtgggcccaccttttatgaacttgcagtggctgcaaatgatatgcagatactgttcaagttttaaaatgccaccaagtgcctcatgatgctcagcacctccattggtaatagcacaggcgaggcagtgtgatggcatgaagtatggctgtttctgagtgggttagtgcacgtaactgcggagcagaccccattgttatgctgctccattcccctagttccctcgctgcctgtatctgatctgtgggcagcattccacttacgtcaaaaataacgtcaatctagtgaaaaaaactgtatgactcacagtattactgtagggaactggtctctgtgtaatatgatatatagcatcctaatttcttagagcatttttcataacagctgctaaaatcatcaaatccattaaattcttttaaaggatccaatttgtagcagtattgaaaatagtcttaaaatgcaggtatagaggtggagtctctctcactcaaaactgctctgtcattagctacttcatatcttctgtgtatttatctgtctgtatttattgattcacctcagtcttctcctgttctgtatttctagctgcattgcgtcagaggtaggctatttcagagactggagggtctgagaaaaatggaagataagaaagcagaggaggaaaaggaaattttccgctgacccttatggacaacagaacaaggcacactggagaaacgaggaaaagaaagaactgaggtcttgggcttatgaaagcagtgtaatattattgactaaaatatctgtagagaacgaatgacagtgagagaaatggccacttaagcctttacatctagcagcacataacttagaaacactgagccagttggatttcccctgccacactgccatccacaaaactgacagctatttttctttgtaagaattttattcttggatatatgtaaagccaaaaaaaatccctcagtgttgggggtttttgtttcctctgatgctatatgcttctgcaagtttgcaaagttagcccttgacatgtgcttttgttgggaacataaagtaagaccaaaaagaggactcaaagaaggcagaagaatgtgaagtttacttccagacttgagattgaccttccagaaggagaataggcttctgaagcctgagctctattcactctctgtcacagattaactgtgtggtgcaagttaatacacaaattgaccttctttaagcctcagttttcttatatgagaaataagctgggaccagaatcccaaggttattttgagttgtaatattaggatttttgtattacatgatggaaaaagatagcatgtgatggtcagtcacccttctagttacccagcagcataaatcttatacacattttccttccgtgtacacacgtgtcctctaatactgttaagggagacatattgcatgtagtgtctttggtaggtgcttcttgtggacagtattccttccagcttccttctggtgtaaatgctattaaggcgaaagttttcaacttcatcctatttttctggttcttttaaaaaattatttttagaatggaatataaattactgatttgtaatccatgaatcactgcaataaagtagctctgtgatatttgctttcagaccttcaaaaattgttaactgcatacaatgtgttgttggctacttaggtaccggatataaggcacaactttttagattccagctaacagcatcataaatagatataattttatgtgtgtgctcaagcagtttgcacctagtcagctaatgttaaagcagatacaccagattgccatttttgggttgtctgacacaagcaccaggcaaattattgaatagtaatagagcaaggagtcccagagtaaattttctgcactattaaaacctgctaataagtagttctgattttctctcacttatatttgttcagcttccattgatggagtacctattgtagtcctggatattgggttccataccagatcctcagggccagcattctactgcaaaaggaaccatgtttacaaaagtggagtgagattcttccttgggtctttttgtcacttagtagccaaagctgttattaaaccaaccagaccaaaataaaaaatcatccaggaagtaatttattctatacttttcaacatgtcatcctttttttttatcatgttatctaacatatagggaagattaattataatattttagatggagcctattggagaaatgagtttcctagactagtcacgtcatatatgattttataacccaaaacaccaaactctaatggcattaaaatcttgcaatgggaggtttatcaacactagctaaatcatagtggatagcctagtagcctggaaatcaagacactagagtaatcatggtagcgcattaattagttatgtaaatgagggcatgctactcaagttctctgagcttcaggagagaaaaaaaatacttgattggtacctcatggggctgttgtaaggaacaaatgagatagagtatgtggcatgatttgtattatagagcatacaatccaaatatgagctagataaggcataaaacgtgcaagtactacatacagtgtttctaattatattacagctttcatctaygtggtgttccacattttatatttaagcaagagcttataagattgactctctcccagttatcacaactaatgaactcttaatgggcagctacaaatatagattttatcggaaggaggaaattaaagtgatcaaggaattattttttctcccctgacatgtaaaaagtaaagagactgctaattagaaaatatttagctgttctttataagtacctgaatggtctgaattttctgagtattcattcttcattcagatataggaaatgaaaagtcaaaaccttctctaaatattgtcattcaatggatgtatctcctgggcaaaaatgtagttaattttgtttgttagagccatatactaagtgctaggtttcatagacaagaggcacaaactgaggtgcttccttgctttggttttgtagtatagcatatttagagcacatctagaataatgctgtaaaaaggaattgcctgagctaataatattataagaaattgtttattctgttaatacaagtacataattttctgcaactcagttatttgcactcaattattaactccttgaacatgacttcagctaatgactgccactctgaagagataaaataggattaatgatcaaactcctttatttctaaggagtgattacatatgcaaatgaaaggagtagtagcatttcaaataagttccaccagagagtacttttccttaaccaatatccaggtatgttaatgggtacctttcctttagaatgttaacttcggggtcctaacttaaaatctaggtagcaaaattaaaggtggtaagagccaggctaaagaggactaattgaattctctctgtggcctttgctgttaatagttcattttctttgtgtcccactttactctctttttcttttagcctttttatttaaagacttaagtatttacccttcgaaaatcagtgtcgtttctggtggggagagaaggtattcacagagatgagtcagaggcacatacaaataacttgtaatacaaagttagatgttaatgaaagaaaaggaaatgtttatcctacctcatccacaatactagtaaactaagtacttacgattttttaactgtttgtttcttcatttgtgtagccagaccttgtttcttttccccagctatcgtcaatttgctgattaggtaaattcctcactggtctttctacaggtttcaaaaaggaacaaggtagattttcagaaactgttttgggttgaaaattatatattaaaatgaaaatgatatagtacctgaagactgctagtaaattttgctacagtaaatttatgatagttaccttctgttgcctgtagttgaactggaaacctgactttgtaggttttttgtccttggtttctaagatctgtcaacttttgatataccctcctctatatctttggtcatctaacttcccaacatgcatacacataaatagtaaatacaaattagtgatttttataattatattgcaggaaggttgtatgcttttcggatgttggatttttatagcgccttcatcatctttagtgttggtttcttcctttgactttgtatatttctcctaagccccactgatttcttggttatttcttggttacaggctgtcatggtggtcacctgatccttacctgatgttactggttaccttgagattttatcagtgtctgygrtctcttcatcagttctctccaaaggtttctctcactgattatctttcaatattcttagacttgaatgaagcagtcccagagacagagcgcctggattcaaaagcactgaaaactcgagcccagctctctgtgaagaacagacgccagagaccctctaggacaagactgtatgatagtgttagttccacagatggggaggacagtctagagagaaaggtgagcacccttgaccgtttcctgatttgtactgttggagtatatcattgttcctacagcttattgaagattatgatttttctgcaaacagagtctatgtcctagttggtaagcagctagaatagttcacgtctttgtctcctgaattctttatattgttgtaattcaaaatattttgtctattcattcagtgaactaaccaagagcattatctgtattgtcatatttcatgatggtgcttttgatattcagctattggttttacttagtgggaaataatgaacgtacaagtaattgtttctgtaggtcttaggtatatgtattagtgacgatgttaatatggtgaattggtatgaaccatgcattctcatctgtaaatcaacaaaaactggttttcatggggattcactaataaaaggttggtcttatttcaaagtaagtattgcatagaactgatactcagtggcataaccttccttataatctcttataccaacagccatcaaacagtttctataaccacatgcatattaccaaattacttccacctaagggtttgagaacgtcttctccagaatcagattctggtgttccacccctcaccccggtggatagcaatgtgcccttctcgtctgaccacatagctgaatttcaagaagaaccactggacccagaaatggggcctctstcctctatgtggggagacacttcactgttttctacttcaaagtctgatcatgatgtggaagaatctccttgccatcaccaaaccaccaacaagaaaatattacnagaaaaaggtattgttaatttctttttctgacttcataacacctcagcttgtacagtataaaaatgactttttctcataatcataagtcatttgttttctcatagctaataattaatattaatttctttttatattatagaataagagaaacaacccctccatgtattttactttaatttagttttatcttttcctatctggttcagtatttttatctcttcagctctctataagtttactactcaagggagttcttcaggggagtggggcagcccagagtttcaacaaacactaacacagtcataaagaaaaaaacactacatagtcatatagaaaaatatagagcgattttgtagaatagcagcccagagtttcagtaaacactaacgtagtcatataggaaaaaaagacgaagatcaaagtaacacaggcatataattgatacttaataatgttcttggatgaattgctaatatacctctccacgtaaccagtgcagatcttctagaagagggataatcaaccgaatgtagtctccacctgcttttgtaaatgaagtcttatgggagtacagtcacacttttttacttacatactatctattttcatgctacagtagcagtgttgagtcgttgtgacagagactgtgtatctcacaaacctaaaatattttactctgtggcccctgaaaggtaaagaaagcttcctgwtgcctggtctagaagtatattttcttatactcaaaattgctggataaactctgaaaatggcttcatcattggttgccatttatctagaatttttaaaaagtgttatacctttacttttggtctatcaagttaccacaaagatgattaattacagccatgtttgattgcaggcttgaggataaggctctggttaccctaacaggagttggcgattttctgaattgtgtcaataccacatttacaaatcattttttttcatatctgagggacatcagtggaaattaggatggagaagtcccattataactggctaaatgataagcatctaacggaatatcaaattagargaagtaaaagatttttttctagagatttgtaaaacaggttatatgccagtagaaggcatgaaaatattttcctcgttcctgttatataaacaacctaatactaaagttttggtcccgaggcttacatagcactgggcctttgttcagtcaagattaaataaagtaaattgaacactatcaattttctactcacaattactagagattattattctaattttttgtgtggttaataacacattatttgacccagaagatgtgttcaaaaatattcattgaattaatgtctagtaaatagaaactggcttttttaaagctttacaggatttattgcttattaaaagcattgggcctctgcaagtatagatagagtacaattatatcaacgctcagaagagagagagattgcgtccagctgaggttggtaaacaaaacctatccaaggaagtacaattagaatagccatcaaagcacttaagggaaaaaaagggtaggtaaggagggaatagcgggtaaagtgatgtcattaacagagacaggcacatatcatatgatttaaaggtacaaggctatcccagcctggctgtagcagtttgcttatgcagggtggagtagttacacacaaaagtgagccagtaggttaagtatatagctttagaagttaaacatcttagataacttgccatattactaggaaaccacaagaagtttgaccagaggaataaaaaggaaaagacaccaccaggtatggagaagctgagttaggagaccctatgaggtggtgccctctaaagaggagcagtagacartgacaggaaagaatgattcaaggacccttgagacataccttgactaggtaacaggtaagaaagtgaggcaaaactatcatgggcttcacgcctcagaacatatggtcttgtcattaacagaaaataggaaatcagcaacatgatgggggaaataggattaactcatttttttaacagaggaggtcatgagcgcaagagagaggtcaggactgccaggtagatttgggagtccccattataaaggaagagatagtcaagtatcttattacagtgagattaaggagatgcagtccagtacaagaccttaggatttggccatcaggagatcatttattatttgaaaatgaaaaccaggttgccacagcttaaagttgaggcacccaatctgggggctcagatgtataattggtcacaaaggtagtattggagagattttaaaaagcctaacagaagtcttacgtagagctaaataaacaaaatgtatgtttcttttttcctgaaatcataccaatctaatgttggattttatgcagactagaagttctagtgtgcattaaagatggatttaatcgattttaaatgggaaagtacattattccttattcttaacatcttcagccctatggaagcattcatttcagtgttcctgggaacgcactttggcaaatgtgtgagataaagatgtaaggttgcctagcaccaagctctgtgataggcagaatcaggcttttagtcgcrtgatgtccaaataactgcaacactcatgggttacagagtgttttcgtgtacattgcctcagctggtcttctcagcgctcattgtaacatctcccagctacctctcattcaggaaataattaggcagtctccttttaactttgcatagtcctagccattaagagttgctttaggattgatctggaagaatttggcactttcttttcttcagcttctattaagaaaatttaaatcttgcttttaaaaataaaatccattagtaaaatcaccttagaaggtgtttgtgccatgtctatgtctatggatttttttatatgattgtgtcacatctgtgacaattcagttacccaaagagtaatgatgcaaatatgcataataaatatttgaggcttgaagtggatttttgacacagacatatttctgactcttgtgtttcattatgtacatttcagtgagttgcttattgtaatctaagtatcattaactaaaaatatgaaaagctcattgctaaaaacatttggagtatttgtcagtgtcctgtgctgcttgagagctttgaacctagactgctatccatgaactgtgtgtgtacttcatgttttttaaaggtgtatgtcgatgtgtgttgagaaatttctcttgaagtaaacaaaaatcatgagcaacattaacctgcaaagttaattgaacacttttttaagagggccattctctttgccttccatactagaaagttcctagaaatttaaaacacattttaaaagataagagacagaaaaacagataccaaaaaagaactggggaggaagagtttcacacataaaaaacatcaaatttaaaacagcatttgttaatcatctgagctaattggatatgctgaaacgtgatgccgatcagtaccctctgctgaatagtttgggtagagcctgtccgagatggaacaagtgccaccagtggaattggttcccaccttgacattgaactccatttgcaaagcctgtcttcctattggcttttggtatcatttcgagggtccccattccccagcagctgctacctttgagagtcctagaggcaaagatcagtctgctctgaacactgaggagattttggcatcttccacattaaggggaaccagccaagttttgctgtaacctaactattaagaaggccctttcaaagatataaatgttttgtagctgagcccctgtttaaggagtctcccccatgtccccccctcctctgttccaggaccggccacaggccattagcaaaggagagccagagaagaaaactttgactctgactttccccctaaatctcccagactctcagaggtgatattctgcgctgggctttggagatacgggagaagtgggctatgttcctgttagaaggcactacaaccccaaggcaagaaaggaatggaggacagagcccaggcacttgaagccaagaatttggagccagagaaggaacaaaagtcatgttggtccctacttcgaatgcagaggatgatttgagagtatttattctcccttgttcattcccatgcagttgaagctaaaactctttgtgatgaatgttgagcctctgtcctatagaggacctcccctgcttaacygmragttcctcaatgtaactgtgtctcctaggtcgtataagaaggcattgattatttattttacaattaggaatttaggcaaagcccttagattcagagaygcattgacttttgaattgtgactttaaaaataataataattgatctttttcacaaatgtgtatatcctagatgatgccaaagatcccaaatcactaagggcatccagttcattggcggtgcaaggaggaaaaattaagcggaagtttgtggatctggggtaagcacttcacgatgtaaaaagaaagccctctgtaaaaggaggattgaaagagaaaatttcagcttcccctttctgactgcttactatcattacagggcgcctttgcgaaggaattccarcaagggaaagaagtggaaagaaaaagaaaaagaagccagtaggttttctgcaggtagcaggtacggttgtgtgattaagaacacgtgtatttctatacctaaactttctggccccctcttctattgttaaccaaaatcagtggtcagtatctttgagctaaagtgatatgccaagaattgagatggaagaaaaattgcacaattagtttatattggtcttactccaattatrgcctccatctagccttgggcatatccattggttcttaattgcagaattatggccacatgaaccatttcaataagtgtttatctaaattcagcacaaatatatctatgtgatacttcagaaatatcaaatatatttatgtgatacttcagattttttgcctggctacccacaatgctagtgcattgtattaagtctaaaaggataatcattttgcatttaagtaccttgttgacattcaagattgtcttgtccacatgtatgtaggagtgaccaccatcttttgctgcacttggctatttaattgattttgtgggcactgtcaactatgcttagtcttcagtaaagaccttcccataaagagcgagctttgaacagcatgttatcaaattttcccagttgttttctgagattatataattttaagctgagatttgtatagggagtcagtaaagcatcaagctctgaagcccagctgcctggatttgaatcatggctctcctacttataacttttaaatcttgggcaagtgagttaccctctgtgccttcatttcctcatgtaaaatgagagtaataacagtaccttttacataaggtcagtgtaaggattcaatgagttttcatgtaaaacatttaaaatgatacttggcatgtaggaggtattcaaagaataataaagataacaatttgctgctattgccattactgttaccttattattatttgcaagttacaaagtagttttatatttatcatttcatttgatccttataggattgagaggatggcaaggcttggtggcccacacctgtaatcccagcactttgggaggccaaggcgggtggatcacctgaggtcaggagtttgagaccagcccggccaacatggcgaaaccccgtctctaccaaaaatacaaaaattagccaggcgtggtggcgcacacctgtaatcccagctactcgggaggctgaggcaggagaattgcttgaacccgggaggcggaggtttgagtgagccaagatcgcaccactgcactcctgggcgatagagcgagactccgtctcaaaaaaaaaaaaaaaaaaagattgggagagtagataataataccatactttattgatgaagaactttaccttcatagaatttaattgatttgcccagggttatgcagcaggcagttaatgtcaacctggggcttgctcctcctgtgtagatgtttttccawcatactatgccaccttcagttacttatgcatctaatgatgcttaaatttctttataaaatttggaaataatctcaatatcatagactaaggaagaaacacactaaaaataaaatactataaaatcatgcaaggaccacttctccacttcatgggttgtccactgctgtttacttttcttttttctcttttctgacatataccttggtgagaaattgtaccttcttcttggaattaaaggagcattaaaggagcataatgggcgggagatgaggagagagaattcccaaattaattatctttgttagtgtggctttcctttatactgtacattggaaaagggtagaatgctctcagaatgaggacaacaatctcaggaaaataaaggtaaatctgaggctatatgcatctcgaaagtagtttaactttgtgtggttcgggagtgagaatgatccactttgtgtgttaaaattaagaatagaaaaataaaatcaaacatactcatggaaaaaaacaaataatgaaaccgtttaggggagaaagagatgcataaatacatgatgggagagaaactcagatactgaaaatgacactgtccttcctttggtctctgggctttgaagacagtcactccctctcatctttgaggcaccacctgagagggatgtgagcacctgcagccagaaagggggagggtgtttgatggaattttgccatagtagccagagatgattcacctccttgtataaatcacaaatgaaagtcaagccaatcttgattgtgttggtgagtgcctgcccacctcactataggcaaaaccacagcttgtcaagggcaggtggccatcagcacactgcttcaccacagtcgatgcctgctttgaacccacagctagacttctagattggctgcctcrccaccactgtatttttaaaactctggagtccccctgattcagcagtcagaaattattgtacacatacccacactacaaactagtttctaattagaatcatgattttgatcttttgtagttcctaagtgtgatgattgggtgttcacaggcatgtgtgagatggcctccctcaaaccttgttatgacattggcatacccaaaaaaaataaaatcatagttttataattattagtaattatagtagaattttggcaggatggaaaggaattcatataattggaatagaagaacaaggaaagaagaaggacacttttctcttgcaagaaaaaaaattttgagctgctatagtaattggttaacactaataaaatctgtggacagctatattcttctgtatagattgataatgggtacagaaccttataaaacctatcccaggaagaacagaattgctgcccagtaggagcttaatgcaattgagttggattctcagggtcctgaaagtctgtgggctgtaagcaccatcagctgcagggtcgcactatgattgtagtgggcaactgggaatacactcaccaaccctgggagacttcctcagaaaaaggagggaaggatccttggactgagtaatgttatctttttgaagcatttcatccaattcttattaggctaagattctgataagatcattggtcagctataacctatggctgttagattttaaagaggcaagactttcactatttggtcttggttttagttttttcctctctataaagagtttaccttgttgtgtttctgtggatacataatgactcagatacatgcgcgacatgagacaactagagaaaatggatgaggctaataataataaacaaataaacccaacaaagaaatatgacttggttccatcccttttcaaatatgtgctcagtggcattgtctttttgtttgtttgtttgtttgtttgagacagtgtctcactctgttgcccaggctggaggactrtggcacaatcacagctcattgcagccttgacctcctgggctcaagtgatcctctcagctcagccttctgagtacctgggactacaggtgtgtgccaccatgtccagcttaaaaaaaaaattgtagaggtggggtcttgctatgttgcccaggctgttgttgaactcctgggctcaagcagttctcccacctcagcttcccaaagtgctgggattataggcacaagccactacacccagccaacattctgattttaaacaggcagcatagcagataacaaaagcaggaaacatttagttgtcagagcttgttcaccccttaaaatgtataccaaagggtaaaataaaatcctattctgtattctggagtaagtagccactgatgtcagtggagcatctactttggagctctgtagataagtttccagtgtagtcacggaatggaaaactctgtgagatgtgtgtatctcagatggggagatgtgtgtatctcagatggggctaggtgatagtatgttgagaaaatgataaggaaaggagatggcagtcttctatggaaatgaatttgcattcaagtagaaagtgtgaacaacagaaacaacactgagctggaatccaaggtagtagtccttacttttccattaggcaagtctctgaattcctgggaccttggtttcctaccaaaaaataagtggattgggctracactgcatggctctgacttcccattcacctctgcgtacactgtccagtatggttgcctctagtcagataaggctagtctatattgggatatgtgtaggagaataatgaatgctggactcaaagacttagtatgaacaaaaagaacataaaatatcttcataatattataatattgattacatgtcaaaataatattttgggtttggagggtaaataaaatgtattattgttaaaattattttacctctttttttcccatggtgctactagaaaattttagtttacaatgtggttcatttatatttctttttggatagtgttgatctgtaggattccatgaaaaacaaatcttcctttaatttctaccccattattcagttggtctattcatttattgtttattttcttatttatattctactcctcgttattccaaaataatttgtttacatacaaaagtacatatgctacaacaatataatttattaaaaagtaaattgaatagggaaaagttagattaaaaagtaagtaaaattgttacttaaaatacaacatcttcaataacatcttcatagtaagtataagagtgaccttccagtgaaagccaaaaacacaatgtcaatatggttaaaagcctgggttgaaatcccaactctgccacttacttcttggacaggtttcttaacctttctgtacctcagttttctcatctgtaaaatggagacatagacacacacacacacacccgcccctcacatacttcttcatgttattaggaggattaagatggtcacattgaagtacatttcaaatccttaaataaaaatgtctattgttatcattgtttattaaagcaggtttgatgggaaggatacaaaatgacattcttcttgcgtattttgctggcagtcttgttcatccaaggatgacttttgttatatcttgaagaatgaatgggctatatggattatacttcaggctgtacttcataggctatttctctcaaagaggctttagataaatcatggcatgacagtgagtttgaaattatatcctatgacaagtacctggagggtccactctgcccctgttgctgagtaagagcaaaacccctgcttaagaatcatctgagctggctggaaacacaccttttagaagaattgatggagatgagcacatgtgtgtgagtagaaaaacaccccatctctgcctaagcctggcccagtgaatgtagtcattttcatggagacctttgaataatgtcagcttagccctagtagatcggacttattccccataactgtctagcccatttttagctgcatttatcaatttaatattcagttttctttttaagtacagtatttcaaatgcctgaagcctgacaaayttacattcttaacaggcaaacacttttccatacttaaaaaagctcttgaaaatctaataagttactgtttaactgtagtgactctaaacgtcccaatatagttatcaaagtgcttaatatattgtgtgtttgttaaaaactcaaatttaaaatgagtttagatcattaaaatgagtttaacattttaaggtagaatcagtggacacatttctctttcagatttctattcatacaaattttcttaaacacctaagcaatatatctgttattcttaaacttagcatttakattttgatagtatggattttatttacgtgatcctcttctatttcattttaaacccctccagtatggggaagactcattaagggaatagtttcaccatctcgaatgattcagagttgaacactacagtgaccatctcagatgaactattattgattagatcagaactcaggatctgggagcaggatatgtctgagtagggggcgggggttggccctgagctttagatggacatgtttctcacagctgttatccattagggtctctagatcccatttagatgaggctagctttacaacctcaaactccttggtggatrttagaaccttatagaattacttcattcgatttaggtaaatacaagtctgcaatcttcctctggttgcaactaattttcttcaattaacttcttttactcctgggcttaaattctgtatttcttttatacttcatctgttctggcagtttctgaactcttaatgataytttgatgacatccagttagatgctgaatacttcacacacctgtattcaaagttagaatgacaacaacaaagatcaccttggaatgtttagctggcaatttaattttgggatgccagccccaggatacactggattcaagatatatgtaaatgagttcattacttataagagatattacataaaccatttaaatgccaggaaacagctacctctgaaatggtatctttggattatgargacgaatttgaagccattctttctcccagttcctaggagtgacttatgattctcttttttccaaaaatgatagcaagccagtaaattatagctaaaaaagaaggtgaagggaatatagactatctacctattttgatccactggaaaaattattttcagattcatcaagagttcatttctaccaatctcgattttggggagaaaggaaggtgaaaaggaaagaaaaggaaggaacgaggaggagaagaagaaagggagggaggaagcaaataagaaaggaaagaaggattttatgttattcctaatggatttctccacaaagtgaaatagactataagagtggtcaacgtggaataactgctgccaaaccctttctgcttctattgtgggcccaagagttcaatttattcagaaggaaattgacatttattttagaaagcatgtctgctaagctgataggtctgtaattttaaagcaaaaatttcgttttttaaatgaatgttctctaggtccgagaaatgaaagcataccactcactgttcagttctttaaggatactagcaagtacccaggggttacatcagttcatggggttttaaaatcacagatactcacagaggaatgagagatacaggatacaacttcagcaggggcacagccaagcytcatgggaaactgaaaaatattcttcaaaatatccctgaatctggtgatttgccactgtagagacgtaggtgtcttctcggaagtggcctctcattgccttctgcctggctcttcctccttcctgtctattacttggtgtgcaaagctagggaaaggaagcctctgggtatcaccagaggcccagcttctgtgatctccttcaccgcacatgtaagaaccacatggcctcaagaccctcctcagtgctggatgcacaggtccatgtggaattattagtcttgaatatttttctgacagtgaaaatgttgtgagagagtttaattagatgtgaccttcagatttttttcttttcaaatgttgcttggacaggatttggactaccaaaagtccttttcaactaaagcaatggaatgaccacaagtagaaaacaattcttattttgtccctatttgcttttaaaggtaatagtgattgttctaaaagcattgttacaaaggctgttcactgggagtaggacaagattgtcatgctgtcattaatcatggcctatttataaactttaaaacaatatccatatatttaagcactactatattttattgaaaattgtggatgaactcatttaaaaattcccttgattcagaaatctataaccagaggagataatgatcatccggtccagtttttcctcagagatacccaattataagagtatgggactgcagagaaaatatttatatgtttctacacagytagagctttctaggcatttttactagaatgtgsaacctaagctaaaaaacaagcctcagaaaataaattatgaggctgagtgttgtgattcacacctgtaatcgcagcactttgggaggccaaggcaggaggtcaatagcataataaacccctatctctacaaaaaataaaaaagttagccaggcacrgtggcacacgcctataagtcctagctactctggaagctgaggtgtgaagattgcttgagcccaggaggtccaggctgcagggagccatgactgtgccactgcactctagcctgggttacagagcgagaccctgtctcaaaaaaaagaaaacagaagttgaattgtgggtgcatagatagtgagaactccagagagattgacctctgcagaggtaatgtggttacattttaaggaggctaagtggaagagggggatgagaccatctccatggagacattcctagagttgtaaagctggagccactagtcatatctttccctagagacacatgtttacatcccaaagggtcagagcccaagatccttcccaagttgaatttacattaaggagataagatttctccctccaccctccccagaggctgcagaggggacagctttccctctcctatataatcaaccagattcatgtttttggagttcctcacctagagtgtagaccatgtgtaggatgacatctggttcccccagcatgctgatctcaatattttatcagaacctcactgacttcttcattctcttcagttatcagccttataatccctttacatttgtatcttgctttacagtttacaagatgcttttacatttatgtcccagtcgatcctcacaataatatttgcaaataaatgggaattgttaggtgttatactatttatataaactggaaatatatttcaaaatatatttgaaatgagatgtaagaagactgaaattcagtatacatgtggtgggacagaagttgtctggctgtggtgtccaggcacttttaattgaaagggaatctctgtgttatcgtggtatcagcagctatcaaataataggcattccatcaaacggcaagggtgacctcttccaagatgcacataaactgctgcctgttcctactttggtttctgatagttattttttctcttaaccaaaagataattacagatatgaaagaacctacattaagacaaaaaaatctgttttcaaactgcgttcttcaaatgcctttgaatcctttaaatgttaaacaataaacatagaccattgacaatttgtaagcactttcacatatctcatttaattcttaacaaacacatatgagatacataaaaatatccactttttacagatggagaactaaaagccgagagaaggcctgagaccatgtacttaggaggtggtaaaccctggccctccaagtgggagatgaggacttcagatctcctacgcctcctgtgaaaaggcactaagattctggtgaaaaaccaataaactacgtgttccacctaaagtattttgaaccctgaaatttcaaaattatttaaatatatcattttcttaagtctcagacccttcggaacacaagtccagaggaagacaggaaagaatgctgcttatgagctaatgtccctagctgtgaggcatgtcacccagataaagggaatgcagtgatgattaacctaatagcagttcctaaaagactgtgcccctccctgattataattcatctacgtacacttattaggcacattttataaaaattcaccatggcaatagcaatacgaaaatgttgatcattgtcacagaatccatttagaggcaaaaagataactattaagattagtgttgtagtcaaaagtgcaaactttttactctgttgaatagaacagtttctcaaattgttacttcaaactatattcagagtccttgggttcagtaggtcttttatccgccctttctttatctaacacacccattcttttcacaaaacaggatcttcagaggcagactggaaaactggacacccaagccatgttcaacagctcagacctccactcgttccccttgcatgcctttctcatggtttaatgacagccggaaaggatcctattccttcaggaacctgcctgcgcctacaagttcccttcagccttctcctgagactctaatttcagataaaaaggggtccaaggtagaaaacacatggattacaaaagcaaacaagagaaacccaaatccctcctcttcttcaatctttggaaggcattctcaacttatgtctgtagtctggatccaagaaaccaatgtaataacactgcaataaacaatgcatggtatttcttatgtggggaaaagaaagcctcatttaactaccaccttctttaatgctgtttcattgtagattgtacattactctttgatttgcctatcttttcacatattgctatttaatctcagtttgacagttaagccatgctgggaaagatgcatttgaatcatagaacagaatgatagatctgtttacccagtattctactttaaattacattactaaactatttcactgtgcttctcaagatttactgaaaagcaaataaatttgggactgaatacgagttcagtacatctaagtgaaactctttaaaacaaaccaatgatgacatagcatccttatttatttcttcttttaatgtcaaacttctgtgttgaacaactgctgtataattctatcaccaaagttcttcaacagaattaggaaatatatgcatgggtgttacttgtttttaaatgcatgatggttatttccagcatgacactgcaaaccttatctaacattttattgaaacacatatggtggctaactttcacacgttgtttggtctccttttatctgtgttcgcttttctttctcaaacagaaacgtgattaatgttacttgaatttaattcttttcagtttcaatttaaatcttttcaacagctcaaagggttttgactggggtaccaaatggtaatgttcatgttaaatgtcctgctgcttaaatgttctgctggcctagctccatgtgctctaacctagacttcttttctgaagttttagcaaactttggagtttgttcggtactgaattctccagcctctggcatggtatttatttttgataaccaactaaacccagtataagggaacctagtggaaatctaacagtccaattcctaaggaaatgcaatagaaacaagatggtgttggtcaagtgcttagagttcctggaaatccatccattttagaattactagcaaaagaagttttgatagcagcacatcactttggtcttgaaacattttcagtattggatctgaggcatctaaatgcaattcgaagaattctgccattatcttgcactgtagagactccagatttggttaaaaatgtttttacaagtgcagctacgtagtcattgttgtttgattttcatatccactgaatattttaatgaagttctggggaagttttatttacaygctcccacctcccccacccccaggtgattatttggaaacctgtgtctgtgctgtgtggcagcctctctgatgctctgcgggtgcagtgagagagttgtatttcagcatgtaactactagtgtattgtcaggctgtgacctcccccagaactcatcatcttgaagggtacatccaggagaggatctgccatttctcatagtatttatcacagccaacaataagcgatccttcccaggaggtgctctagctacctttctaatatgaattgccatctgttcctaataactcagcctctccacaccatcttgtatttttacttacactgttactcatcacgattagggtcaaagaagataggcttattaatattattcctctgagcagttgcagaggataatgaattctgtacccttgaagagcaattgaagaattgtctctctaaaacatctatcctttcatcacatggagaaagcacccagaattccctcaaccagacaaggtgcagcattctcaaccgctgccccattgaaggtcatcaccaaatcatacatgaatttctgctaagattgtttaaaagagcccttttagagcttgtagacacacctacctcttgctcactcactgcactcatttaacactgagcttcatttatttttacagaattttaccttcaatgatgacttcagtcccagcagtaccagttcagcagacctcagcggcttaggagcagaacctaaaacaccagggctctctcagtccttagcactgtcatcagatgaggtaattccatggcactatgacagagctgctttgtcaaatctgacgttttacccatgaaccatcaccaggaaaatgtttttagggtagatattgcatagaaatcatcaggactgtggtttatgtttaatttgaagtcttcatgatttctctccctccctttctcaacagaaaagcaaagtcttgttcttaagctttccaggggccccttttacacgtatatgtaaacacacatgatggggaggctgggcagtgcagagttaaacatgggggaacagctcagaaatcacatagaagtttcctaattactcctttctttttttccttgcctcccctgacarccacactcactccaagattctgatactgcctctgattagggtgaggtctctgattgagaatcaatagttttgataaagagggaaaatagcatgagaaccatttatttaaaaacaagggtcaaaattagtattgctacaaattatcaggagataaatgtgtacaagagagtcaggaaatgaggttagtgatttagttccttgaaaaatggagggaggacagaaggcaccataaataaagatatttttgctctaaatatttgttcttactatttctttctaacatgattttttattcacaaaacttttttttttcttgtaagcttttctgcccgtattcttcaagcttggtgcaattttaattttattaaaattatgtactatatatgttgtgtctcctgtttctgtaacacttttcttcttgattcttttattgctccctcactcagagcctggatatgatagatgacgaggtgagctatcagtgggctgtgtgtggtggcttgtgtgctattgtttgaatgtgttttttcgctctttggagatgactgaaaaatcagacaatacaagaatatcttcctctgtagtgaagggtttccttgtgttaaatagctttactctctgcctttgtcatatcttagtttaaaagatgttcctaacttaagaggatctccgcattgcacctccagagttcctcgatttctcttccatcaccattacattgacatggtccattcttcttcctctcctttgccttcatctcagcttaccctatcccttcttctgtgttccctgtgtgggtcaccaaggtgactcctgtctttccttcaagacctatcatcaccttcatctcctctcagcttagtgggtctaggaaccaacctgtccctttgcactattaaaaggaatattctgcagtggacagagccagaaatttagaataaactcctaactattgagctctaccacttactaactgtgtgatcttgggcagatcacatagactttctcagcctcagtttccttgtttctttttttgttttttaagacagtctcactctgttgcccaggctggagtgcagtggcacaatcttggttcactgcaacctccacctcctggattcaagcgattctcctgcctcagcctctygaataactgggattacaggcatgcgccaccaccacactggctaatttttgtatttttagtagagaggggatttcaacatgttggccaggctggtcttgaactcctggcctcaagtgatccacccacttcagcctcccgaagtgctgggattacagatgtgagccaccatgcccagccatttcctcatttcttgaaagtaatgatggatattatatgccctaccttcctcacagtttgcttgctgctcaagtgaaataatggttgtgaaacttcccctaagaaggcttgagagcttaatgctctcctcttgcaagtgaaagatacctcagtatttgttaatatatttttacaaaattccaatgtcttattagaggataagtgatgcattgcatatagaaatttatgaaatatttattttctacatcttataatctgtccagactgttttgatgtaaaagcttgcaacattaatatattttcttcaatattaaacttcctacattaataatggtgcttttttattatggggaatttctaaacttctaaaaacataaaaacatataggtaataagtattttttctaacaccactagaaccattagcttatcatattttggtttaaacataaatgtggctctcataggttaagaaattccttttgatagcataatatgagccatagtatcttggtcctttaacaacactacgtaacattcctatcttagatccttgatgatggacagtctcccaaacacagtcagtgtcagaatcgggccgttcaggaatggagtgtgcagcaggtttctcactggttaatgagcctaaatctggagcagtatgtatctgaattcagtgcccaaaacatcactggagaacagctcctgcagttggatggaaataaacttaaggtaaagaattatatgtctgtcttaggttaccaggtataatttgtattactcatatcacctaaaatgttttcattaggtaagagcattctgcatatctgagaggtaattctcatcaatattcagcagaaaggatgttgaattctttctgagtagtaaatgaagtctcagaaagtccatcaggggttccaaatcaaatggtaggctgctgattaggagagtgagggacccactccattgcttccacctggcaacacatggtccatatattaactctccttacatctgatgtagtatgagttttaataatggccactgtggactttttcatcacattagaattaagacccagatccacgagtcttcttttccttgttcatttctccttcacctccactcttccttacacaccactcccaaactgggatgatgttctccccagaagttttttccccaaatatgtacacacatcttccctcccctccatggcactttcatttccacttgtccagtccatctctcttagagaccaaggtggcatccatccctttgggaaagggaaaaaggtgcttacagccaactccatgtacccccaagccccacccccgcctcagccccctgctgggctgacgggcagacgagtatctcttgacaatcttgaaaaggttagagatcaatcaatagcttgtgaatatgaaggcctcattgacaaggctgtccctgttggggagatagatagatgcatcctgctgttgattctgaaggtcacgaaacatttaaagtacataagcaactccccttattctgaattctaagttcatcgagcaacctcctcattataatcaacttcctttataggtctgcctacagggaaagaatggctagtcatgctgacacgagcattctggccccaaagacatttttggttctcattgtaatgaaaacattggcagaaaggaagccatttcaattcttcttgcccttcttggagccctctgtgacagcaggtgctcactcctatgctttgaaaatattgatgagtttagcaatacctttacccgtaaatgcctacagcccaaaggttggagaagtagaattgtgccctttttccattcattcacccattaattactcatttggaaagcatttaattaatgagctttagggtatactttgcaagggacttcaaagaacaaaagaaaaaataaagggtagcccccagtgtgttggtttttagcaaatgtaactagttcttcctctgttcttacctcttcaatgtttgaattagtttacgaacttggatatatggtatgttaacaccatcagagggctcattggttttcaaattcagtttgtgtgtgtgtttctttcttaggctcttggaatgacagcatcccaggaccgagcagtggtcaaaaagaaactcaaggaaatgaagatgtctctagagaaggctcggaaggcccaagagaaaatggaaaaacaaagagaaaagctraggagaaaggagcaagagcaaatgcagaggaagtccaaaaagacagaaaagatgacgtcaactacagccgagggtgctggtgagcagtaacacataccctcttacagatgatggagatgctccaagagaagtccccacctcttcctgccctgctctcctccagaggatgaaaaagaaactaaatgataagggtaatgcggctctaggccggctgaggaactgtgtgttgaataactgcattttctgcaatagaatgcactcttaattttaactactaaaataatcccaagccacctttggttcattaacaaaccagagatttcatttaagtagctgtgttttgctcttctctaacttaccaacatcttgtgttgtgttgggtgtgttttgtcacttggagaactagtgtgaccccacccaagagcatgacacaccctggtgttgttaatggagcgccgtgaattttcagtgtgggatcctgaaatggcaattgcacatgtctgcatggcagagagcaccctgccatgagatctgagaccagtacttaacttctaggactgcaacacctactccaatgtgtgggaaagatttgctcttaattctcagtctggacagtgagaccaccccgctgtggaaacatgggtgctctgctctgtagttacctactaagggaaaaggcaagcaagtcattctgcttgctaggcatcaaaaagaaagaaaataaattatagctatttgttaaccactgaaaaaagcaaaagccttaagaatgtggatgtgggtattaccttggggttctgagggtaatatttatcctctagatacggctgaacaagaaagaaaaaaatcagacattaatgcagccatgggatattgggatctgttgaccttgctactgctgtgtgttcagcatttcagcaacactggcaaacacaacacagttcctcttcccccyacctaacccaagaaattgaacaggaaattgatttttaaggaaaccaccattttcaggtttcctctcctggggaacattctggctggtcttcagcctgcctatgtcacaatcaggaactcatcacatattttctactcaagatttcccaggtgggctcagttagtattttaacaaatgtacttttaagaaaaatagaaataccagttagaggaaactgtcagttaacattttagagagattttgaatggtttttccgaaccattcctttccatacttcaaagattctcaattttacagaaaaagtttgtttaaggcagtgcataggtatactttagtagtggaggaacttatactaattttaagccagcattaaggatttccatgtttcaccaaactaagtcaagtgcaggagactggggcagaagaaggagaaaataaactcgttttgagaaatttcatgtgatgagggttttttgttttttatgctcatgtatctggttctctttkctgcrttgactctaaaaatgaggttatccactttccaaaggacaagtttcagaataagacttgaggccacatgaattcttggacagtattttacttcttttactttatgggaatctctgctctgttcccagcatctcgtatcttccactagaagtattccatatttagagcctcggcaaggcttttgagtgtaacagattaagggaactcccttgtagccccatcttgtattttaataacagtgtgatttttttttatctgaaaatctgaattcagaaattatctaaactggacatttttaattctgttttacccccaaggcctgttttcttttcattgccagagtattgtcggttatgcgtcagctcttttgtcattaggtacagacccttcattcaatcctcagaaacgttgacatgaagtaacattgtgttttacagttatcaaagtcaccattatgtttttctgtctgtcttcattaggggtatgataatgaaactgccatattggatactctattaatgtcttgagatgtctggtgctttgttattttttaacatcatgagaaataagaagccactattaatgagtgatacaatttggcaaaacttttcaaatactaaaacactaaattagtaaaaatctggtaatattagtgcttgctattgtaaatttttgccatttttgcttatctttgggaaaaaagtgacctggatcacactggaagtttcactgtattcaagagtagaaatagaaggatgattatcttaagttatgtttacactttggtaatatttgaaaatggatgtatatactggaaatgtctgtaagtgtcttgtttttgcayctaatttatgatctattatattgcattttcttaaatatcttagaagtatttttctttataactttgtatattgaatgtttagataaatgtccaactgacaatgttataaatcaaattcttattcctaaaatcatttagtattataagtattttgattttttaagttaaattatagtaattttaggccgaagtgagttattttaacattaccacttaaaacggatgaaattgtaaaagtcatttggtttgattgccccacaaagcataagatgtaaactgattaagggtatgaaagcaaagtgaaagacctcagatcttgtgmacattttgttttcytattatttcttttattgactgtagtgcatgatacctaatcaaggctccaatgtcttgcacaattcctactttaatgctagtggttttcagtgtccttacaatttaacacagaattgttatttcatcaaccttaaaaactgcagtttttattatcagaaaatgaacaaaaagggaatatctggttgctatgaactgattccctaaaggagagctcagtatgattctaacaatagccaaaagtgttttggggtataggttatgctttgttgggagggaatgtgtggtgaggaggccaagctgcagacagaaagcattgtatgagctgtatctgggtcagggtttcccattaaaggatgttagttttataacagattactttgtttaagaccatctcccttcaagtaactcacagtttatgtaatactaatctcattctttttttacctgaatcaggaattttctgcagaatgttaagttagggaagaaacctcatttcatccattctaacactcctgatgaagtccccctttagtttcatgacaataaagctgttctgtggctatcatcctttagctgggattgacaattgatttcacaccctcaacatcacaagctttttttaacccacagcagttcatgattgcagtatgataggtactaaagccaaactcagctttcaactggcacaaaatgggactgtcaccttttgctccattgttgttggaaacaaagtggcaagagggaaaatgaggaaccagatttacctttgccactatctgtgaccctgtaatcatcactagcctgaaatcttaaaatatcccagtcccaagctacaaaaatggtcacaggtggtttgatctagcacctcggccgttagagtttgtgctgaagacaaatttgtctgggttcattgtgcaccagaattagcatgtgcttgaaaattgcattttataaaagggaaatgaaaatttgcatttatatagatactctgattcatgtttaagtgttaaaggttatgcagactaaacttcaagaggagatccagtgtttaacaatagtgttctagaggattctaaaggaagctgccccagcagccctgagagaaccatctatactttggatatgttgtagccccatcattacactgagatatttccatttgagtaactaaaggtactcctgacagagctggagatgaggggcattttggtgggcagtggccactagggttcacgtcacctacttaatgcaaagaccttagtggtctcagaatgaaaaggtaaaatggaagagaaaagcacagtcctttcctgtcttttcaaatttactttttattaaggatgtacctgtgcactattctaaagctaagcatttaaggataaagtccagaaataaaatgtccatattttcttttcttttttttttttttttttttttctgtcatctgtcacccagactggactgcagtggtgccatcatgtcttactgcagcctcaaactcctgggctcaagtggtcctcctgcttcagcttcccaagtagctgggactacaggcatgtgccaccacccccagccaaaacatccatattttctcttagaatggtttacattatgatgggggatggggagctgggggagggctgtacattcccaaaagaaagtagtgttataggaaatccaaatgcacttcagtgattcactcctgaaaagcagcctgggtatgttggcagattttgtttgcatttgtcttgcgtatttaaagtctcaggaaatctagtcttggtccaaaacactggagaaaaaaataacaccagacaaaacacatttgagtaacttgaagtagcagcatagaataggcccaactaagaagttggaggggcaaagagaaagccgacagaatcagcttctcctggaaagtgaaagcatcaagttctatttatggtagacagagggtccttatttgcttgtccgtggtgtctatgtgggcctattgagggaatggtagttacttgaaggttcacatatgtaagcgtgtggacccagcacagtctgtgacctgattccagatcctcaagagtggagaaggaaagaaatatgatgatttcctatgcttgaccctaacccaaccccaaaactgctagggattcaacagtgagtaagatgtatgcaataagagaacagataacttctcaacaatgtgcatgccgtttgtgtagatgttcagaactacatatgtgtgaatatcactcccaccttacacacgcacacacactgcaatcacatggcattaaaaaatatattgtgtatggaacttggcgaggtcagtcaggacctggagctgtaatcatagccttattgccacttcttgcgttgtgtatacattgaatggctcatagattttaagagatttttttattgtaagtatttctactaaatgcacttatccttctatatgtttatatattttggtaaaattgatttatcagatacttggtattttagtaagaaaatttcctcaaatatttggctaatgctttgatgtcaagattgcatattgctgagttggagctcagaagaaatgtatgcagctaaaaattgcactgtgtgttcttgtgaatttgctcacaattctaaaatgacataattggtggctgtgatgcttacagtcactgcctactggctctcttatgatgaatgttgccatcatatgatcatttatttactttttgtgcaagcaatggcattttggttgttgccaaaaacaacacaagtggttgggagtgtatgttgttggaaggtgtacacttctgtttctttcagctgtattatttatacacccaggttttctgttaaggatgtaatcattcattcaagaaagaacaattggcaagaaataattaaattaccttaaaaagaattaagaggcactccagccagataacacctcccaacaacatgaaatttagttagtgcttagtgaaattccttaaatatatatgtatatgttttcttcaacattatttaatataactactgcttttatattttttaatggtgttgcaaccacttgtacacctgctacaccttactgacaaaactgggcagctgaaaataaaagagaataaattctattccactgtaagaagttgatttcttttcagctttctttgtatatcagtaaagaacacgaattgtttgaaaataattttaagtctgataagtatggatagcatgttacctaagcttttaatttgtacattttgatgtctgatcatttgcatggaagagacaatagtgccacgtctgaattgttctcttgtgcttggttaatatgtacttctctagattgttcaaaaagtttcaaatgacattccttactctttggttttcagaggcattcaagcaaaatatcacagtggtcttttgttttctgaccaatctaacaatacctgtgattaaatttaatttgttagtgtaaataaatttcttgccaatgagtattattgttgttagacaacgaatgcaataaaaagaaatactgaggtctgttgaagcaattttttttccctcttccattttcaccttcaactaaaacaagccttgactgggtaaacctgtatcaattgtcaaagcatatatctgtcaatcaggagcaaagtgcacatttttcatggaaatgaaactaagtcttaactgtggtaaagtgtaaattggcagctagaaattacatttgaaagcacaattatggaactgggcataaagttaaaagagcaaagcctgcactcgaagcttcctcgcccgtcattttgttcccctgtcgctgcttcaccatcaaagtctctgatatctctcagccaggaaaacctctgtgacaaatccattaagtagtcagtctcacatagcgaggggcaagctaaggaagaatcaggaccatcgtagagtatggggttattttaaacaatattctttctaaagccttaaaaataagtgagggctattaatttcattcattcttacacacgcaaactataatttatatgtgactaagcctatgtcagtgcgaaaatttagatctgggaatcacagaatacatgaattaagctgttttcctctttttcacaatgtatgttatgaaatttctaaccaagccatgtccctttttgagtgatcttgagtatgtgctgtgtcaaattggataggcttttgtttcttcagtggaatttgcttatctatcatcaagaacaagaaagaacagaatgtggtcattttattgaagatgttagggagcctaactactcaggaaattctttctttctaaataatgaaatatgttgggggtgttccctaagcatcacactcattgataatttcaagacagtctttcagagaacccagcatcctgggctgtgagcagcatctcagaaaaattgagcccatgtagggcacgggatattatgtcactggaatcatgagtaactccaatcttgctgtgaataaagtggttttttgacccaaacaaaatgttcctgtttattacttcaagtcagtgattcttaaacaactgttggtggttctcaatttattggcaaaacattttcccggaaatgccagactatcatcataacaagtgccttagaaaaacttcgtttctggctgggtgtggtggctcgcacctgtaatcccagcactttggaaggccaaggcgggtggatcacctgaggtcaggtgttcgagaccaggctggccaacatggtgaaaccccgtctctactaaaaatacaaaaattagccgggcatggtggtgtgtgcctgtagtcccagctatccgggaggctgaggcacaagaatctcttgaacctcggaggtagaagttgcagtgagccaagatcgcaccactgcactccagcctgggcaacagagtgagattcggtctcaaaaacaaaacaaaaacaagaaaaaaatttgtttctaaagtcactgccttaacaccctgaagaagtaattcatcatgaaggttataccttcaaatcagaaaaacaaataaatgaaaatgtgtaacctttatatatcagcttctataacaaaatgataaagtcatgttttcttcctagtcatgtctcagtagatagccaaaggggttgttgatcttttctatttatttgtttgtttacctttctattattttttttcttttcagcctccacaacaagaagtttaaatattaaacaaaaacccaccagcactaccaccacctcaacaacagtgtagtctttggggacacttttagcttcgcccatgtcaattatgggattcattctgtatccagtcatcgaagtgaacaaacttcctttaaccaagtcaaagacactcaaatgtacaatttgtgccaagatcatagagactcataattttcaggtgtgacaacactcccaagaattttaagattttcctatgtgtcattgcaacaggagaattgaaaaagcaagagtacaaggggagttggaatagttcaggttaatatttactgagaaaaagtcatatatcgaagggaaaatgggagtaagtaagtctgactgccatagtcagacttactatgtgcatggagtagaggggaacttcataatgcatatgttttctggcctgtgaactggagtccctgggtgagtactggagttctaaagacacgtgagctaaccctgctcccctgtgtcttctgaacaagacatggcaaggcagcgatacacacatgtgctttcaggcaacacatgttttagggtaagtacttttggggtcacacactgttatttaatatctgacaattgacataactgatttatccattttagtgagaaggatttttatggtaaatgaggttttcaagtattccaagactgatttgatagtgtattctcaaaaaaaagccctacacatcatatcactcccagttaaacagtgctttgatgcttcatgatgtccacatttagggtcagcattcattgttcagctaagaacactgggtcctcggaatatggcaagcggttgaaataatggcctcagtttctatggcatgggtgcaaatcggtctgttagagctcacagtaaagagctttgtgaaacactgtgccaatcagcagtttccctttgtacacagaggcaactgtactgccttgcaacactgtgccattttctgcataaacctgtgtcactttaggttcttctgttagaatgttctggattcgaagcacctgtggaagaaataacattgggttaatatttttgttaagtcacttaaaacaaccttatgcataatagggtcatcctccataagaagccatataatcttatacaatgagataaatcctattttgttccaaaattacacttaacacacctgtttcttcatttgggaacaggtgggtactgatctcaagtgatctttagcagaggtggagagtatctagacctacagggatgaggcaggaaatgcaaatgagcagcgcatcctggatgtgggacattagggagcagtggggatttcagtaaatgtggagggaggaagctgttactcagt

SEQ ID NO: 5720 - DNA, 29283 bp, Homo sapiens
caagcgactgtcctgcctcagccccctaagtaactgggactacggcgtgcaccatcatgcccagctaatttttatattttcagtagagacagggtttcgccatgttggccaggctggtctcgaactcctgaccttaaatgatccatctgcctcggcctctgaaagtgctgggattacaggtgtgagccaccatgcctggccaggagcaggggttctgaagcctccggttttcttaccccaggcggaagtcacttttcaagaagatctccaagcagacctccgtgctgcacaccagccgcagcttctcctccggactccaccactcactgtcatccagtgagagcctccccggctcgcccacccacagcctctcccccagccccaccactccctgccgaagcccagcccctgatgtcccagcaggtgggtgcaccccgaccccccaccgccccggctaccctgggagcaagggctggtgggccccaggagggaggaaggagctcaggggatggaatgacacgatgtagggaaaaagatgaccgggatcctggtgtctagcagggaacctgggagtacttagagacgaatgcaggtgccagggaaggatgcacccagcagaggaaacatcatggacaaatggggctagacaggagggtgggaaaactgagaagaggccaggcgcggaggctcacgcctgtaatcccaacactttgggagcccgaggcaggaggatcactgagcccaggagtttgagaccagcctgggcaacacagggagaccccatctgtacaaaacataaaaaaattaggtgggtgtgaggccgggcatggaggctcacacctgtaatcccagcactttgggaggccgaggcaggtggatcacctgaggtcgggagttcaagaccagcctggccaacatggagaaaccccgtctgtactaaaaatacaaaatcagccaggtgtggtggcacatgcctgtagtcccagctactagggaggctgaggcaggagaatcgcttgaacccaggaggtggaggttgcggtgagccgagattgagccattgcactccagcctgggcaacaagagcaaaactccatctcaaaaaaaaaaattaggtggttgtggtggtgcacacatgtggtcccagctactctggaggctgagatgggaggctcacttgagcccaggaggtcaaggctgcagtgagccatgattgcaccactgcactccagcctaggcaacagagtgagaccccatctcaaaaaacaaaagggaaaaaaaaaaagaaaacagaagtgatacagagaaggctttctggaggagggggagtaggagctggggctttgatgggtgagtgggagttcaccagagctaggccaaggaaacaaccctgagcaggaggcagaaaagtctggcatgaaccaggcatgatggctcatgcctgtaatcccagcactttgggaggccaaagcaggcggatcacttgaggtcaggagtttgagaccagcctggccaacatggtgaaaccccaactctactaaaaatacaaaaattagccaggtgtggtggcacatgcctgtagtcccagttacttagggggccgaggcacgagaatcatttcaacctgggaggtgaaggttgcagtgagccaagatcatgccactgcactccagcctgggtgacagagcgagactctattgaaaaaaaaaaaaattagccagccatggtgacgtgcacctgttgtcccagctactcaggaggctgagttgtgaggatcacttcagcccaggaggttgaggctatgattgagccagtgcactacagtctgggcaacagagcaagaccctgtctcaaaaacaaaaacaaccaggcatgatgggtggccacatggaaggatgtgggctttagcagtttttgtcagtcccacagctccacttctgggctggggacattgaggccagcagccctgacctacgcttatcacccacagataccactgcatccccacccagcgcatccccgagctccagcagccccgcctccccagctgctgctggccacacccgccccagctccctgcacggcctggctgccaagcttgggccaccccgccccaagactggccgccgcaagtccaccagcagcatcccgccctccccgctggcctgcccgcccatctccgcgcccccaccccgctcgccctcgcccctgcccgggcacccgcccgcacctgcccgatccccgcggctgcgccggggccagtcagctgacaagctgggcacaggggagcggctggatggggaggcggggcggcgcactcgtgggccagaggccgagctcgtggtcatgcggcggctgcacctgtccgagcgccgagactccttcaagaagcaggaggccgtgcaggaggttagcttcgatgagccgcaggaggaggccactgggctgcccacctcagtgccacagatcgccgtggagggcgaggaagccgtgccagtagctctcgggcccaccggaagagactgatcccctgccaggtctctccctggcatcaaagttacgcgttttcttgtgcaatgttttttccgtaaagtcatgcctggatggggactgagccaccagcctgacacccagaaggcgagaagccatctcggtccttgctggaaggtggagacatcgcttgtgttctggtgtcaatcagggggctggatggggcaagaatgggggacaagggtggctttgtaaatagcagcaaatccctgcaactaatttattactttttcttttttttttttttttttgagacagagtctcactctgttgcccgggctggagtgcagcggcgtgatctcagctcactgcaacctccgcctcccaagttcaagcgattgtcctgcctcagcttcccaagtggctgggattacaggcgcccaccactatgcccagctaattttttgtatttttagtacagacggggtttcaccatgttggtcaggctggtctcgaactcctgacctcatgatttgcctgcctttgcctcccaaagtgctgggattacaggcgtgagccactgggcccagcctaatttattactttttataagcgatagccgtactgagccgccccctgaaggcggctgccaggtcttgccccaggcacctgggactctgtttgcaggccctgccctctgggctgagaaggatgcactttggacaagtcatctgtgtttgtgttttccagtttttctgtactttttaagtgttttgtgttacctggtctcattcccctccccacacctacccatttgaggggatggagttgaagtcacctggtcacctgtaccggcccagttcggctacaacctggagtgtccgtaaacaattcctctcacccacaaaacaatgtaatcccagcgatggactggattctgaaggccacttcccaccatcatagctgccatgcccaggcagtgcctgctctatatatagagtctgcctccaatcctgctggcttcagcctggagaagggatatgggagctggagctttgatggatgaataggtgttcaccggatctgggcagaggggtcatccgctccccaggtgggcactgataaaggaaggtacaggcctcacctggaactgccaaggcagcctccagaaatgctcggctgtctcggggcacgctccagtatgccagtcctgcgggattacgtccagctacttccagaaacactcagtgtcccctcccctcaggctctgccttggcctggccttgtccagtctaccctggacaagatgccgtgtgtttgaggcccagcagagtaagcccttggccgtgatgtgtctgaaacacctgttaggggttccctccatatgtcagagcctctctgggatgaagttcaagccagaaaacccagtcgaggctcaagtttgaatttcagcttcactgtgtggctctgggaaaatggctttcccactctgtgcctcagtttccttgtgtttacaagactaatcccattgactgtttattaagcacctactgtgtgccaagcgcttttacgtggcttctccctcagccagccttgagaaggctggaggtggtgtcatcacctccattttacagacaaagcagctgagaccccagcgaggggcggagacctgtcccacgatcacccagcaggagtcgtggcagaacggagcatcagccagaccctgttgtgggcgttgtcatcaagggagcttgaatggagggtctggtgtcagatacagccgactccagccccagctcatcccccatgatgctgtgtgacccactgggcactctggtgagggagctttccagacatcaacagcccactctgcttccctttctgagtcccctgtccagcactgcctagtgttggagggtagaccaaggctgtgcatgattcaccccctccttccatcctggagctggcagtgaataaaagcccgtatttacaaagatgagctccaacgtctggatttgtgaggggctgagaaaggaggaagggaagagtggggaggggagcggagtgaaatagacccatggctcaaagtcattgcaagtgggttttgaggactgcatagcagttcgctgttgagattcttcctgatgccatcgctggtaccagcctcctgctaccctctccctgcgagtactccatcatagccctgcctttaaaagcttcctccagacatctgggccctgagctatgttttttatttttatgtttttgagacaaggtctcgctctgtaacccaggttggagtacagtggcgcaatcacggcacattgcagcctcgacctcctgggcgccctgggctatgttaataaaataaataagcggcggggcgcggtggctcacgcctgtaatcccagcactttggaaggccaaggcgggcggatctcctgaggtcgggagttccaaaccaccctgaccaacatggagaaaccccgtctctactaaaaatacaaaattagccgggcgtggtggcgcatgcctgtaatcccagctgctcgggaggctgaggcaggagaatcgcttgaactcgggaggtggaggttgcggcgagccgagatagcgccattgcactccagcctgggcaacaagagcgaaactccgtctcaaaaaataataataaaataagcaatcgtcgcgtcctttctatcctggtcttagcttgcgctctgccataaaactccctctagccgaacccggcccagccctagagcaatccgttacttccggggcgctcagccggcatgcaaacactcttggctacagccccatctccgagtgcgttcggctatttccggaaaccgtcggcatctaggctcaagtccgctaaattctagtgcccgtaggggtcgagatcgttggctgtttccggacgctctgggttgccatggaaactccttcaaccctggctttctccgacttctgctttttgcggcaggccctttccccactctactgccccctgtttgctgagcttgagaacgcctcatttgtcccctggaaccatctatgcttcagtaattcccataagctggcggtcgcctctgggtctaaactcccaaggcctccattgggcactgagcacattcggttatttccagaaacgctccgcggtcttggggatcagcctcagttgtgccagtgcggcggtagagagtgttcggccatttccgaaagcgctcgggcgtctctaagcccagccgagcccagtctcggatccctcgccgacccgattgcactcggctacctctggaaacgctcggctgtctcgggggcaccctctagtccaccagtcccgcgggattacgttcggctacttccggaaacactcgggtgcccccttacctcaggctccgcctcggcctcggttcatccgcccggctcgaatgcgctcgggcatttccgccgggggcgggccaggccgctcggaaccgtggcggcggcggaggcggggatcccgcggctgcggcgacggtggccgcggtggagccacggggcgggcttggcttggtgtgacggcggctgcggcggcggtggcggccgcgaccaggtgagtcctgactggccctcgtggcgggggcggctgggagtgtgcttaaatgcggggcgcccgggggcagtgccgggccccggtggaagccagaacgcaagcgccaggctgcgtcgggccccgcgggaactgggggggccgcaggcaagggggggcctcgggctcggctccgcagcggtgcagcctccttgggacggtcggggcagaatggggagagactccccgcgtccaagataccggactggagccgaggccccaaatgaagggaggccctgcctggaatggggcttcgaatagtaccgaggggcgcccaggcattgtgcggggcagaatggggtgcgggagggccgggggtygaacccacttccggtcccctagccgggtggccgggtccacgcagacccaagtgcgcgtctgtgtgagcgctcaggccctgccttcacccgcggagcccccagccctgcctgccccgcccctcccgcctcccggattcggggagcgctgctcccggggcgcgcacaccggggcgtgggggcgggctggcaggcagatccaggcggttttctgggcatcccctctcggggcctcagtttccccacctgtagaatgagggtaacagaggcctaggaatgggtaaattgggcacccgagaatgtggcgcccctccgccctgctcggacacctcttggggttccccgtgactgaaggatgctcagagcctccacctgacactcgggcctcttggtggatagcacctatccttatagccaccctgaatccttgacaagcaacttaacccactgccaaggctttgcatgtgccgttccgtctgcctrtcgcgccttcctatccgctgtgatgatccattctctagaacagcacgtccatcccccgaccctagccctgtccatcacagggcgtctgaacccgcagggctaggctgggaatgtgtgcctatctccgcctccccaggctgggactcctggggaataatcaatgccctgctgccggcagcctcccctcctcctcagctgcagtacccccaccttctcctggctccctgtccctgcctggggctaaggttccttctaagcacctccccatctgcattttgtgcctactctgggccccaggctggagctacctgccagcccactcactcctcctctgcagagactggaggtccatttgcttggactcacctcgaggcctttgcttgtgtagaggcctcttcctggactttgttccctacctcttagttcagctggcctgacccctctatggagctcccaaagcacccggagtggcctccattgcgtcctccctgccctaggtatctggccacctggctgctgccccctcatgtccaactgggccaagtcggcagatctaggtgtaagtcctggcttcctcctggcctactgcacggccctagatacctccctgctctgagcctcagtttccccatctgtaacaggggtgatgaaaagcctgtttactggccgggcgcggtggctcacacctgtaatcccaacactttggaaggcagaggcrggaggactgcttcagcccaggagtttgsgaccaacctgggcaacatagcaagaccccacctctattggaaaaaaaaaaaaaaaggctgggcaaggtggctcatgcctgtaatcccagcaytttgggaggccaaggcgagcagatcacttgaggtcaggagttcaagaccagcctggccaacatggtgaaacctcgtctctactaaaaatacaaaaattagctgggtgtggtggcctgctactcgggaggctgaggcaggagaattgcttgaacctgggagacaggttgcagtgagctgagatcacaccactgcactccagcctgggtgacagagcaagactctatctcaaaaaaaaaaaaaaaaaaaaactgatttactgagcatgtagtatacctggggcaggttcttgggaactctactcccagcagctccaagggaaggctgtcagtatacccattttacagatagagaagctgaggccctgagagggaccggccccaaggtcacccagtgattcagggaattccaaatcaggatttgggcccatctccgtgttgggggtgagaggagttggcctggctaacgctgccctatccctgtctccctaggtcggcgtcctcagctggccgagcatggtggcagcctgcacccttggctcccttgtctggtgcagccagcagagccgccagccttgggcgcccatggccctccrtgtgagggcgtgagcggcctgccccagcctcacctgctgatggaggactcaatggcccagtgacctgacaccacaccaccaactccctcccaccagctgacgaatggtggacccagtgacragtggcccttgtaagggtcatggaataatttgaagcgaggcatgagcggcccctgtggtcgcctgtgactgctrgagatagaggtcccagcaccccaagccaacccagcggaccctcccagccctgcttcaaccaatggggccagtggggctccaagcagccacctaaccatccagaccccaccccactcacgcggccatggcgggccctgagggcttccagtaccgcgctctgtacccgttccgccgggagcggccggaggacctggagctgctgcccggcgacgtgctggtagtgagccgggcggccttgcakgcgctgggcgtggccgagggtggcgagcgctgcccacagagcgtgggctggatgcccggcctcaacgagcgcacacggcagcgaggtgacttccctggcacctatgtggagttcctggggcccgtggccctggcccggcccggccctcgcccacggggcccccgcccactgcccgccaggccccgtgatggggcccctgagccaggtgagcagcaagcaggggccctggaaaggggggtggtcccctcagacccttggtctcctcttctgtccagtgaggcaatgggatctccaaggaaggaggaaaaaggacatttggtcatttgacaagtgtcttcagtgctaggctcagcagtggacacaaggcctgttcctgccctcatgagcttctggttcaagaagggatgagagtgggttcaggaggtgacacatgccatgaggaagggggcttgcgtgggaagatgcgagggtggaagctcaaggcagtgggggcagcgagggcagaggctgtggagtagaactctaatggcgggaacggccagcaggaggaccagagggaggaaggggagggcaatgtgcgctggcatggaggacttagtgggattgattttgaggacaatggagagtgttcagtaggattcagaggctcagcctagcttcatcctgccttttgcagacagggtcccttgaagaacccctttggagaccctgatttccaaaatgaagccacaaggagggtrggatgtgggctgctcagctgaggccacacagcacagtgggatatgaggaccccacatccctcttcaaagacccttggccatcaccacttgccaggggtgtgccaggtgtagagaatcgggggcaccgagcccactcagtgactgctgtttgatgggcagggagtgtgggctctggccggggaaactgtggcccaggttgcaaggaggaggctaagaggtgctgcatgctcggcatggtctgctccgaccctcccagcagcccagcaaaaggccctgtgtgcagaccgggaggcctgagtgcaaggccgtcaaatgccgtacttgaaaccagttggtcacccagggaggccaaagccccgggaggtgccaggcctgctttgtgccagggtgacattgcccaaaggcaaaccagagtcccccagcgcagggcggaatagggggtgctgaggtggtgcgacgctggccccagcctccaggcatctggtatctccagggcccaggcctgcgtcctgcctcggcctgaaggagcaggaggyggccccgtctgggctcccagccagaatctgcctctccccctggtaacagccacctccctcctctgcctggcctctgtccagccaccatacacggccccacgtggggcggctgcccagccccaccctctgaatcttccagggttatgtgacctcggccagaacccgccccctcgaggcctcagtttcctcatctggaaacaacagggttggtccctggggatgctgggacccaacccctcggaaatgtgctgaagtcacctgagccccacctggctgtgcacccacgggggaggttgcagcccctctgacccacaattcctcacctgcaaagtcggggtgatgcagttctgatgggaaccccctccccattctgcagattgatcccaggccactctcagggttgagtttcccaacccaccggccagagtgtcacccacctccacctcctccttgtccttttccttttttttttttttttttggcgttttcgttgcagctgggcctttctccagcttgaggcgccacctggcccatcactcagggaggccccgcaggccccggcttgcccctgctgtgtgccagggcgtccccgccgagggccagagcagcgtccaatggtggcagacagcgagctgctgaggcggggatgctgcacacaaaaggccctgtagtgctgggaagccagggctgggagggggctgggcccaggatgccgccggcacccgctaggaggggtttcagcttttccaaaaggggagcaataattttctttcttttctaaattttaatttggggaagaaataattttttagaagcaaaatgattaagaaaacgggtcatggtccttggaaggaagctgttctgacccaggccgggatatttttcttttctttcctttcaaccacttttttgtttgcatcaagaagggagaagcgggccgggcacagtggttcatgcctgtaaycccagcactttgggaggccaaggcgggtggatcacttgaggtcaggagttcaagaccagcctggccaacagggtaaaaccccatctctactaaaataatacaaaaattagccaggcatggtggcacccacctataattccagctacttaggaggctaagtcacgagaatcgcttgaacccaggagatggaggttgcagtgatccaagatcatgccactgcacaccagcctgggtgacagagcaagactccatctcaaaaaaaaaacaacaacaacaamaaaaaaaaaaaacgaggaggccaaggcaagtggatcgttaggggccaggagtttgaggctgcagtgagctaggattgcgccactgcactccaacctgggtgacaaagcaagaacctgtctcaaaaaaaatgagaggcaatgtcattggcccatttttcatttgaaggaactgaggcccagagagggcaggtcctgtggccaagattgcacagcaggttgtggcagagcccaaacctgctatatgactttcagtggctgccgcaaaaattaccaccaactaggtggcttcaaacaatggaaatgttatttattaattaatgtatctttttgttttgttttgttttgttttgagatggagtttcgctcttgtcgcccaggctggagtgcaatggcgcaatcttggctcctgcaacctctgcctctcgggttcaagcsattctcctgcctcagcctcccgagtagctgggattacaggcacgtgccaccacgcctggctaatttttgtatttctagtagagacagggttttaccatgttggtcaggctggtctcaaactcctgaccacaagtgatatgctcacctcggcctcccaaagtgctgggattataggagtgagccactgcgcctggcctcctttttttttttttttttttttttttaaattatttaagagatggggtctcactctgttgcccaggctggtcttgaactcctggactcaaaggatcctcctgccttggcctcccaaagtgttgagattacagacgtgagcctttgcaccccaccacaacagaaacttattctgtcatgtttctggaggctggaagtccaaaatcagggtcgtgccccctctgaagtttccttccttgcagcttctggtgcctccaggcattcattcctctcatgcatgggttgattattccagtctctgccttggctttctcttcttttttttgagacagagtctcactctgtcacccagactggagtgctatggcatgatctcagctcactgcaacctccgcctcctgggttcaagcaattcctgcctcagcctcctgagtagttgggattacaggtgcgcaccaccacacctggctcattttttttttgtatttttagtagagatggggtttcaccatgttggccaggctggtcttgaactcttaacctcaaatgacctgctggtctcagcctcccaaagtactaggattacaggcatgagccaccgcacccggcctgttgatttatttttgaaacggagtcttgctctgtcgcccaggctggagtgcagtggtgcaatcttggctcactgcaacctccgcctcccgggttcaagcgattctcctgcctcaacctcccgagtagctgggattacaggcacccaccaccacgcccagctaatttttctgattttagtagagacaggttcgccatgttggtcaggctggttcgaattcctggcctcaggtgatccacccacctcggtctcccaaagtgctgggattccaggcttgagccgccatcctggccggctttctcttgttacaaggacatcagccagtgggtttagtgtccaccctaatgccaggctggtctcatgtacagattcttgctttccttacacctgcaaagacctatttccaaataaggtcacaggtaccagggatgaggacttggacatatctttttggggactttattcagcgcactccacctagtctgtgaagttgtgtgaactcctcatattctaacccagaaaattgtgtcccatcaattctgccctttcccagcccctccacccaaggtcttgcagcctcctgcggatgggagtcaaggtgccaagcacttgcctgagctgggccctgcctcaaactgccccagctgaggttcagccagcaaagagaggggctgggctccttccaggaaccccaccaacatgcaacccccctgtttcccccaccaggcctcacactccccgacttgcccgagcagttctccccacctgatgtggctccccctcttctggtgaagcttgtggaggccattgaaaggacaggtaagttccagcctggctgcagcccctggattctgcttgcttacctctagtgacaggcgactcatcctctcacagggcctccaagctcatgctgcacggaaacaggctgagcctggatgccctgggcctctatgttgaatagggcacagagtgactcctaagggaagatgggaaggtgaacatgaccaggccactgcatgtgytgtgccctctcccagttctccctccccacccctcccatgcccttatctctgggcagcaaagggagactgcaggggggttgagcggccagtccaggcctcacgaggtcggggcagcatttgagagctgactcgcctgtccccttcacccccagggctggacagcgaatctcactaccgcccggagctgcccgcaccgcgtacaggtgaaggggagcctcaatggggttgggaggaggctgggggccccagtacacatgagttggacgtgtgcccccctgcacccgcagactggtccctgagcgacgtggatcagtgggacacggcagccctggctgacggcattaagagcttcctgctggcactgcccgcgccgctcgtgacccccgaggcctcggccgaggcgcgccgggccctgcggggtgagcctggcgggtagcccgggggaaggagggggctgtagcgggtgggagggcccaggcctggctcaccctgccctggccatctgtccgcagaggccgcggggcccgtggggccggcgctggagccaccgacgctgccgctgcaccgcgcgctcacrctgcgcttcctgctccagcacctgggccgcgtggccmgccgcgccccggccctgggtcccgcggtccgggccctgggcgccacctttgggccgctgctgctgcgcgcgccgccgccgccgtcctcgccgccgccagggggcgctcccgacgggtgaggggcggggcggagccggagcgagcaggggtggagtttggggtggggcgggcggggcatggccagagtgagcggcgtctagaccctaagaagggaggggatggggtccagagtgagaagctgcgttcttgtgatgacggagcggagacctgggctcctgagtcgtgggacagaaggtgaaggggcctagtcccgaagcatgtgggtggtgcctgcaccttcccttctgctcgtcgcagctccggtactggtctctcgctcgcctttgtgtgagaatctatggagcacttactgcatacagctatgagggagctggcctcgcacatgtgcctgtatcatctcctcctccgccctgcacatactgtctcgtatatacccccaggcgtgcaagcgcacgcacaatcctgtgcacatgcgtgggcggacaggccctacccagccctcaccacactccccttccccctaaggagtgagcccagccctgacttcccggcgctgctggtggagaagctgcttcaggaacacttggaagagcaggaggttgcgcccccaggtgagtcccctgtattgctgtcatttcttcccgttgggggccgtaaatactgatccctgagtgctgccggcatcagcaggctggttgcagtgggaggcagccacagtatacagtcrgtgctcaggatgcatttgttttcctgtcccccagcrctgccgcctaaaccccccaaggcaaagccggccyccacagtcctggccaatggagggagcccaccctccctgcaggatgctgagtggtactggggggacatttcaaggtaggttgctggcagggggccagggaccaaggaggtgtcacagggtgagcggggtctccaggtggctcggcagtcccaatgttggatgttcccacagggaggaggtgaacgagaaactccgggacactcccgatggcaccttcctagtccgagatgcttctagcaagatccagggcgagtacacgctgaccctcaggtgggggcctgtccctgcaaggataaccgggggtcacaggtcacagagaccgggagttcagaggggatagaacatgtgcggtttcaagaatggrgggccaggcacggtggcttacacctgtaatcccagcactttgggaggctgaggctggcagaacacctgaggtcaggagtttaaaaccagcctggccaacatggtgaaaccccgtctctactaaaaaatwaaaaaaaaaaattagccaggcatggtgatggatgcctgtaatcccaactactcgggaggctgaggcaggagaattgcttgaacccgggaggtggaggttgcagtgagccgaaatcgcaccactgcactgcagcctggacaacagagcagcaagactctgtctcaaaaaaaaaggggacagggattgagggtcaggtgcggggtcccactgggtgccgacacccctctcctcccccaggaaaggcgggaacaataagctgatcaaggtcttccaccgagatgggcactatggcttctcagagccactcaccttctgctccgttgtggacctcatcaatcactaccgccacgagtctctggcccagtacaatgccaagctggacacacggctcctctaccctgtgtccaaataccagcaggtccgtgctggcctgggagccagggagggtagcacctggctggccccaggcctcagtttcctaggtagacccgaccaggctatgcatctcccctcattccgccacgtatctccaggaccagattgtcaaggaggacagcgtggaggcagtgggcgcccagcttaaggtctatcaccagcagtaccaggacaagagccgcgagtatgaccagctttatgaagagtacacacggacctcccaggtactccaggccccgtacatgagggaaaccgagacatagaggggcagtggcaaggccgggagcaggatgaccaaccccagaggacttgaggatgaatatccagttgcaggtcacagagcaggcacttagcaccaagggctgttctaaaaacatagaaataaggccaggcacagtggctcccgtctgtgtacttgggaggcagagacaggaggatcacttgagcccaacagttcaagatccttctaggcaacatagggagacccgtctacaaaaaaatttaaaaattaactgggtgtcgtggtgcatgcttctactcccagctactcaggaggctgaggtgggaggatcccttgagcctgggagtttgaggctgcattgaattgtgatcatgctgctgcactccagcctgggtgacagggcacgaccttgtctctaaaaacaaataaaaacagaaataagcgtacgaggctgggtggggtggctcacgcctgtaatcccagcactttgggaggccgagatgggtggatcacctgaggtcaggagttcgagaccaacttggccaacatgttgaaaccctgtctctactaaaaatacaaaaattagctgggcatggtggcggacgcctgtaatcccagctactcagaggctgaggcaggagaatcgcttgagcctgggaggcagagattgcaatgagccaagatcgtgctactacactccagcctgggtgacaagagtaaaactccatctaaaaaaataataataattaaaataaaaaaataagtgtacaagcttttacaaaaccaaaaaaggacagatgagaagggcccaaccagcctcacaggagtggctgagccaggacctggggagtgtccaggatgagcctatctccggctggccctcagttttcccatctgcagaatggaaccaggcaccttgattacttatgtccccttcaaccaagatgttattcaaaatgaaatcatgccaggtgcagggcgcgcacctctaatcccagctactcggaaggctgaggcgggaggatcgcttgagcccaggagttcaagactagcctgggtaacatagcaagactttgtctcttaaaaaaataaaataaaaattaagtgaaaggttttgtcactcaaggactgtgctaataagcttcttttgcaagttaagagggaatagattcaggtggaacagctgggaattcctcagtcgtccctagtaccctaagggttttctgtcctcttttttttgttttgtttttttttttttgagacagtgtcttgctctgtcatccaggctagagtgctgtggcatgatctcagctcactgcaacctccgcctccctggttcaagcgattctcctgcctcagcctcccaagtaactgggactacaggcacgtgccaccatgcctggctaatttttgtatttttagtagagatggggttttgctgtgttggccaggctggtctcgaactcctggcctcaagtgatctggctgcctcggcctcccaaagttaaaaaaaaaaaaagaaaaaaaaaatttaataaaattaaaaggtaggccgggcacagtgactcatgccagtaatcccagcactttgggaggccgaggcaggcagatcatctgaggtcaggagtttgagaccagcctggccaacatggtgaaaccccatctctaccaaaaagataaaaaaattagccgagccaggcacaatggctcaagcctgtaatcccagcactttgggaggctgaggcaggtggatcacgaggtaaggagttcaagaccagtctggccaacatggtgaatccctgtctctactaaaaatacaaaaaaattaggcgtcatggcatgcacctgtaatcgcagctactcaagaggctgaggcaggagaatagcttgaacctgagaggtggaggttgcagtgagccgagatcacaccattgcactccatcctgggacagagtgagactccgtctcaaaaaaaaaaaaaaaaaaaaaaattagccgggcatggtggctcacacctgtaataccagctacttggaaggctgaggcaggagaatcacttgaacccaagaggcagaggttgcagtgagccaagatcacgccactgctccagcctgggcgacaagagcaagactccatctcaaacaaaaaaaattttgaggtgctgtctcaccatgttgcccaggctggcctcagactcctcagggttcaagagatcctcccactttagcctccctactagctgggattacaggcattcgccaccacccctggcctctgtcccctttttactgatgtgttagctgaggctctaaatggacaagacagttgtccaggatcagttaggagcactgtaacctcagaattgactttggccctgagcctcagtttctctgttaatagttgttactttgttaggggttgttggaagggtccatgggacaaagtaaggaaagtcgtagtgcggcatctcccccaagaagccctgtgagctgtagcaactagatctgtcattcattcttagcagtgttaacaggtccaggtgtttgtggatacctataggaggatgtaaagaagaagagggtttggggggtggggttttgaaggctgaataggagttcatttggtgcagcaggcgttagaagaatgacactcygatagagggaccagcttgagcagtctccgtatcagagttgagatgtgcctttacccctcacgagggccttttggggagtcccaggaggtgctgagctgcgccccctcctccaggagctgcagatgaagcgtactgcaattgaggccttcaatgagactatcaagatctttgaagagcagggccagactcaagagaaatgcagcaaggaatacctggagcgcttccggcgtgagggcaacgagaaagagatgcaaaggtgagtctggcgcctctgccctgccccaccccaccctgatctggtgcagtacaagccagggagggaaggaagcagaaggaggccagccacttgraggcaaagagtagtctgttgaaatggactttgggcctggtgcgatggctcaggcctgtaatcccagcactttaggaggccgaggcgggtggatctcctgaggccaggagtttgaaaccagcctggccaacatggtgaaaccctgtctctattaaaaatacaaaaattagctaggcatgatggtgcgcacctgtagtcccagctacttgggaggctgaggcaggagaatcgcttgaacctggagttggaggttgcagtgagccgagattgcaccactgcactccagcttgggtgacagagaaagactgtctcaaaaaaaaaaaaaaaaaagaaatgggctttgaaggatgaataggagtttgctagaaagagaaatcagaggaaacagcatatgcacaggctcagaggctggaagcacatagtctggtgcaaagtaggtccttgagaaaaccctggaggccgggtgcagtggctcattcctgcaaccccaacactgtgggaggctgaggcaggaggattgcttgatcccaggagtttgagaccagcctgggcaacatggcaaaatctacctctacaaaaaatattaaaatgttagccagacatggtggtgcacacctgtggtcccagctactcgggaggctgaggtaggagggtcacctgagcccaggagtttgagggtgcagtgagccgagataaaaccctgaggtctctgcgccaccccacccctcccacaggatcctgctgaactccgagcggctcaagtcccgcattgccgagatccatgagagccgcacgaagctggagcagcagctgcgggcccaggcctcggacaacagagagatcgacaagcgcatgaacagcctcaagccggacctcatgcagctgcgcaagatccgagaccagtacctcgtgtaagtggcggctccatacttccctgcggctccctggcgactgctgcggcacatggagatctctctaggagtctcagtctctctctctccaccaagtggcccttcctgggccccgagaccccttaaactcggttcctcccgggccccttgaaagttttcccataggtcagcctcagcttagtcagaggtgtgtgcaatgggagtgtcactcctatcccattccattttgtggaaagttggaagccttccacaaaaattcctgctgggctgggcgcaatggctcacacctgtaatcccagcactttgggaggctgaggcrggcagatggatcacttgaggccaggagttcaagaccagcctggccaacatggtgaaaccccgtctctactaaaaataaaaaatacaaaacccggccaggcatggtggtgggcgcctgtaatcccagttactcaagaggctgaggcaggagaatcacttgaacggggaggtggagtttgcagtgagcagagattatgccaatgcagttcagcctgggcaacagagcaacactctgcctcaraaaagaaaagaaaaaaaaaatcgccygctgtgcaacctaccatgctgggtggctgcggcagccctgtcctgggttcaaatcagttcaaatsctgcccccacccaccaacctcctgaagacctcagccagagcctccacctccctcttgggcctcagggagggcactgtcgcgtgccaggtgctgtgctaagcaccgtgctcgttatgagttcatttggtccttttcaagccctttgtaaagtttgccctttacagctggggagactgaggcacagaaccgacagctgccctgtgcaaaggccagcagtgctggagtgagcctctggtgatgatgaggggcctgggctggcatcttcttgggggactccataggcgttaacagaaacaaaaaaatgaggggtgtgggtcagggttccccagcagagctgggcgagccaccctgggttcaggctgccctgagccasgtcagctctgccctcttgtggcaaccggagatattgtacccagaaccctctctcctcagccagaccctgcctcccaccggacaggcccactgtgggctcagcacccacacaactgcacaagcccacctttcctgttccttctcaggtggctcacccagaaaggcgcccggcagaagaaaatcaacgagtggctggggattaaaaatgagactgaggagtgagtgaccgtctggagggaggcagggagggcttcccagaggagggggccatttggggtgggtttcgaagaatgagtaggagttcaccagggaggaaaagttgtccaggcagctggggagcctcggaggctggcaggtgagtgaccagggccctccccgccaccgcccsccaccccagccagtacgcactcatggaggacgaggacgatctcccgcaccacgaggaacgcacttggtacgtgggcaagatcaaccgcacgcaggcagaggagatgctgagyggcaagcgggatggcaccttcctcatccgcgagagcagccagcggggctgctacgcctgctccgtggtgtgagtggaccgcagcggtggggattcccgcgtccctcccagagctctcattgaatgcctgccgcgtgccaggccttgggaaggagtccctggtggggtcatccgggacrggggagcacgcggccctggaacggggaaagcttggcggggaggccagccttccgactccccctctcgtctgcccccacagagtggacggcgacaccaagcactgcgtcatctaccgcacggccaccggcttcggcttcgcggagccctacaacctgtacgggtcgctgaaggagctggtgctgcactaccagcacgcctcgctggtgcagcacaacgacgcgctcaccgtcaccctggcgcacccagtgcgcgccccgggccccggcccgccgcctgccgcccgctgagcaccgaggacccgccccaagcagagccgcccctgggcccgtctgcgccggaggctgcggcggcgggagccacggaccagaccagccacatccaggggtcctcatttctccggctctggctcttgtttggggttctctcaccctctttctctttccttccctcccccattctccagatctccctctgtctccttttctctgtctttcttggcccctgtctctctccatgttgggggtcctaactcccccaccccatatctacgtgtcctccgggcattgccctctccatggctctggtcaccctgaccctctgccctgcccaccgcaggtcccccggggtcccggaagccccttctggctgcacctgccatgtttacagagggcccctgggctgcgcggccccagcctgggcaccctgatttttaagccatagacctggggtcagggcaggaaggaacttcactctgctgcttccgagaacctcggccgtgacattcggggccgggcgggacccgccccacagactccaacttcccctccwaaccccgaagtgaaacccgccaccgggttacccccacaagggggccgctgcgagaagttcacccacccccgaaaaaataattaaactcgcaggccaggcacggtggctcatgcctgtaatcccagcactttgggaggccaagacgggcggatcttttgaggtcgggagttggaggccagcctggccaaaatggcaaaaccccgcatctactaaaatacaaaaattagccgggcgtggtggcggccgcctgtaatcccagctacttgggaggctgaggcgtgagaatctcttgaacccaggagatggaggttgcagtgagcagagatcgtgccactgcactccagcctgggtaacagagggagactcctccgtctcaaaaaaataaataaataaacttgtgagctggccccaacccctcctaggaatcacagctccccgtactggtgccgccgcagtggccaagttgcgacactgcccacggcccctccctctgatgcagattcagggcttctcttcgatcatgttgggttttgattctgtttttccttgactgcaaaaccctctttcctctcctcttttgggacaagagccctggttttctacgctgcccttggccaccacactgcctgccccacgagctgggaggcaggttttgtacggtacgttgttattgatatgatataaaacatcaaacgtcgtgggtgattctgttgtcagtgactgggcttcagtaccacctctgcgtgtcggggaccctggtgtctacgggggtcacagcaggtcggacccgtgggtttaactccaagcccctctgagacccgacaacccctccctcccccagtttagctgctcaagcctggagaggttgaggcagtgcccaaggtcatacaggagagagattcgaatcctgagctcccgactgctcaggggaccccagaccccatccagcccctcaagtgcttccaagctgcttcccccgcccaccgcccccaaatttgaatcctgtcgcaaccatcagctgtgtccttgggaaagttgtatcccctccctgatccacagcttcctcattcattgccaagtggcgtcaaaagtcaaaaccctcccatgccacagggaggagtctcccgtgtctttgatgttctcaagtcgtcggcacctccagccagcattggaggctcttctctgacctctcctcacccactcccatgcacagcccgccgggtcccaggagacgctgagcaaaagccctgtggggttttttgtgtttctttttaaagagtcaaggtctctcactctgtcacccaggctggagtgcagttgtgcgaacacagctcgcggctcacagcctcaagctcctggttcccagcctcaagcagtcctctcatctcagcctttagagtcactggattacgggtgtgtgtcaccatgtccagctaattatttttaaatttttttagaaacaagatcttgccgagtgcagtggctcacacctgtaattccagcacttggggaagccaaggcaggcagatcacttgaggtcaggagtttgagaccagcctggccaacatggtaaaacctggtctccactaaaaatacaaaaaaaaattagccagacatggtggcgcatgcctgtaatcccagctacttgggaggctgagataggaagatcagatgaacctgggaggtcaacgctgcaccaagccaagatcgtgccactgttctccagcctgggtgacagagtgagactctgtctcaagaaaaaaaaaaaaaaaaagggtcttgcccttttccaggtgggtctcaaactcctggcctctagtgatcctcccacctcagcctccctgagtcgcgtaagccaccacgcgtggcctcatggcgtctttgacttggactcctgtttaccaccctccccatcacacccagaatccacacccccactgcgacgtcattgtcccttcagccctccccaaccctggggcctcactgtccttgtctgttttgtacagccacctctcaaggcccaacaaggctgaacctggggcaagtgcagaaagaaacctccactctgacccagtctactgctgggaccttgggacaggacctgcctcccttagcctcagagccccctagccttgccaggcactgtccctgccatgtgtcctgtctggagataacccataaataactccagcccagattgtgcctctcactgcataggtgctcacaggagaaaggttgccatctttatgatcccagctatgctgagctgggggtggaagagaatatcccgtgtggtctctaaaaacactcaaccactggctgtgtgtccttggcaaaatagccttccctctctgatcagccatttatttgttaccagctggagtcagtagcacctacccccagccccaactggatgcttctgagggttcaatgataaaatgggttgtaggcccactctatgcctggcaccaagccagagagcaatacattgtagggttacatttatgatttcttccaatagggctggtgcctggtaactactggaaaaattgtagcaattatatttatggttatttcttcaatcccacccggcatagggtaagcaccaaagttggggtggtgagtcttggggagcctttgccaacggtttggtcgtctgagggatgggctcggggaccatccagccactgggacttcagagaagctccggctcccaaaccagctactgtgtgtgtggccagggtcttccccacaactagaggggggcacagctggggactcaggtatatcttccagctgggtgtgggacattttcttccctaggatccgatgtgtcttgccctgaatgtaaggcctggcagggttggaatgtctcagttattcccccaacactccagcctccatctgggccttttttccaggctattctctctgccttcactgttggggccactgtcctgtgtaggcaccaaggcctgaccatgccatccagaagccccagcctgggacaactctcccccacctgcctctgagccctccatggtgactcttgttccccaaaccttatccttctccccattacacagaagggaaagctgaggctctgtcactcaaatccaaagccaggtggactccaagccaccccacccctatcccagacagcacaggctgcctctctcccccatgggcgtcccttgaaggccaggttgccccccaccccccacaagccttgaacgatgaaaagaaggaaggccagttctcttcaccccaagccagaagtggggctgggtgggtaccctagagaaatgacacgccactccctgcgccagcttctgctttccggcgtggctgtggtcaagcctgagtcagtcccacgggaccacggtgaggggtctggagcgtcggggtcaggagtttgaggggggaagggttgaggggcaggatgtgggggttgggtgtgagggaggtcacgggcgagactggagggaggagacctggccacacaggccttgcccactctcgggggcctgaatatttcagttactcccccaaaaccccggcctccatcccatccccagcctccatccgacgtcacccctgttaggtcacaggcccactctgagagtgggtctcgggcctcaagtcccctagccgcccctagaaggtctaggggtgcgtggagacaccaccattcctctcagcctgtgtctgtctcaaaggccccacctcacctcccctaaaggtagtcttgcgccagggctcacgtgcctgggcagggctgattgccaaggggcccaatggcctcgtgactggggacccagcacctggcaggggtgggggtgggacactcagaggaaggagtggaggagggagagacgctggcccgggacccgaggggcgtgggcatcgggaggcgggcccgggttaggggcgggaccgccgcctggttaaaggcgcttatttcccaggcagccgctgcagtcgccacacctttgcccctgctgcgatgaccctgtcgccacttctgctgttcctgccaccgctgctgctgctgctggacgtccccacggcggcggtgcaggcgtcccctctgcaagcgttagacttctttgggaatgggccaccagttaactacaaggtagggacggcgacagggcgggcaggctggagggaacaggcgccctgtcggggcacgcggctccttctttctccccagacttcacaggggaagaccagggccccgaggggacgctgtccctgccgggttcctggaaaaaccctgttcagttcccggcgctgcggccacactccctccgtgccgtttcgctttcgcatcccgcatctgagaggcgcagctgcctccacccgcctagtcccgcccaagggttcaatgagcgcctactgtgtacttttggggcaggagctggggtctccttttgtggcccagggcacaagttcagcagctggccaagggccgccggcatgcattcttgctgctacccttgatgcattcattccagccagggcagggctcgcgtgtctttgggacctattaggcagatgccctagaggctgagcgacttgctcaccgctccagcgacatgggccacccgccacccctcagctgaagccggaagtcagcacctattaggtgccgcctctattcagtcggacttggaaagggttcacgtggatcccttgctcagctcagaggcaaggtctccaggtgaagtgacaagaaatgagcatgggccaaggccggaggcggtggctcatgcctgtaatcccaacactttggaagtctgaggcaggcagatcacgaggtcaggagttcgagaccattctggcctacatggagaaaccctgtctctactaaaaatacaaaaattagctgggtgtggtggcatgtgcctataatcccagctactcaggaggctgaggcaggacaattgcttgaaccagggagtcgggtgttgcagtgagccgagatcgtgccgcagcacaccagcctagcgacagtgagactccatctcaaaaaaaaaaaaaaaagtctcaaagtcaagattccacctggcaagttctggaaggcgtgcaagatgaattgcgtatcacagccccctttctacaagactaccaagtggggttgagagaagtggggaactgcccagggctacacctgcctcccacgccttcctaatccacagacaggcaatctatacctgcgggggcccctgaagaagtccaatgcaccgcttgtcaatgtgaccctctactatgaagcactgtgcggtggctgccgagccttcctgatccgggagctcttcccaacatggctgttggtcatggagatcctcaatgtcacgctggtgccctacggaaacgcacaggtgtgtgggcgctggggaaactgaggcacgtgggcaggggagcaggggacccagcctaccagcaggctctcaccctgctgccttgcaggaacaaaatgtcagtggcaggtgggagttcaagtgccagcatggagaagaggagtgcaaattcaacaaggtggaggtgagcggccccagggccccacactggggtgggggaaaactgtcccacgtacaggaggcaaatacgaggatgccagctctgtcttctgcctcgtgtgctcccatttaatcacatctttattccctatctcctgggtgggtactggtgattattacgagagggtgtcagggtaccctaggccctcttcatgccctctcctgccccctctccaaaccccaggcctgcgtgttggatgaacttgacatggagctagccttcctgaccattgtctgcatggaagagtttgaggacatggagagaagtctgccactagtgagtgacgcccctcactccacccaaggagggggacatgggtggtaaccttccctgcatccaggcagacccaaattcaagtcctagccctgaccactgctgtctgtgcagcccaggaaaacaactacccttctttattttatttatttttttattttttcttgagacagagtctcgctctgtcgcccaggctggaatgcagtggcgcaatcccagctcactgcaacctccacctccagggttcaagtgattctccagcctcagcctcctgagtagctgggattacagttgtgtgccaccatgcccagctaatttttgtgtttttagtagagacagggtttcaccatgttggtcaggcttgtcttgaactcctgaccttgtgatccgcctgccttggcctcccaaagtgctgggattacaggcgtgagccaccgcacccagccctttttttttttttttttttttttttttttttgagacagggttttgctctgtcgcccaggctggagtgcagtggtgcaatcttggctgactgcaaccactgtctcctcagtttaagtgatcctcctgcctcagcttccccagtagctgggactacaggtgtgcaccaccatgcccggctaatttttgtatttttagtagagacagtgttcaccatgttggccaggctggtctcaaactcctgacctcaagttatccgcctgtcccagcctcccaaaggattacaggtgtaagccaccacgcccggccccagcctcccctcttg

SEQ ID NO: 5721 - DNA, 84886 bp, Homo sapiens
aaatagactatataacagttttgaaatttataaaggtaactatgcatcagaatctctatatatccatgatgaaaacaaaaacaaggagcaacaggaaatgctatgtaaatatccttgaatattgaatattgaactgtaactagcaataaaaagattgcaaaccctgtcccctcctcccccaccccaagccaataaagttgctcaaaaacatcacctcaaatttcacaaaaaaattatgtgattatttgaagacgaagatggggaaaatactacacattagtttataactcttacctcctcattcctccaactacggtagagtcagaagagctctgcagcattggaaacatctgcataaaaatacacttgcctctggctgggcatggtggctcacacatgtaatcccagcactttgggaggcccaggagggtggatcacctgaggtcaggagttcgagaccagcctcgccaaatggtgaaaccccgtttctactaaaagtacaaaaaattagccaggcatggtagcgggcacctgtaattccagctactctggaggatgaggcaggagaatcacttaatgtttcatgtttaaattttctctattttatgtaatgtttctttactttttaaaaaatactttattatagaaaatttcatacatatggaaaagttcagaaatatcaatcaaaactacaatgagatacagaaaataatataaggagcctccttacacctatcaccaaacttcaacattttttttttttttgagacttcctctatcacccaggctggagtgcaatggtgcgatcttggctcactgcaacctccgcctcccgggttcaagcaattctcctgcctcagcctccttagcagctgagattacaggcatgtgccaccacgcctggctgatttttgtatttttagtagagacggggtttcaccatgttggtcaggctggtctcaaactcctgacctcgtgatccacccgcctcggcctcccaaagtgctgggattacaaacttcaacaattattaactcatagccaatcttatttcattgatatttttacatacattgttcatattaatttaatgggcaaataacttatattagtacaatagtatatatttaatatttgtatcttttaaatgttttatattcttccatgttttgttatatcctttttttatgaattctggacacaaaaaataaaatactggtattcatactgtcattttgatattacactaaacactcaaatactgatattgtcattttgctttgtgcttcactagtaaatggggcctaagcactaaaacgcttgttttatgcctgcataactcagccctctgtagaacaatcaatgtcttgattacctctatattacaactttataccaaaatctttattccttaactacaaccaccatatttccacatggccttaaaaacagattaaacagaaatttttttctgaaaacttttctttcaaagcagtatttacagtatcatccagcagaagaacctgtactttataacttacaaattttaccactacaaaattcatacagtatcataaggccaaaaaaggaactaaaaacttaatgcattttagaataattagggacactgtgccctctcctaagcatatatacccaccatttttgtcctttagtagtttattgatgatgttactaaggtcggcaatttcagaggcagcagggattgagaagggaacatcatctacggcatatctataaaaaggaaatgatatgtcaagatcaagtctacagatatttgaacaaacatgcttttacgaattcaacatacatttattgggtaaataaatgccagacatccagacattttgctacatgttgtaaacaaaaatgaattaaaacatggtctctgttctaagatgaggttgaagtttagtaatcaaatagaatgaagttatataagaacaatgccattaggtgacatgtataaaaagaacaaagacaccataggtcattttaaccacagaaaaggagggcaggggagcagggccagaaacgatccacagaaaagataactgttaagcaacatttagaaaagtgattagccaggcgtggtggcatgtgcccgtagtcccagctacttgggaggctgaggtgggaggactgcctgagcccaggaggtcgaggctgcagtgagctgagattataccactgcactgcactccagcctgggtgacacagcaagaccctgtctcaaaagagaagtgagtttttgccaggtgagggaagggtaggctggaagaagcagtgtggacgaaaccagagagaacatcaaaacaatagctaggagttgttaaactgcccagccacttccagaaaatctgactttgctccaaagtgaccaaaggctaaagagatacacatggagtgctttatatatcatgtgaaatcatttttacttcttttttgtgggtaatgaagaactatcacagcagtgcaaattagaagtatcatcagattttatttagttagatctttctggctgcacaatgggcactgaaatagaggaacacatgacaggaggcagattaggagactcttataagagagactgtgagaaaatatttgcaaatcatgtatctaataaggaacttgtatctagactatattaagaacacttacaactcaataataaaaagacaacacaaattttaaaatggcccaatagggacatgcaaatgctcatcattagtcatccaggtaatgctaatcaaacacaatgaaatataatttcacatccactagggtgctataagtaaaaagacagctaataacaagtgtcagtgaaaatatggagcaattggaaccctgattattgctggcagtaacgtaaaatggtgcagttgctttggaaaacagtctggcagttcctcaaaaactcaaacatggaattacatctgacccaaaaactccactcctaagcatatatgcaagagaaacgaaaacatacatccacacgaaaacttgtacgagtgttcacataacaactattcataatagctaaaaggtataaacaacctaaatgcccaccagctgatgaatggaaaaatatggtacctccattcaatggcctattatttggccacaaaaaggaatgaagtgctaatatatactatgatataatgaaaccattttttaaaaatcatagtaagtgaaagaagccagtcacaaaagatcacattatataattccatttattcaaaacgtccagaagagagaaagttacagagctagaaagtagatcagtggttgcctagggctgggggtattatttaacaaacagctcaaggatgatgaaaaatgttctaaaattgactgtggtgatggttgcacaactttgcaaatatgatgctgatgatcctcaaaccacactttgagcaataaggctatagctatatatttatgtatataattcacatatatgtatattcttgtgtgtgtgtgtgacaattatattagccccccgcctccattttactgaccataatattaagcaaaaagaaaaagcaagaattttattatttatttatttatttatttatttatttgagatagagtctcactatgttccccaggctggagtgcagttgcattgatcctggctcactgcaacctctgcctctcaggctcaagagatcctcccacctcagcctcccaagtagctgggaccacaggtgggcaccaccatgcctggcaaattttttgtatttttggtagagacggggtttcatcatgttgctcaggctggtctcaaactcctgagataagcgatttgcgttcctcagcctcccagactgttgggattacagacatgagccacagcactcggcaaagaattttaatttctacatttttttaccttttggagggcctaaattcacacacacacatatgacatgtatccattcatttcaggggttaaaacacagtggcctattatctcttacaacttcatgtgaatcaacaattatctcaaggctggacgcagtgggtcatgcctgtaattccaggactttgggagaccgaggtgggcggatcacttgaggccaggagttcgagaccagcatggccaccaagacaaattcctgtctctactaaaaatacaaaaattagccaggcttggtggcacatgcctgtaattccagctactctggaggctgaggcgggaagattgtttgaacccgggagacagaggttacagtgagccaagatcccaccactgcagtccagcctgggcaacagagtgagactctgtctccaaaaaaaccaaaccaaacaaacaaaaaaaagccccacatatttcaaaaaattttattttaagaaaaacaaaaaaacctactttcaattaaaaaacacagtggttatgttaatgcatcaccacattcctagagaagtattaaggcaatgtatgtaagtaagtacatatactcaggtgcattgataatacgatttatgtatactttcagcaacaacacaaggggagagaagatgatttactagctctcctcataaagctacaaacaaaaccacagatgtaactcaggtgggagtttcctagtttatggctaactttagcttattaacacgacaaatattatcattttcactgaaaaatttgacattttttgttgactcagccaatccaagaagcttaattaatatatagtccctgccctcaagagacttccaatatagttggaagagaccaggcaaacacaaagaaagctaacaatgcaatatataccacaaggcagcatataattagttttcgaatgagtgctaacagaccttgagaccactggttaaaatgtttatatatctatatagatatacataaatggtaaatatgttttttcattttcaaaaactttttttccgttttcaaaaactgtgaaccaccactagcagacaccctataacaaggcccactgttcatttttaaattacacatataaaatgtttcattcagaaagcaaacctgaagcccttcagcctcctccacactcacaattcaaattatatagaacctacgaagctggttagaaagcaggtaatctcagaaaaaagggtgggggtgacagcagaaacaaccagggatccacaaggtcataccaaaggggtggtcggaaaggaacctggggaagggagagaaggctggaacgcttacttacttcttgttatcagtgtagaagcgtgtttggagctgagccatggcgaggagtacacacgacttgcccacggaaacgtacgggttagcagacccacaacacgaagctcctgccttttaagactacaaagaggcagctcaaaattagactgcacaggtaagcgaggaactgcagtctaagcctggactctgccttctgccctccggtctcctctgcagaaagcacgaggttgcccttctacagacgcccagaccacaaacatcgactacctactcctagatttaggagtcatcgattagaaaaggatagtcgtaaaggtagcatgtccctttaatcattgttagaattcttcccatacgtgtgggcccgtaatcgattaggaaaaagatcccactcaaatccgctttattaataaaaaattttttttcaagaggctgtcctgagcctggatagttcaaacacagctcctagttactacaagtctcagaaagcatcgcttctcaaacgctgtgaccaccgggaattgtagtctttttttgccacgctgccctcagagtatcttatttgcattaaatcctctagactccagccagatatcaaatttcctctgccttcagctttgcttgactaacgccttgccagtttttttttctcatacatattcccaaccagaggctcactcggcagaggtttttcctaaatctcgcctctaactgcggcttttagagagaggcgagaggcggaaatacaaagaaaagaacggatgagagaggaaacggtcgacggtggccgatagtggtcctactgtcgtgggactgctctgcgcgctcccggtggggcgcgcctgcgcattatgctggtctccatggcggggcctcggagccaagacgaggttgagtagactcgttttgaattttctcccctctgctccggcggacttcccatgtcgccttgtggggctatcggcggcggcaggactgggggagtcagaggtctggcagcgctgtctgcgcagacctaccggacgctacctcccaacccccctgtcttcctcctgcctcctcctcctcccgtcacctcctgacccgccggagctccgagcaactgccggcctccgcccccagccgcagccggtcactggcggcgccttccgcgccaagcttgggggccttttcggggtcccacatggcacggcttccgacccccggcccgggacggggctcgcaggccccagaggggcaggctggagaaggaggaggttaggtgtcttcaggagggttgctgagcccaaggacgcgccatcgccgcggagaaggagccggaccccttgggcggagcgcccaatgtgtggtccctcacgccgtcccgcaccttgctttttagggttctttttccgctttctgagcccttttataccttacgtttagaaggggaaaatcatcctcccacaccttctccccgactttttgccttttttgtcttgaagttacccaaaggcctgtgtattgttctcaatggtcccaagaattactckaatatagttgtttttctgagggaggatggatggagataactatcctgatcccaatgtcactttttaaggcattcgcttcaagagacaagcagtttagaatcaggcagaactggattgcaaaatttatgggcagaccggtatgtgtgaaggtgaagacaaagctttccttttttacgttgtttaaagatgtcctactgtaaggtagacgcctaatgtttaaatgaacgcctaatatttaaatagagaatgagaagagatttaaacaattggaagaaaaaataatttttattagagagcaatgacaataaaagtaggactcttttcagtttactcacctttgtagctccgaatccgggccctggaaccagaattcctgggttcaaatcctgcctctgctacttgattaacctttttgtgccacacttttatcaactataagaattaactgcggcatcggaagcactcagtatatgttaattattatcatcaaatagttactaattccagtttaactagaagctttgccagcgtgaatagataagggagaatagccacattgagtggaggaataaaattagaaaacctctgtgctgaagtcccaggagatcacttattaggcttgagcttgctaatggaagtggtgatcgtttaaccatgtggttattgtagtggtgaagatttacacattaaataagtcttgggcatctgaagcttgaaacactttcttaatgaaatcttgccgttgaatctgtacttactgataatatgtcattggttaaaatatatttataaaatgtataattgaccagcaggttaatacatttttatcattaatttgaaatttatcaaaatgagaatatacagtacctgacggtcagtggagtttgatcttaatttgatttgaaaattatgatcaggaaaataaataacctgaatatatgcttaataatataagactttgagtttgcaaaacagaaatcctgacttgactaaaatacacttttcatttgacggagacctttagttaaggaaagattagttttagcattcaacataactaaatacccagcattatgttttacggtttttttcaacaatgatttatgtgtcgtgtttggtgttgcctccaaacagtacctaggatagctgatgcttttactttgagtctttttctttagttggaacattaattgcaagcttttggttggtaatcattttttatgggatgtatttactatatggtcctcatggagacacattgttatctggagaaccacagtttggaaaatacatttctctttattataaagttttttgttttatatatataatgccacagtgtgataggatacaaagactatgcattagggctttggagtcttaattgttctttgtgtttttctttttttccaatttgattatggatccaagcctaatgcactctgtgatcttaagcaagtttcttgacagttccagttttcttatctacaaacagagacaagaagatctacctcagagtcattgtaaggattaaataaatttgtaaagctctcaaagagcagcctaatcccagcattttgggtggctgaggcgggtggagcacctgaggtcaggagtttgagaccagcctggccaacatggtgaaaccccgtctctgctaaaaatacaaaaattggccaggcatggtggggggtgcctataatccgagctactggggaggctgaggcaggagaattgcttgaacctggaaggtggagtttgcagtaagccaagatcacgccacttcactccagcctgggcaaaaagagtgaaactccatctcaaaaaaaaaaaacaaacaaaaaatcagagcaaaaaggtaaaaagtttgtgcagagtaaaacatgggtagaaatggattgcagggaagcttatagtgagaataaaccataaataaaattgacattgtgaacaccagccttagattttttttccctgaaaattaaaaagtgcttttttttatttttttattttttgagttggagggttttttggtggtggtggtggtgtttgttgttttgtttttggttttttgttttttttcagagtctccctctgtcgcgaggctggagtgcagtggcgctatcttagctcactgcaacctccgccttccaggttgaagcgattctcctgcctcagcttcccgagtagctgggactacaggtgcctgccaccatgcccggctaattttttgtattttagtagagaaggggtttcaccatgttggccgggatggtctcgatcccctgaccttgtgatcttcccacctcggccttcaaaagtgctgggattacaggcgtgagccactgtactggttgaggtggagtcttgctctgttgcccaggctggaatgcagtggcatgatctcatctcactgcaacctctgccttccaggttcaagtgatccgtgtttcagcctccccaatagctgcgattgcaggctcctgccaccactcccagctgatttttgtattttgttttgttttctttttgagatggagtctggctctgtcaccaggctggagtgcagtggtgcaatcttggctcactgcaacctccaactccctggttcaagcaattcccctgcctcagcctcccgagtagctgggattacaggcacacgccaccacgcccagctaatttttgtatttttggtagacacagggttttatcatgttggccaggatggtctcaatctcctgaccttgtgatccatctgctcagcctcccaaagtgctgggattacaggcatgagccactgcacctagcctgtttttttttgtttttttttaagtagagacagggtttcactatgttggccaggctggcctcccaactcctgacctcaagatccgcccactttagactcccaaagcgctgggattacaggcatgagccactgcatccagcagaaaatttaaaaattaatataggttattgtttatatataattgcatgcatttaaaagttcgatgtttaacataactttaaaaactgattcttaaaaaataaattatcctattaaaatatttgtgaattagtcttgatttcatttttgacaccactgattcatagtaattttgtacatattataaaaggaatgttatgtcatttacctctaaaagatgcggtaaattttactttctaaagtacttttgagcaatattttatttatttatttatttatttatttatttatttttgagacagagtctcactctgtcgccaggctgtagtgccgtggcacaatcttggctccctgcgacctgtgcttcccaggttcaagcgattctcctgcctcaacctccccagtagctaggactataggtgcgcaccaccacacctagctaayttttttgtatttttagtagagatggggtttcaccacgttggccaggatggtctcaatctcttaacttcgtgatctgcccaccttggcctcccaaagtgctgggattacaggtgtgagccaccagcatcccgccgagcaatactttttaatgtagttaataagatctggcgctgataatgaatagatttaaagatcttttacatcttaggacattaaccaaggtatctggaatttaaagaaacaacttcaagctgctttctctttaattaccctatttggggatttattctaaggttattggttgtaacaataatattttaatacacagaagtctgtgaaggatactcaacaacatggttggatgttaagaccattttttttggatattacacataagaaattgcctccaaaattttgaactgatagaattgctgttgaataagatcctaacagcagtggcccaagtatggtccttgaaggagacatgacaacaacctgaatcgtctctacccctctgccatacattcactgtctaaaaacaataaaaagccctttcttcccagaataaaaacgctgagctcgccgggcgcggtggctcacgcctgtaatcccagcactttgggaggccgaggcgggcggatcacgaagtcaggagatcgagaccatcccggctaacacggtgaaaccctgtctctactgaaaatacaaaaaaattagccgggcgtagtggcgggcgcctgtagtcccagctacttgggaggctgaggcaggagaatggcgtgaacccgggaggcggagcttgcagtgagccgagatcccgccactgcactccagcctgggcgacagagcgagactccgtctcaaaaaaaaaaaaaaaaaaaaaaaaaagcgctgagctgctaattttacagatgctttccaatctttacttttgatataagataaaatccactttttaaatgtgataacaaaacattctagaaagcaatttgccggcaaaatttaatgctttagtgtgttttctgaaatccaatcattaactgtttaggctccatatttaatattttcttttttctttctgctctctttaattgtaatacgcttgcttaagaaataagcctgtcaattctagggtttgggaggtagggcatggggagaagagcttttattttcaagcttcttgtggctccaaaagataccctaatagtaagtattttcattgatgaaaaatgtaatttgctagagatctttgttttagtgatagttataaaacgtgagaatttaaatattccaaatacctgattttagacaaggaaacaggcacagagagattgtcacctgtcccaagatacatgtagttacctgtaaagtcagtcctcatctttagttctcttaaatgaatcaattgatagttttaccacaccaggctgataatggttattttaaaataaaacctgcataacaaaaagtaataattatctttatgtgtaggaaaataaaatatacattaaataccttctcattacagagaaaatgctgctgtgaagacccaattaaagctttcacataaatgaagctacagctatcatgatttagtgcccccaaaaggaagaacttcagtggacaagaaaggacatttctgggggtagtagaatgcttgaggcctggaatttaaacctgagccactatctgaaggtaattttttttaactaattgaaagtaacaactttattttaaaaagttaactattatctattacatgtttaaaaagtcaaattaccctttgtatataggtgctttgttctatttatgtttatcagttggaaaaaacattttatacttagctatttaatattaatatctgcattcttataaactttactttgacagggccaggcgcggtggctcatgcctgtaatcccagcactttgggaggctgaggtgggcggatcacaaggtcgggagattgagaccatcctggctaacacggtgaaaccccgtctctactaaaatacaaaaaaaattagccgggcatggtggcgggcgcctatagtcccagctactctggaggctgaggcaggagaatggtgtgaacctgggaggcggagcttgcagtgagccgagagcttgcagtgagygccactgcactccagtactgggtgatagagcaagactccgtctcaaaacaaaacaaaacaaaaaaaacaaaaaaaaactttactttgacggagttaattggcagttagggataaaaacttatagcatatactgacattcaggatagttgggaaaatcagctattttaagtcactttgcagttgtcaggattaaagaaggtaaagcaaattgatggaagaaaggaggaaggaagaggtaatacttttcactgcatccaaattatttttttaaagtgtgtctgtaacttaaaaatgtacttttaatcttcatttcaacaatgggttaggtcagtcatcatattaaaaccaacttttccgtatagaaactactttaatattttctcaatgtaaccacaaaaagtctttaacccatagattttcatttccagaaggcagtagaaaatatagttatttttattccattggcaaaatctcaatatgggcaaaattctgcagtaggtggtttgtgtttggcagtcttcctctgtcaacatactccccaccccttaactagtgtacttacctaagccagtcatacttccctcagtcttcactgcagcatcctgtgcaggcctgctgaatccctctaagttctttgaggctcacctgtacttgctttctcacctccaagtaaaacttttcactccctcagggtagctctttttaactcgttttaaaggaagaaatccatccttacagaaatttataccaatttgttaatggctgatgttccctccaaagttttttctttttaagaaaaagggcttattaacatcaatgaaaattttactgatgaaatttcagagtgagtgagcaaaagtaaataaagtaaaaaaaataaaattaggctagtaaaggtaacttgcagtaggatcagagtacctgtcaggaaactgggaatatttggaattcttacccctaagctattggcactttttacaacttcttcctaaactccacttctcaatctgttctacctaatgttttttcagtgactacaatgcctgcatagttagagctctagcttttgggtggtgtcggagatagagttttttgtatgttacggtactgcttctaattaaatttcaactggcaaaagttgaaaacaaaaaggaacaaataattccttttaacatctttaatttgttaacctatccagaaaaagatttaaagctatggatttttgactaataaaggcagaagagagctttgtttattggtttgaaaaagttcctattgtaataatagagtacgggctttgaaataaacacatgtaggtttgagttcttgctcagccactcagcatatttgtaatcttgggaaagttacttatctgcctatcctatatgtaaattggaacaggtaactgaatcacagcattgtcaaaagggttaaatgatataggtaaaacacttttagcatagtaccttactatggtaaatgctcaataaatgataaccttataattttgagcaatgaacctcatcatctttttctataaaatgatgataataataggtcctatatcacagaatagtagagtgattgttgataattctagctaataattatttaggatagttgagattcaatacattctattttataactatgacaattaaattcataatctttttttttttttttgagacggggtctcgctctgtcgcccaggctggagtgcagtagtgcactctcagctcactgcaagctccgcctcccgggttcacgccattctcctgcctcagactcctgtagctgggactacaggcgcccaccatcatgcccggctaatgtttttttgtatttttagtagagatggggtttcaccatgttagccatgatggtcttgatctcctgaccttgtgatccgcccgcctcggcctcccaaagtgctgggattacaggcgtaagccaccgtgcctgtcctaaattcataatcttaattgatctatcataatagtgcttatattttaaaagtcaaagagctctcagaaatattaagaaatttttttgatcttgatgtcatcatgtttagacagtgaatattcagattactttaaaaattaagccaggtgcagtgagccaagatcgcgccattgcactccaacctgggcaacaagagtgaaactccgtctcaaaaaaaaaatgggaaagaaagaaaaagaaaattaaactgtatttaaatcgtattcttgacaatttactttagaatagtaaattgtattcctaataggaaaaaagcaagaaaaaggtaaatttttaaaacgttatattcctaatagatatttcatttttaataagcccctcaataggaccttatttgcagttgaatctaactttgtaaaaagtttcctgttttaatagagtccttttgtatttctgtgtagtgcatattggaagtcagtcaataaataatagttaaatgaattttaaaaatcaggataatcaactcttagaaacataaaatcttagtattattattatattttttgagacggagtctcactctgtcgcccaggctggagtgcagtggtgcaatctcggctcactgcaacctccgcctcccaggttcaagcaattctcccgcctcagcctcccaggtagctgggactacaagtgcgtgccaccgtgcccggctcattttttgtatttttggtagagacggggtttcaccatgttagccaggatggtcttgacctcctgactttgtgatccgcctgccttggcctcccaaagtgctggctgggattacaggtgtgagccactgcacctggcccaaagttctttaattccagaaaattttagatctatgtaaacacctcagtaaattgaagaaatttctattaccttgccatcagacagctttgtattaaattaaatctctatattcaggtcagtttcttttgcattttccataattgcgttagttaattagcaaacatgagttcacttaaaatgttcagttcctctgtgatatcatgaaataaacctgattttaaaaattcagatatagttataaaacrcacagaatataaattttatacatagagactttaagtgtcttgatcatccttgtatctccagcacatagaacagtcacttggatgtgtagtaataattcattttgtgaatgaatatctgcttataaatatatatgattagaaaaaatctggaagaatatgcaaaaatgtcaatagtgatttctgtaaaattataagtgactttaactttctgatgttgctatattaacataatatttgttttaatgacataaacaataaaacttaaaattttattgaaaaatttttttttcctgagatggggtctcactctgtcacccaggctggagtgcagtggcatgattatgactcactgtagcctcaaactcctgagctcaaccagtcctcccacctcagcttcccaagaagctatggggactataggcactcaccaccatgcctggctgatttttttttttttcaatagagacagaatctcattatatttcccaggctgatcttaaactctggcttcaagccattcttccaccttgacttcccaaagtgctaagattacagggattagccaccacactgagcccttaaaaagaaatttttaatcttttgagacagggtcttgccctgtcatgatcatggttcactgcagcctcaatgtcctgggctcaggcaatccccccacctcagctttctaagtagctgggaccacgacacatgccaccacacccagctaatttttaaaaatttttttgtagagatgggggtctcactatgtcagccaggttggtcttgaactcctggattcaagtgacctgcctgccccagcctcccaaagtgatgggattacaggcatgagctaccagcctggcctggaacaagaaaaggatacccactctcaccactcatctttaatatagtactggaagtcctactagccagagcagtcagacaagagaaagaaataaagagcatttaggccagttgctatgcctcacgcctataatcccagcactttgggaagccaaggtgggtggatcaccttaggtccagagtttcagacaagcctggtcaacatgtggaaacctcttctcttctaaaaatacaaaaaaattagctgggtgtggtggcaggctcctataatcctagctacttgggaggctgaggcatgagaatcacttgaacccggtaggtgaaggttgcagtgagctgagattaagatctcaccactgcactccagcctgggtgacagagtgagactctgtctcaaaaaagaaaaaagaaataaaagagcatcccagttggtaaagaggaagtcaaactgtcactgtttgcagatgatatgattgtttacctagaaaactctaaagactcctccagaaagctcctagaactgatcaaagaattcagcaaagaaggccaggcgaggtggctcacgcctgtaatcccagcactttgggaggctgaggtgggcggatcacctgaggtcaggagtttgagaccagcctgaccaacatggtgaaaccccatctctactaaaaatacaaaattagccaggtgtggtggtgcatgcctgtaatcccagctacttgggaggctgaggcaggagaatcgcttgaacctgggaggcagaggttgccatgagccgagatcacggccattgcactccagcctgggcaaaagagtgaaactccatctcaaaaaacaaaaaataaagaattcagcaaagtttccgggtacaaaattaatgtacacaattaattttgtgcggtagctctcctgtacaccaacagcagccaagctgagagtgaaatcaagaactcaacccctgttacgatagctgcaaaaaaagtaaaatacttaggaatatacctaaccaaggaggtgaaacacctctgcaaggaaaactacaaaacactgctgaaacatagacaacatatacaaatggaaacatatcccatgttcatggatgggtagaatcagtactgtgaaaatgaccatactgccaaaagcaatctagaaattcaatgcaattcccatcaaaataccaccatcattcttcacagaattagaaaaaacaatcctaaaattcatgtggaactaaaaaagagcccgcatagccaaagcaagacaaagcaaaaagaacaaatccggaggcattacattacctgatttcgaactatactataaggctgtactcaccaaaacagcatggtactggtatcaaaataggtacatagaccaatgaaacagaatagagaacccagaaataaacccacatacgtaacagccaactgattttcgacaaagcaaacaaaaccttcaagtggtgaaatgacaccctattcaacagatggtgctgggataattggctagccacatgtaggagaatgaaactggatcctcatctctcaccttatacaaaaatcaactcaagatggattaaggacttaaatctaatgtgatgttaatttttgtttccctaatgactaatgctgatcagcatcttttgtgtgcttacttgctagctatatatcttctttagtgaagttgtatcgtcaaacatcttgccaatttttttagttgagttgtcttactgagttgtaaaagttctttagagtttgaatataaggtctttgtcagctacatgttttgcaaatattttttcccatctgtaatgagaatacattttaaattttgacaaagtctaattcatagatttttttcttttatattttgtactgtttgtttcaggtttaatatatctttgccaagtccaagggtacaaagattttctcctgtgttttcttctagaagttttatcatttgatagtctgtgatccatttcaagttgatttgctatctggtgtgaggtaagggtcaaggtttattgttttacatacggctatttagttgttttagcaccattagttaaaaaatgtcctttttctcttgatgtattgatatatttgtcaaaaagcaattgactaccacctagaaatagcttctcagctccatctcgaatctgtccagttcagcctgcttgcctctactccatcctccaccatatctatcagggtgacccagaagtcctacatggtatccacctctggtcccttggtggccaagggcctccttggcagctgcttatacaagaatgggccagatgtctgcattaactcctagaacttctcctggatgggcaacagcagcagcttccggggtagcctggacactggcatgggtctggagggaggctatgccaggtctggtggtatggaggagcatcacagctgccacagtgacccagagcctcccgagtccccttaagctggatgtgcacaccaacacccaggctgtatgcaccccggagaaattgcagatcaagaccctaaacaagtttgcccccttcactgagaaggtacccttcctggagcagcagaacaagatactggagaccaagtggatccttttgcagcagcaaaaagtagcttggagcaacatggacagcatgtttgagagctacatcaacaacctaaagcagcaactggacacactgagccaggagcagctgaagctggaggcagaacttggcaacatggagagaccagtggaggactatcaaaagtgtgaagtttaaataaccaagcctacagagatggagaatgaatttgtcctcatcaagaaggatatgaatgtagcttacatgaacaaggtagagctggaatctcacctggaagagctgactgacaagatcaacttcctcattcagctgtatgaagaggagatctgtgagctgtagtcccagttcttggtcacatccctggtcctgtccatggacaacagccactccctcgatttaaatggcatccttgccgaggtccgtgcccagtatgaggagatcaccagctgcagctgagctgaaactgaaagcatgtacaaggagtattaggaatatgatcaagtgtgaggagctgcagacgctgcctgggaagccaagaatgacctgcgtcacatgaagacagatctctaagatgaaccagaacatcagcttgcttcaggctgagaatgagggcctcaaaggccagagggcttccttggaggctgccatcccagatgctgagtagcagggggagctggccattaaggatgccagtgccaagctggaagccatcctccagagagccaagcaagacatggcctgtcagctgcttgagtaacaggagctggtgaatgttaaactggccatggacatcaagatctccacttacaagaagctgctgaaaggcaaggagagccaggtggagtctgggatgcagaacatgagtatccatacagaaaccaccagtggctactcaaggggctgagctcggcctgcgaaggcctcacaagcctttggccacaagtatgacctagggccccttccaatccagcttagactctggcaggggctccacctccttcagctgcaccagctccttcagggccgtggttgtgaagaggatcgagatccacaatgggaagctagtatctgagtcctttgatgtcctgcaatgaatgccactgcaactcctcccagcctacctacctcctctggccgaccagagcctgtgggggaggcaactgtgcagggaagcatagggaacaggagaccacctgaggcccaattgtggacctcagcccacccttaagggaacctagggtggttcctagacgaccgcctctttttcatgctcgcaactgaaaaccagtttatacctttgggagccttctggttaaaacaaaattttaaaaacagacaaaacctagttcaattgttttttcaaaataaagcctcagctaagccaaagaaaaaagcaattggccagataatgtgtgggtcaatttctggattgtctattctgtccattgatctatttgtctatttttacaccgataccataataccttgattgttatatctttgtattaagtctaaaaatcagtagtagtgtaagaactccaaccttgtcttcttttccaaagttgttttggctgttcaacctttgcacttccgtatgaattttaggatcagattctcaattttaaaaaacctactgggatttaggttgggatgatatacaatacatagatcaagttggaagatataatatcttattgagtcttccattttatagacacagtatatgtcatcactcattcagatattctttaatttctcctacctaggttttgtagtttacgatacatatatcttgcatatctcttgtcaagtttattcctaaatttttatttttttgagacagggtcttgctctgtcgcccaggttggagggcagtggtgcaatcatagctcactgcagctcaggctcagatgatcctcctaccttagcctcttgagtagctgggactacaggcatgcaccaccatgcccagctaatttttatatttttttgtagagataaggtttcatcatgttgcccgtggctggtctcgaactcctgagttcaagcagtgtgcccatctcggcttcccaaagtgctgggattacaggcatgagccacagtgcctggcttatttgtgcttttttttctttctttctctggaggcctgtccttccctttctctacagaaaaccagtttgtggcgttgttgacatctgcattatgtctttttattctgtttcattgaattacatcctttaatatggccttcatttttatgtgctcacatttcttagtttctggcttttcaaaatggacacatagttcattaattcagtcttttttttttccataaaagcaagcttttaaaaatatttttaattgacaaaaattgtgtatattgatgatatacaacatgatgtatgtatatatcctggatgggttagagcaggctaattaacatatgtattactcatatactttttttgtggtgagaatatttaaaatctattcttgcagcagttttcaagtatataatgtggggtttttggctttttttctttcattatttttaattgacacataattgtataagttaatggggtatagtgtgatattttgatacatgtataaaacgtgtaatgatcaaatcaggatagttagcatattcatcatctcaaacatttttcatttctttgtattgggaccattcaaaatctgctcttctagctatttgaaaatatacgatatattgttaattatagtcaccctatagtgctatagaacactagaacttattcctcctatctagctgtcttttttttttttttttgagacagggtctcactcttgtcccctaggctggagtgccagcggcgtgatcacaactccctgcagccttgatctcccaggttcaagcaatcctcacctaagcctcctgagtagctaggactacgggtgtacaccaccatgcccagttaattttttaattactatatttggtagagatggggtctcactatgttgtccaggttgcctggggtcaagcttgacctcccaaaatgctaggattacaggcatgagcaaccgcactctgtcctagctgtacytttgtaaccatcaaccatttggctgttcccttccctaccctacccttccccacctctagtaaccattattctactccctacttctatgaaatcaaccttttaactttacacatgagtgagaacatgcagtatttgtctttctgtgcctggcttatttctcaaacataatgtcctctaagcccatctacgttgctgtgaatgacagaatttcattttttttaatggctaaatagtattctattgtgtatatataccacattttctttaccagtttatctgtttacggacacttaggttgattccatatcttgaccattgtggaataatgatgtaataaacatgggagtgcagctttctccttgacttactgatttcctttcctttggatatttacccattagtggaattgctggatcatatggtagtctatttttagttttttgagtaatctctatactgtttttcataatggctgtactaatttacaccaacagtgtatgagttcccttttctccaaatccttgccagcatttgttattttttgtctttttgataatagmcattctaaccgaggtgagatgatagctcattgtgattttgatttgtatttacccgattcttagagattttttttaaagatatatacccgttgaccattcgtatgtcttcttcgtcagacagggtctcattctatcgtccaggctggagtgcagtggctcaatctcggctcactgcagcctcagtctcccgggcttaggtgcgagcagctaggaccacaggtccgtgccaccatccccggctaattttttgtgtttttgtagagacagggtttcaccatgttgtctaggctggtctcaaactcctgacctcaggcagtcctccagcctcagcctcccaaaatgtggggattacaggtgtgagccatcacgcctggcctgtatatcttcttttgagagatgtctgttcagctcatttgtccatttctaaatgaaattatttatttattaatccctcgtggaatagtttgcaaatattttcttccactctgcaggttgtctcttcactctgttgcttgtttagtttgctgtacaaaagctttttagtttgatacaaatccatttgtctatttttgcttttgaggtcttagccataaaaatctttgcctagaccaatgtcctgaagcattacccctgtgttttcttctggtagttttatagttccaggtctcacatttaagtctttaatccatttttagttggtttttatatatggtgagagctaggggtctactttcattttactgcatacagatatccagttttcccaggaccttttatcaaagggactgtcccttccccagtgaatattcttggtacctttgttgaaaatcaattggctgtaagtgcgtagattttgtttgtttgtttgttttctattctcttccattggtgtgtctgtttttatgccagtactgtgatgttttggttatatagctttgtaatatattttgaagccagatagtatgatgcttctagctttgttctttttgcttaggattgctttggctagtcaaggtcttttgtggttccatacaaattttaaggtttttgttgtttctatttgtgtgaagactatcattgggatttcggggcttttgttgttgttgttgttttgtttttttaagagatagggtcttgctacagtacccagactggccttggaatcctgggctcaagcaatcctcctgcctcagccttctgagtagctgggactatggatgtgtgccattgtacccagctcattggtatttttataaggattgcagtgaatctgttgatcgcctttggtagtatggtcattttcacaatattaattattccactccataaatgcgatgtctttccattttttgtgtgtgttctccaatttatttcattcaatgtgtgtggggggttttgttttgttttgttttgagacagggcctcaatctgtcgcccaggctggagtgcagtggctcgatctcggctcactccaacctctgcctcctgggctcaagcgattctcatgccttagcctcctgaatagccggaattatagttgtgcatcaccatgtctgcctaatttttgtatttttagtagacacagggtttcaccatgttggccaggcctgtctcaactcctgaccccaagtcatccacctgccttggctttccaaagtgctgggattacaggcctgagccaccacacctggcctcgttcagtgttttacagtatttaatggtatcccataattcttatagactttctttgttcattttcatcattatttccttcttttctctctctgggtaatttcaaatgacctatgtccaagttcagaaattctctctgcttgatcaagtctgctaattgaagctctctattgtatttatttcattcattgaattcttcagcagcaggatttttgttttgttctttttattatttgtatctctttgttgaatttcttgttcatattgtgagttgttttccgacttcattgaattatctatttgtattttcttgtttcttgttaagtttaagaccattgttttgaaaaatttttggcaactcgtagcctttttatcattagaatctgttactagagttacaactcccttgatcaacatggttttaaactgcacaggtcctgtactcaggttttctttagcctctaccatccctgagacagtgggaccaacccctcctcttcttcctctcccttagcctattcaacttatatttagatgatgaggatgaatacctttatgatgatccacttccccttaatgattagtaaatacattttctcttccttatgactttttttcttttcttttttttttttttttttttttggcaacggagtttcactcttgttgcccaggctggagtgcaatggtgcagtctcggctcaccacaacctccaccccctgattcaagcgattctcctgcctcagcttccttagtagctgggtttacaggcatgtgccaccaagcccggctaatttcatatttttagtagagatgggtttctccatgttggccaggctggtctcgaactctcgaccttaggttatccgcctgccttggcctcccaaagtgctgggattacaggtgtgagccactgctcccggccatgactttcttcataaacttttatttagctaacttaattataagaatacagtatataatacatataacataaaactatatgttaattgactgtttatgttattggtaaggcttccagccaatagtaagctattagtagttaagcctttgggcagtcaaaagttatacacacatttttgaccgtgtgagcagttggtgccccaattcctgcattgtttgagggtcagctgtattatgttcctttggtagcgtcatacttccttgtgtttctgtgtcaatgtctgtttatttggtggaacaattgccttttctaaactttctagagtagctttgtagagaaagacactcacctgcagttgggttttatcatgccagtcaggaagggtgtagtgtctgtttgtggataggtgcagtggtatagtttccatgcagcttcttcagctgcattcaacgtcagcaataactgggtgctcattctaattttaattaataacgtcaccaataactgggtgctcattytaattttctccccaaagggaagacttaaccaagatgtcaggtctgaatagactacaagtagctacaggagcgctgggttccaggtactggcacagggtctgtattagtctgttcttgcagtgacataaacaaatacttgagactgggtgatttataaagaaaagaggtttaattggttcatggttctgcaggctgtacaggaagcattgtggcttctactggggaggcgtcaggaagcttccagtcatggtggaaggcaaagggggaaccagcatttcacatggcaggagcaggaggaagacaaagagtggggaagtgccacacacttaaacaacgagatctcactatctcaaggagagctctgggcagatgacgttaaaccatgagaaacccccaccatgatccaatcacctcccaccaggccccacctccaacattgggggttataattgaacatgagatttgggtggggacayggacccagaccatatcagagtctcacaaacctgttatggcacctgagttttggggtacaggttagcactctgtggcagagttggatgtagattgaccacagagctagggtctgtgactctcagataccctctagcagctcaggcccagggagctaggttgtagctgtgattctacctctgagaggcagggcacagaactggcccaagcctaggggaacggagggggtaccctggaggtttgggagcagggtacagctacagtttgggaacatgagccaatagggctcggtggtaagtcaagtcccagggggatgaagcactgtgtaatagtaactgtagtccctgggaacttggcagtatctcagactctgtgaggccagttgcagcagcagcagcagcagcagcagcaagtgccccagaatggtggagtacaactgttgtttaggccctgggggtgtagggaacagcatagcaatgactgcactccctacggagaagggtgtcttagcagctcagactctagggggctagtccagctctggggaagatgactactagataagtttggtctgtagggcagagtgtctcagctcaaccactgctgtgtttccctaggacacaggatactgtcagctcagccctgggatgggcagctgctcaacttggccacagcaccagttctccaggggcccatgtgctgcttcagcttaagcctggggggcatgactgttctgggaggcccaggcatcatttcctggaatgtgggtagttgcttcaccttatgcactggagaggcatgactgctctgagcagctaaggtactgtttccctaggaggcaggatactgcttcagctctggcctgagggggtgataggaggggtaggtggggtggctccacctctgcttcccccgacccctgtacaggggtataagagctgtttgcagctcaacttggggatgttgggccactgggctagtgtgattcagtcttggcttagcctcagggataaaggggaactgtggctactcagccccagagcaagacacactccagccgtagttcggattccaagatgacatagcacagtagctacatgaactacagtgcctgggacacagtgtcggtttcttctctcggggtagcacagcagtgtggactccagagagcttcctcagctgggcttggtgcctgtgaagactgcagggaacctcagtggtgaggtctattggtagggttggttactggaatcctcttgcttccctccttgctgcagggagttcttcctggttcctagctcttcccagttgggggattgggtggtggaggccggatgcttccttccattctctatgtggccatcccgagtttctgtgctcgtcaatgctctccctcatttatttttgttaaaatgtagttgtttattcattgttttgattgtctttgtgggggaaatgaatgctagggacttctagtgggccatcttgctgatgtgacgtgactacagtatattgctattaactgtagtcactatgaacttattcctcgtaattgaaattttgtatcctttgaccacagtctgcttttcttttctttcctttcttttcttttcttttctttttttaaatttacacaccactatacaaacagggaacacagctttctttcctaatatgagggtttaaagaaggagtgtccaatcttttggcttccctggaccacattggaaaaagatggattgtcttgggccacacataaaatacactaatgttagctgatgagttaaaaaaaatatcaaaaaaaaaatctcataatgttttaagaaagtttatgaatttgcgttgggctgcattttaagtcatcctgagtcacaccatgggccacaggttggacaagcttagtttaaaggctataaatttcccttgaaattttatattagctgtattcacaagttttgatacatgacatgttctttatggttcagatctagtatttgcagttccatgtgaatttgagaggaacacacgttctttaattgtttggaatgaattttaaatatatccagtaattcaagcttattctgtttccttaacttggctgagataattatcatgaggtcttgcactatgtaatacatttgtcaatttggctctaagttctatccacttttttaaaagttggtttttcttgttgctgtttgattgttttttgagacaaggtcttgctttgtcacctaggctggagtgcagtgctatgatcacagctgactgcagtcttaacctcccaggatcaagtgatcctcccacctcagccatctgattacctgggactgcaggtgagggccaccacacctggctaattttttgtgtgtgtagagacagggtttcaacatgttgtccgggctcgtctggaattcctgggatcaagcagtctgcctgccttggcctcccaaagtgctagaattacaggcatgagccactgcacctggcctaaaagtttttaaagggaaatttcaaaaatatacaggagtaggctgggcagtgactcacatctgtaatcccagcactttgggaggccaaggtgggtagatcatttgaagtcaggagttcgataccagcctggccaacatggtgaaaccccatctctaccaaacagtacaaaaattagctgggcatggtggtgtgcgccagtagtgccagttacttgggaagctgaggtgggagaatcgcttgaactggagaggtagaggttgcagtgagtggagattgcgccactgcaccccagcctgagggccagagtgagaccttgtctcaaaaaaaaaatacatattatatataatatataattatatataattatttataattatataatataattataatatatactcctgtatatatttaaatataaatataaattttataaatatataatatataatatattcatttactatactaatatatatattatatatttgtatattatatatttatatattagaatagtagaatattctacttatatatattatatttatatttatatttgtatatttatatatatatatatatattagtagaatagtaaatgaagccagtgtacaattatcagtgtatgaccaatcttgttttatttatttctctatcaattgtacccttttctctgactttggtatttatttactttcttgagacaaggtctcattttgtcacacaggctggagtgcagtggcacaatcacagctcctgggctcaagtgatctcctgcctcagcttgccgagaagctgggactgcaggcacacaccaccatgcccagctaatttttttgatctttagtagaaatagggtcttgttatgttgcccaggctagtgtcaaactcctgggttccggtgatccacccacctctgcctcacagagtgctgggattacccgcatgagtcaccatgctcagcctgactttgatattttttaaacaaatcctggacattctaataattttatctataagtattaatattatcataccattcacatacctaaaaacaccaaaaatactttctttagggacagagtctcactctgttgcacacgctgaattgcagtggtacagtcacagcttactgcagcctcaaactcctgggctcgtgccatcctcccacctcagcctcccaaataattacgactacagacatgtgccaccatacccagctaatttgtttttattaagtttcttgtagaaatgggatctcaggctggtcttgaactcccatgctggtctcaaattcctgttctcaagtaatcctcccacctcagcctcccaagtgttaggattgtaagtgtgagccactgtatccagccccaaaattccttttttttcatggaatgcctgaacatcccaagaaaaattccttaatatcaaatatctagtccacgttcatattttcctgcttgtgtatacacatgcatatatatgtacacacacattgtggtggtactattttactttttttaattgaggtgaaattcatataacttaaaattaatccctttaaaatgaagaatttactgacagttcattcacaaagttgcaaaagtgccatgtagagcttcaaaacatcttcatcacctcaaaataaaatttggtacccattagtccattataccttccctcaagcctctggcatccaccagtctactttctttctctatggatttacctattttggatattttatgtaaatagaatcatataatatgtgaccttttgtgtgtggcttggcttctgtcacttagcataatgggattttgtttgtttgtttgtttttagacagggtcttgatctatctttgggctctacctttgcccattttgtaattgggttattttggattgtagtctttgttgttgaattgtatgagttctttacatattccagacccttatcagatacatgatttgcagatattctttcccatctatgggttgtcttttaactcttgtcatggtgacctttgtacaaaaatttttattttgatggtgtccaatttatctgttttctcttttacttgtcctattggtgccatatctaagaaaccatcaccaaatgcaaagacatgaagatttacccctatgtttttcttctaagagttgcatggttttagttcttatattcagctctttgatccattttttatttttggtatgtaatatgaggtaggagttcaacatcattcgttttcatgtggatattcagttgtcctggcaccatttgttgaagatagtattctttcctcatcaaatgcttttggcacccttgtcaaaaataatttaaccataggtatgttatttctggactctcgattctgttgtatttattgctctaaatttccctctgagcactgcttttttgcagcccatagattttgatatattgtgcatattatcattgctatattttataaattgatatattatctatcatcacaccctgtagagttacatgcattttttttagttctatagtattttatttctgtccttaaaacacacatacaaaattacaatattgagattattattttatacagagtgtttatttagatttttatagagttgtaatttgtttgcttgccattttttcaagcatctcaggacttttttctgctataatatttgtttttttgaaatatttttttttgctaaaataatgtgctttattcagttacctaacaggtaagaaatacagaggtaattcctgtaccaaatattttatatttggtgtatattttttctcttcccttctataatgtgcttgtatggcatgacttaactgttccttttttttgttatttgtttatttattatttttttgagacagagtcttgctcttgttgcccaggctagagtgcagtggtgtgatcttggctcattacaacctgcgtctcttgggttcaaatgattctcttgccccagcctcccaagtaactggaattataggcgtgcgccaccacgcctggctagtttttatatttttagtagagatggggtttcaccatgttggctaggctggtctcaaactcctgacctcaggtgatccacctgcctcagcctcccaaagtgcagggattataggtgtgagccgttgcacccagccaactgtaaaaaaaaaaaaaaaatgttttaattgtagtagttgtagatatttatggggtacatgaaatgttttgatactgacatgcaatgtataataatcatagcatgtaaaatggggtatccatcccctcaagcatttatccatcccttcaagcatttatcctttgtgttataaacaatccaattatactcttttaattatttttaaatataattaaattattgacggtagttaccctgttgtgctatcaaatatgaagtatgttgtttagaaatttctttcatatacgagacattgattgtaaactctcagttttttgtttttattttttattatgattctttttgagacggagtcttgccctgttgcccaggctagagtgccaaggcacgatcttggcttactgcaacctccacttcccagattcaagcagttttcgtgccttagtcacttgaggagctctggttacaggtatgcaccacaacacccagctaattttttttatttttttattttttttatttttagcagagacagggtttcgccatgttggtcaggatggtcttgaactcctggcatcaagtgatccgcctgcctcggcctccaaaagtgttgggattacagggtgagccaccgtgcccagccaactttcagtttttttttaatcttaaagtatcttcctttcactctcttttctgaaaaaaaatggggggttttgtgggggggttttttttgttttttttttgtttttggttattctgaaggtaagacagtggaaaaaaatagtttggatcatatacaattgtttattgatagttacttttcttttttttcttttttgagatggggtttcgccatgttggcaggctgatctcaaacttgtgggctcaagcgatccactctccttggcctcccaaaatgctaggattacaggcatgagccaccacacccagccaatctactttcttaaaaccttaaatactattcctatgacttctgctaccatgttgctattaagaaggccactgtacgtctaatttcaatactctgtagggagtctgtcttatctctctttctttaatttgtattttttgttacctaggctcaggggtgtttttatggtctgtcttatctgtccagctgcattttgctgttcctctttagaatgttgcacgttcactacattgagtatgggtttctttttatttctcttggaatacttaaaagtaaggcttcgtttatctgtggattcatgtctttagttttgaaaaattgccagccattatctcttcaaatacagatgatccctgacttatattaattcaacttatgattttccactttatgatggtgtgaaaatgatatatatttagtataccccttaacctatgatggcgatggcattacatctggataaacccattgtaaactgaaaatactgtaagtcaaaaatgcactttcaacttataatagtttccacttaaggtattttcaatgcacagtgtgtttatcgggatagtaactccatcataagtttaagagcatctatattgtctctcctccattttcccttttctattcttttgagacttatatgcatactatactttctatttttcttatttttaagtctttgtcatacattttatgttctgtttttgctgtgatacagtctagataatttaaaaatctatcttccaatttaataattatttcttctgcatctaatcatctatttaacttacccattgcctttttttctttttttttttttttttttttgagacagggtctcactatgtcacccaggctggagtgcagtggcatgattatggctcactgcggcctcagactcctgaactcaagagatcctcccacctcagcctcctgagtagctgggactgcagacccacaccaccagacatggctgattgttaaatttttttgtagagacaggatctcattatgttgcccaggctggtctcagattcctggtgtcaagcaatcctcttgccttggtctcccaaagtgctgggattacagacatgaacctctgtttctggcccattgacctagtttcagcagtttttcattgtttctttgtttgtttgtttgtttgtttgttttgagacaaagtcttgctctgtcacccaggctggagtgcagtggcgccatctcagctcactgcaacctccacctcctgggtttaagcaattcttctgcctcagcctcccaagtagtgaggattacaggcatgcatcactgtgcccagctaatttttgtatttttagtagagacagggtttcaccatgttggccagtctggtctcaaactcctgaccacaagcgatccacctacctgggcctcccagaatgctgagattaccrgcatgagccactgtgcccagcctgtttttttaaaaaattaaacttttgatagtttttattatttgcttatctctgtggttcatttttttagacattgaataattatattcaatcttagatgtttccaatatggggagtctttaggggctgtctgaatctggtgactcaatctcatggtggctaatttcctgtttttttggcattctttgattgttagcttatatttgattgatcttaatatgaaaggatactggagtcttaattgggtttgtttttctccaaatagtagctgcatttttttcttaccagaagccaggttacactcttcacccagaacctttcagattgttatccttatcttgggaattttaagttttcctcccctaccagctatttgtcccaacttcagtttcttagccacaaaactaatgtattagaactacccttggggaaagtttcctctttgtttatgctcagctcttctttttttgatcttttggagttggggggaggggagggcggtcactggagtggggaatgggctttgattgttggcacttcttgtagcagagcctggacacaaaataaagattttattttcggtcaactttctgttttttgttttgtatgttttgtagcaagacagttttttttacagtatctatttgccatattgacactaatgggaggctctttttattttgaaactccttctaaataattttattctcaaataatataggtataatatataaaattcaaaaaccatccagaaagttataaaataaaattgcttttacttctatagcccaaggtaactacaggctttttggaatttttgcaattgattttttacttgattaggatataagtgataatttaaaatcttaaaaacgagaagcaaytaaaagatattttgtagccatatattaaaaatggactgattttgtagctttacaaaattgccccaattgagaactactgtagtagacctaagtggctcggagttattggtatatatttcttcattttcttttttwaaatatatcttccttttcaaagcttgtcaaactaatgttaagtgggatgcttgtctattaatggtaaaaattgtatatatataatctctgtctacaccaggatatctattttaaaattatatactgctacaatagggcatacccaactcataaagttgaaaaactttatgtgcattaaatctctggtaatatgagaattttagaagtatttgaaagggtataccagtaccttgtcacataaaagcaatcttaaaaagccagtacagaagtgtagttaaagataggatgagggaactatataacactaatttttgccctgcattgaatgtattctggtgccttggcaagtcattttaaaaagtgttaattttttaatctatagaatggaattgattttacctaaattatatagggtaccacagtagtgaatatgagagatttgtttaagataaaacagtccacaaaaatactaagtgctttagttgatcagctatttaaactctttcagctattaaataatagaagaaaatggaattgaatatgatgtcagcatggaacaatctaatgattcattaagagtcaaccataatgacggtgaagagtcaaaaaccagtgctcaagtatttgaggtatggattcagctgggaacctttttccatcctagggtaaaacagcatgccatttaacagctctttatgctcaagggatagctgttatatttagtgtattcaagaattttgagctgggcgtggtggctgacacctgtgatcccagcactttgggaggctgaggcgggcrtatcacctgaggtcaggagttcaagaccagcctggccaacatggtgaaaccctgtctctactaaaaatacaaaaattagctgggcgtggtggtgggtgcctgtaatcccagctactcaggaggctgaggcaggagaatggcgtgaacccaggaggcagagcttgcagtgagctgagatcacgccactgcactcctgcctgggcaacagagagagactccgtctcaaaaaaaaaaaaagaattttaatatttaattatacacatattttatgatatatttaatattataatacagaacttaatgctaagatatattcataaaaattttatatacagagaaaaatctataggttgaattatgttatttcaggttccattcctgtggacaattttggtaaaattaagatagtaagtataataatcaacaattttacttaagaaatactttctgtgtatagcaatttgtgtgaattgacaactcttacaaaaaagtaaaaacaactgaaaaatggatgtcttttcatttttattatacacatctttaaaaaaaatggtgatagactgaagtgattttttttttccttacaaaagcatctaatctgtatggactccagggattcttcctttggacaaaatgattctcctacagttttgcccatcactactcgtgaagcaaataattcactcatatcacagaatataccagggcccctgactcagacacagactctttctgcagagcaattccatctagtggaccaaaatgggcaggctattcaatatgaacttcagtcattgggggaatccaatgcacaaatggtgagtatattttataagtaaccagttttatgccgtttagcaaaatgtattagtcttactaaatgaccttaatttcttgacacttttgacttacattgtgtttatttatttatttatttttgagatggagttccactcttgttgcccaggctggagtgcaatggcacaatcttggttcactgcaacctctgccttccgagttcaagcgattctcctgcctaagcctcccaagtagctgggattacaggtgcccacgaccacacctggctcatttttttgtatttttaatagagacaggatttcaccatgttggccaggctggcctcaaactcctgacctcaggtgatccacccgccttggcctctcaaagttctgggattacaggcgttagccaccatgcccagccacagtgtgtttaaaatactgtttccatgactttcatttttatgtaaggattttaaaagatttgcattcaggactacaaatagtactttaaacagtacttatgagtctctgtgtttgggcacacttgtgctttgagatcaattggaaatgtaacatattctgtaactagttctgaagtgccagagttgacatggaacttacatttaatggaatgtacacacacacacacacacacacacacacacacacacacacacacacacacacacatattaggctaactccagttttgtttttttttttctgagatggagtcttgctctgtcgccaaggctggagtacagtggcccgatctcggctcactgcaacctccgcctcccgggttcaagcagttctcttgcctcagcctcctgagtagctggggttacaggcacctgccaccacacccggctagtttttgtatttttagtagagacagggtttcaccatgttggccaggcttgtcttgaactcctgacctcgttatccacccacctcagcctcccaaagtgctgggattacaggcatgagccaccacgcccggcctaaactcctgtttttgatttatcaacatctcactgacctgcaagccactttctggtatgttttcttgaagaaatagaaagtaatggaggtactgcaatggaggtactactagtatatggggaattagacatatccttgctgatctttgtgggtaaatgtgtgccacgtgagtaataatgcataaagataaaaagatgaggatggctaaatacttttcaaactgttggctaaaagtatttttgaccaagttcatagtttgagccaaagaggtgaaagattgttttgactgacatatggaaaattactaagcctctaagttgctctctggttatttagaatatacttaacataagtaatactgtgaaggataatgtgtttcttgtttacttgaattttctgaattttctacaataaatattttattactttcataataaaattaataattttaaaagcataataactttaattataaattataccacaggtaaacattttacctagaattaacccttgtttctgttcataatctagagcattctagagttaatctgtgccattttgctcctttatgatccagccaaattgagttttctaaattctagggttaacagtaattggttgagaggtgactgtgtgcaggggaatcctttttgtttatgttcaggttttctgggcctatgcccagaaccatactgcatcaccggcagaggttaatattcaacaaataatttaaatgttaaccaactacattttaatttttcatgtccagaatgaaatacttctgtagtttcccctttatttgacatttattctagtttctatcagaacatttagaaagtttgtgtttttttttttccaacaggaagatcaaggagtctgaatgtgtaaaagggttgtcattttacctagggtacctttccgagcaaaattgtttatttgagtccaaaaaaaagttaattaacactctttgtaattggattaaactttctatacaaagtaagtacaaaggtggttttacattgtttaggtaggcgatgacacagaaggttatttgaaaccatgaaataggaaacatggtatgaagcatggaaaaaaaatgtgagaaacagattataagaaagaattttcttcaaagaactgaagatcagagagagaatattccgggaaacttagtggaacttttggttttgtttgtttcagtggactgtattttttagagcaactttaggttcatgaccaaagtgagcagaaggtacacagattttcatatatatatacttcctgtacctgcacgtgctacagtatccccctttatcaacatctcctaccaaatggagctatttggtgtttttttgttttattgtttttgttttatttacttttaacttttactttaggttcgaaggtacatgcgaaggtttgttatgtaggtacactcagattgtacaagttatttcatccacccatgcattaggcctagtacccaatagttattttttcagctcctctccctcccaccctccactctcaagtagaccccattgtctgttgttcccttctttgtgttcataagtttttatcatttagctcccccttgtaagtgagaacatgcagtatttggttttttgttccagtgtagtttgctaaggatagtagcctccagctccatctgcgttcccacaaaagacatgatcttgttcttttttatggctgcatagtattccgtggtgtatatgtaccacattttctttatctaatctgtcaatgatgggcatttaggttgatccatttatttgctattgtgagtagggcattaatgaacattcatgtgcatgtgtctttatggaagaatgatttatattcctctgggtatatatccagtaataggattgctgggttgaatggtggttctgtttttatctctttgaggaatcaccatactgctttctacaatggttgaacaaatttacactcccaccagaaagtatataagtgttctcttttctccacaacctcactagcatctgttatcttttgactttttaataatggccattctgactggtgtgagatagtatctcattgtggttttgatttgcatttctctaatgattagttatattgagctttttttcatatgcttgttgactgcatgtatgtcttctttttgaaaagtttatgttgaaactagataaaactactttaaatttcatatggaaccaaaaaagagcctgtatagccaagacaatcctaagcaaaaagaacaaagctagaggcatcatgttacttgacttcaaactatactacaaggctacagtaacccaaacagcatggtactggtatcaaaacagatatacagaccaatggaacagaacagaggcctcagaaataacacgacacatctacaaccatctgatctttgacaaacctgacaaaaacaagaaatggggaaaggattctctatttaataaatggtgctgggaaaactggctagccgtatgcagaaaacagaaactggaccccttccttacaccttatacaaaaaattaattcaagatggattaaaggcttaaacgtaaaacctaaaactataaaaaccctagaagaaaacctaggcaatgccattcaggacataggcatgggcaaagacttcatgactaaaacaccaaaagcaattgcaacagaagctaaagttgacaaatgggatctaattaaagagcttctgctcagcaaaagaaactatcagagtgaacaggcaacctacagaatgggagaaaatttttgcaagctatctatctgacaaaggtctaatatccagaatctacaaggaagttaaacaaatttacaagaaaatccatcaaaaagtgggcaaaggatatgaaaagacacttttccaaagaagacatttatgtggccaacaaacataaaagttcatcatcatcggtcattagaggaacgcaaatcaaaaccacgatgagatatcatcacacgccggttagaatggcgattattaagaagtctggaaacaacagatgctggcgaggctgtggagaaataggaacgcttttacactgttggtggtagtgtaaattagtttggccattgtggaagacagtgtgatgattcctcaaggatctagaaccagaaataccatttgacccagcaatctcattactytgtgtatacccaaaggattataaatcattcttctataaagacacatggacatgtatgtttattgaagcactgtttacaatagcaaagtcttggaactaccccaaatgcccatcaatgatagactggataaagaaaatgtggcacatatataccatggaacactatgtagccataaaaaagaatgagttcatgtcctttgcagggacatggctgaagctggaaaccatcatcctcagcaatctaacacaggaacagaaaaccaaacacctaatgttctcactcataaatgggatttgaacaatgggaacacatggacacagggaggagaacatcatacaccagggcctgtcgggggggtagggggaaagaggatggagagcaataggacaaatacctaatgcatgaggggcttaaaacctagatgatgagttgataggtgcagcaaaccaccatggcacatgtatacatatgtaacaaacttgcacgttcagcatatgtgtcccagaacttaaagtaaaacaaaaaacaaaaaaccagaaatgtctgtttgtgtcctttgcccacttttcaatggtgttgtttttcttttgtaaatttgttttaagttcgatatagatgctggataatagacctttgtcagatgtatagtttgcagatattttctcccattcttcaggttgtttgtttactgtgttgatagtttcttttgctgtatagaagctcttaagtttatttagattccattttccaatttttgcttttgttgtgattgcttttagtgtctttgtcatgaaatctttgcccattcccttgtccaggatggtattgcctaggctgtcttccaggtttttatagttttgggttttatatttaaatctttagtctatcttgagtttatttttgtatatggtgtgaggaaggggtccagcttctgtcttctgcatgtggctaacctgtaatcctggcaccatttacttagcagggagttgtctccctaatgcttgtttttgtcagctttgttgaagatgaaatggttgcaggtgtgcagccttgtttctgggctctctcttctgttacattggtctatatgtctgttttcataccagtaccatgctgttttggttactgtagccttgtagtatagtttgaagtcaggtaacataatgcctccagctttctactttttgcttaggattgccttggctatttggcctttttttggttctatatgagttttaaaatagtttttttctggttctgtgaagaatgccattggcagtttgataggaatagcattgaatctgtgaattgctttgcgcagtgtggccattttaatgatattgattctttctgtccatgagcatggatttttttttccatttgttcgtatcttctctgatttatttgagcagtcttttgtaattcttatggtagagatctttcaccttcttgtaatcctaggtattttattctttttctggcaattgtgaataggattgccttcctagtttggcccttgtcttggttgttgttggtatattggaatgctagtgatttttaaacattgattttgtatactgaaactttgctgaagttgtttatcttctggaagagcttttggacggagaatatggggttttctaaatgtaggatcatgtcgtctgcaaacaaggatagtccaacttcctctcttcctatctggatgccctttatttctttctcttgcctgattgctttggccgggacttccaatactatgttgaataggagtggtgagagagggcatccttttcttgtgctggttttcaaggagaatgcttctggcttttgcctatttactatgatgttggctgtgggtttgttagctaagcatcttgtttttcttaatttattttaattaaataatttattttttaagagaaatgtctcagctgggcctggtggcttacgcctgtaatcccagcactttgggaggctgaggtgggcagatcacgaggtcaggagtccgagactagactggtcaacatagtaaaaccccatttctactaaaaatatgaaaattagccaggcatggtggtgcatacctgtaatgccatctactcaggaggctgaggcaggagaatcacttgaacccaggaggcagaggttgtggtgagccaaggtcgtgccactgcactccatgcactccagcctgggcaacagagcaagactccatctcaaaaaaaaaaaaaaagagatatgtctcactctgtcacctaggcttaactgcagtggcatgatcatagcctccagagtagctagaactacaggggtgtgccactgccatcagccaaatggagctttttaaagaaatataccttcctttttttcaatatgactttttgttatttatttattattattattattattattattattattattattattattattattttgagacaaagcctcactctgttgcccaggctggagtgcagttgcgtgatctcagctcactgcaacccccacctcctgggttcaagcgattttcctgcctcagcctcccgagtagctgggattgcaggtgcctgccaccaagcccaggtaattttagtatttttagtagagacgggtttcatcatgttggctaggctagtctcaaactcctgacctcaggtgatccacccaccttggcctcccaaagtgctgggattacaggcgtgagccatcgtgcctggcccaatatgactttttatataaaagttattagtaaagattctgtagtgggtgaatctgcaatggatgaagatgttttggagtgaagctgaattggtcttttgaatttattagaaatattgtacacaaagggcctagtaggtaaaagaccactcagctaaagttttctgataattttcatggtctgcctgaaatagaatgtgttgtagcacatgactcttcaaaaccatgtttgctttcatagcaaagattttaggtaattagctgggttttctttaaataggaaaagtaatattaacattgtcattgtcagattatatgaattgtaaatagttttttaggtaccagggggacttagctaagaagggagaaaataaatgagacttttatctactatgcttgggaaacatagtttcaaaattaagaggatattccacagatcagtcttaattatgaaacttgtatatgattgaataacttataaaaacttatttgtgtttaattttgatttaaaaataaccacagcacttattttctaagaatgaatagaacacttttcatacccccattcctaaaagttagaaaatttgtatatacatatttttttcacagatatttaatcttattataaggggtaaagaatttaaaacaatattattactgttgccttttaatgtccagcagggttttttatattgttttgcttttgtcttttcttaggttaagtaacattgtcaaatattgggagctagtacagagtggtagtttgaaggagtcagattgcttgagtttcaattatagcctaccactaaatagctctgtgtaaccttctatgagttttgtaacctctgtgtgacagtttcctcatttataaaatgtatatacttgwgatacacgtgatgaggattaaatgaggtaatacatctgaagtgctgccacttcctatgaactgagcacgtgtaagcagttgtcatcagtttgcagttgctgtttcatgctaaagtgataagagttatggcaggacatttttatctcaagaaacttgttgaacattggggaaggaaggaaacaattcccattcttaattttgggaactatctatgattatattaatatttaaagcattctagtttgttgaagtttttcccctaacattaaattttttaaaaaatttttttcaaatttatatttgcattttttcaaatggccctttttttttgagacaaggttttgctctgtcacccaggctggagtacagcagcatgatcacggctcactgcagcctcgacctcccagcctcaagtgatcctcccacctgaacccccagagtagctggtactacaggcacatgccatcacactcagctaatttttaaaattttttgtagagacaggtagcccaagctcaaactcctgggttcaagtgatcctctcaccttggcctcccaaagtactgggattacaggcatgagccactgtatctggcctcaagtaactcccttaaaagttggaatacagtccctgtcaagcatcagcaatattttcatgttttacctagcaaaagaggagtctgggaacgtgggttggaatgattaaggattgttacctgcactaaagaggtaataggagagtagtatgttaagtaataaaatttatgtggtgctgatggaagtctgatgcttccagactttttggaagtctggaagcatcagatagacttaaattcaaatactgtattagctatacttccaaatgataggtccaaaagtttttcttcaacttcatatgtctttttagttgatattgctctaaatttgatagagtaggtttagttgttaaactgaaaaaaagtacaataaatatactattttccctgtgttttcagacttttgaggcactttgtagtaccgttctttatgaaccatagagactatatataaatgctgagataccaaaataaatcctatttaattagacatttatcaagttaccttttttttttttttgagacagagtctcgctctgtcgcccaggctggagtatagtggcgcgatctcggctcactgcaacctctgcctcccagattcaagtgattctcctgcctcagcctcctgagtacctgggattacaggcgcgtgccaccatgtccagctaatttttgtatttttagtggagacagggtttcaccatgttgatcaggctggtctcgaactcctgacctcgtgatctgccttccttggcctcccaaagtgctaggattacaggtatgagccaccatgcctgaccaacatgttaccatttttaaacgaaggaagatgactttaaatataagacaaatggttgccacacaaataggtgaaacatgtatgaataatacagtaagtggcaaaaggtaaatgtattacatccagacagacttgttcagattaccaagtaattagacttcatccatgtgtaatgattaagaccattggtggttaagaccctaggattagggtcaaattgcctgtttttaatcctggcttcaccacttataagttgtgagaccttggaaaaaaatgtttatgtgcctcaatgttttcatctataaaatgggggaaatcatagaatccatcatagagctaggtatgtgtttaataatttatttaattaataatttttgttaaatcagtctaggcatatgcatttgattttttttttttaatgcttccaagatgatcgttgccagcccaacagaaaatggacaggtacttcgtgtaattccacctacccagacaggaatggcacaagtgattatacctcaggggcaacttgtggatgtgaatagtcctcggggtgagtaacaacgggatataggggatttgagagtgttttaaaaacataaatattttagaaaaatcaccttatgaaagtcagtgctaaagttgatttctttaggtaaaagattatgaattaaataattagaaaacagctctttgcccaaataaattcaaagttcatttttcaactcctgtctaggttagctatttcatttaagaattctatgaagctgattgactcctgcttcctcccaaatgaccaatgagcataaaataaattattattaatgataacagtaataataacagcaacaatagcaagaatataatgttaatagcttcagaagtttttatttatatctttttttttggaggcagagtctcgctctatcccccaggctggagtacattggtggcatgatctcggcttactgcaacctctgactcccaggttcaagcaattctcctgcctcagcctcctgagtagcagggattacaggcgcctgcaaccatgcctaatttttatatttttagtagagacgaggcttcaccatgttggccagactggtcttgaactcctgaccttgggtgatccacctgcctccgcctcccaaagtgctgggattatgcacgtgagccacttcgcccagccatttatatctttatcaatatttttattagccatgtgactcattactttttttttttatcctcttgctcttttcctctttccttggctccttcagattcagaaaagagaatcatgctccctatttctccttgtatagtctttctttacctgtttggtaatatgcctattactctttttttgttgttttttttttttttttttttgctttcctcccttttccctctatttgaatctcttttccaacctcatagctatactgttatgttgcttcttcatagctaatggtttagggcagatatttttaccttagtgttatcattctttgttaatagtcattaagacattaagagaaaaacatagattgcagaaaacattatgagcacagtatataaacaaaattagttttacattttcctatatattgcagaactcttaatatacaattatttctaccacttttatatcctggctgttcaatataaattctaaaaattataaaattacagtagtcagtattataatttaaagtaaacaagtrtcagagaaattctcaataaagcattattcctttactctcaataaagcataaattttctttacctattacaaatacataagttttagttaggtatattcttatggtcttattcaagatattgatgttactttgttcttgtttttgttgttaagatgtccctgaagagaaacccagtaacagaaacttaccaactgyaagagtggatactctagcagacaataccagcaattacattcttcatcctcaaacatccttcccattgcccaaaaagtcagtgaccgggtgagtccacgggaaagagaagctcatcttttaatatcaccatggaaatctttttacaaattacacatttaaagctggcagactatagagaaaatcagaagatagaaggaactatcattgaatatatctttagttattttaaggcatcttggtcataaggcggctattctggaagctataaatgtcaaaagtgccacttttcctcagtgacatctgttatcttttgaaacagtatgaaaattttattagtttatttagtctgacattaacagacttttcagaataaagaaacattcatggccaggtgcggtggctcactcctgtaatcccagcactttgggaggacaaggcaggtagatcacgaggtcaggagttcaagaccagcctggccaagatggtgaaaccccatctctactaaaaatacaaaaattagctgggtgtggtggtgggcacctataatcccagctacttgggaggctgaggcagagaattgcttgaacccgggaggcggaggttgcagtgagctgagattgcaccactgcactccagcctgggtgacagagcgagacatcatttaaaaaaaaaaaaaaaaagactgggcacagtggcttatacctgtaatcccaacactttagaatgccaaggcaggcggatcacgaggtcaggagattgagaccatcctggctaacacggtaaaaccccgtctctactaaaaatacaaaaaaaaaaattagccgggcgtggtggccggcgcctgtagtcccagccacttgggaggctgaggcaggagaatggcgtgaacctgggaggcagggcttgcagtgagccgagattgtgccactgtactccagcctgggtgacagagcgagacgctgtctcgaaaaaaaaaaaaaattcattatagttcctaaatttttwaatttgttttatcacatttttatgcatagaattcctctgtggcaaaatgtttaaaatgctttttgctaacttttatttcagtttttgtttttgttttaaaataatactatgatattttagggaaatatgtacatggcttatgtattgtttatgttattttaattgttccataaaagtatttttgaattaagacattatttttgacatttaatttcagaccttaataatgttgcttttcacttgatcttagccaaaagtccaagaagtgacacataatgttacttcaaactagtcaaatttatcatttttttgataaatgaaaacagttatataataagagcacaaaataagctttgggagagatatatgaaacacttaaagttgttgggactacgtgtatctggaagaagaaatttaggtcttygacttagcagttaataaaatagcagtggttaaagaaaataataactaatgcacccatcagatcaatctgtagttaytgttaaaatttgttattgatgacttcaatatttgtctttgatactaagaggataaagcagttgaatgcattttgtgtgttcattgaactgcatatttatatatattcctctcctatcccagaatgctggaagaaccccttctggggcctcttcagccactttcttctaatacacctatatgggcctgccrtcttaggagctgtgaggtgagttataaataatcattacctagaattacttaactgattataaccacaggtcatccccaaatgccacttttgagtacaactaatatagtctatagttacagtattttgtttgtgtttatgttaaatctgatctcatctattgttgaattcttagagattctaagctctgttaaagcagaggttatatatatctctttacatttcactattatttcttctcttgcaactctcttccctcgtagtccatgaaacttcactatcatgtttctctactatttacttttcaaccatttattttctttctttgcttgcacttattttttttttttcatattatcagtagaaaattcttcaaggctcactttctgactttgtcttttttctctatattttgtcttttggagcacttacctactttgttgactttcaactgacatctacaaaaatgattttcaagtccgtatcaccagtttatttatttatgtatttatgtatttatttatttatttattgagacagagtctccctctgtcccccaggctgtagtgtagtggtgcaatttcagctcactgcaacttctgcctcctgggttcaagcgattcttgtgcctcggcctcctgagtagctgggactacaggcatgtgccaccacacctggctaatttttgtatttttagcagagatgggattacaccatgttggccagactggtctcaaactcctgaggtgatctacccacctcaggctcccaaagtgctgggattacaggtgtgaaccactgcgccaggccagattttgaattctgccttcctcttgtcccagatatctggctacttgcttgaaggtttatttgaatttcacctcaaattcaccatatcccatactgaaatcatctaccatgcaacaactagctccacttccaaaattccatgtctgtgtaatgacaaataccgtttccttagacacccaggcataaagttttgtactaatttcttgctttcccacatttaggtagtcaccagattctttttcttttttatttttttgagatggagtctcgctctgtcacgcaggctggagtgcagtggcgctgtctcaggtcactgcaacctccacctcccaggttcaagcgattctgctgcctcagcctcttgagtagctgagactacttgcgcgtgccaccacgctcagctaatttttgtatttttagtagagacagggttttgctatgtttgtcaggctggtctcgaactcccgacctcaggtgatcctcccgcctcagcctcccaaagtgctgggattacaggcatgagccaccgcgcccagaagtagtcaccagattcttttagtttttcctttaaagtatctttttctttttggcccatttttcaataggcctttgtcctcttgtgcttgattacaggaatagcctgccccctaacatctttgaccctcccatttctggtccctaatgtatatttttctaaggctacttgtatttgaagattgttttaattgtcttttctcagtgcccaataagtcatgttattttttccacattatttagccactgtagctagcttcaaaggcctttcataatctggtatcatcctacgttgtcctactttatttcctacttttctcaaactcatcttcattcttgctagcctagtcctcctacttttgacagatactccagaatttttctttagctctccctttacccatttttatttccttttcctatatgttacttttttcttctacttaccatttctaactattcttcaaatcccaatgcaagtcctacatgtcttttctataaattatctaatgattattttagcctttatctatttctctctttaaattctttagtattaattgtcattcttaattatttactagcttaggccgggtgcggtggctcactcctctaattttagcactttgggaagccaaagcgggcagatcacttgaggtcaggagttcgagagcagcctggccaacgtggcgaaaccccatctctgctaaaaatacaaaaattagccgggcatggtagtgggcacctgtagtcccagctgctgaggcaggagaatcgcttgattttaggagatggaggttgcagtgagccaacatcacgccactgcattccagtccgtgacagagcaagactccatctcaaaaaaaaaaattaaaaaataaaattatttactagcgtgggttgttcactgttacataaaaattagactttttgaggaaagggaccatgcctactctatatacaaaccatagatggtagtgaatatttaactatcagaatgcttcattgttttaaacaaatcttaaaatgtgggaaagaaaaaatattctattttaataatttgagaaaatttctcataaaaaaccttgtgctatatatattacatttgttaggacattattgttgttgcttttctaagtagagtacatgtatgtatatacatatakgtgtgtgtgtgtgtgtgtgtgtgtgtgtgtgtgtagttttagctttttgtccccctaccttttgttagtcatggtttttcagtggtttcctaaagttactgttgtgattgtttgatgagggttttaaaaatcattattacaagcctcatggaatgctatggatattagagcatttattaaaacaatcatgcaaccaaatcaccttatgttacaactatagtgcattgtgtggcttacctaaaatcatcgtatatcttgtaagaaactgagtactcctgtccaacagacttgagtatggttgtccaagatgaaccacttctttcccagtgaggggttctttctcctctcccaagctgtatcagtgataaaaaaatttttgagttggctgggtgcggtggctcacgtctgtcagtactttaggaggttgaggcgggtggatcacgaggtcaagagattgagaccatcctggccaacatggtaaaaccctgtctctactaaaaatacaaaaattaatctggcatggtggcgcatgcctgtagtcccagctactcgggaggctgaggcaggagaatcgcttgaacccaggaggtggaggttgcagtgagctgagatcataccactgtactccagcctggtgacagagggagactccgtctcaaaaaaaaaaaaaaaaaaaaaattgggttaatggctgaggaaatattttctgcattttggttcaaaatattgtttagtaatcttttattttttgaatttctcatttaatgatgttttactataggcatttttttcagatttgactaaagtgtattaactggacaaatgtcaatactgtattaaaatgttatctgtaagcctatttataagtatatatagttctgattatattatactgattttttctttattgacatatattctaattttatttataagtaaattatagtatagctaaaatttatatccatttatttgtggtgaatattttgatagagttgtctaggttagcagaaaaattataagcattttcattattttagaggaaattgcagataatgtattgtttggcatcagattatctcttaactattataacgaaaagtacagccacaacagtattttgatacctttctatttgttaaatgtattcttcctttctgcccacatctctgttcttatttcctctaagggggaaacatacatggagtcaattctaggtctctgcatttcattgtaagagatcacagttaacatgttttttctgttggtattgaaaaaaaagtttctccccagctgggtgcagtggctcatgcctgtaatcccatcactttgggaggctgaggcaggcagatcacctgagatcaggagtttgagaccagcctggtcaacatggcgaaaccctgtctctactaaaaataccaggcatggtgatgcacgcctgtaatcccagctacttgggaggctgacgcaggagaatcatctgaacccgggagatgaaggttgcagtgagatgagatagtgccattgcactccaacctgggcaacaagagtgaaactccatctcaaaaacaaaaaaaaaaaaaagaaaagaaaaagtttctcctctagtacgaggatactcaaatggttgtatatagataatatcaattaatttacattatttatttacacctttccttgttttagaaggaatttaagagagcttacaaaaaatacgtaaaatatattagcaaggtagaaattaaaagtgggagctaaacaataaagaaagacaaggatgggaacataaatggaagtaagaaaatacatgtcttaaccaactgtgtgtgtgtgcatgtatacatgtacttgtctataatctaggtatatgcttttcaaaaggggaagcatagttactaaattctgtgccttttagatttaaaaattatgctaatttccataagataaaagcaaaccattaactatttttggtactaagaccagacagaaatttctctcagagaaggatcttctttttttttttagacagagtcttgctctgttgcccaggctggagcgcaatggcacaatctcaactcactgcaacctccgtctcccaggttcaagggattcttgtgcctcaacctcccaggtagctaggactacaggcaagtgccgccacgcccagctaatttttgtatttttcgtactgatggggtttcaccatattggccaggctggtttcgaactcttgacctcaggtgatctgcccaccctggcctcccaaagtgctgggattacagacatgagccactgtgcccggcctcagagaaggatcttcataaaaagaatgttgatataatgagcaaatttttctacagcctttttatcaatcactcacagttttcattgggtttctaacagatgcatggcatcctatcaaaattaatctcaggccttcctgccttcctgccttcccaccttcccgccttcccgccttcccaccttcccgccttcccgccttcctgccttccctccttctctccttccctccttccctccctccctccttccttccctcctctttcctttctccttccaacctcactccaccaaaaaaaatcagtttcagtaaaggaggccccataggaaatgagtactttgtggctagttttacgctgatctggattgatccagggtaaagttttaaatatctgaaagaattgatatacattatatgttcttgcaagttatcttttctaaatattctttgtctcaaacaagacgttgataaagatagtatggcaatgagtttggcattatattccctaacaaacacctggttgaactcaaatcagacccactgattgtaatagaccattgatctgagggcacaaatgacattctcttgtgaaaggtgatgagtcttccattttggacaaccatctcattacatttattatgcaatgaagtgtattgctagtaattttgtttaatttctaccacatgcagaaaattggagattcataccgtggctactgtgtaagtgagactgaattagaaagtgtcctaacatttcacaagcagcaaacacagagtgtttgggggacccgtcagtctccaagcccagccaagcctgctacacgcttgatgtggaaatcccagtatgttccatatgatggaatcccatttgttaatgcaggtacttttttaaagaattattttaaaaggttcagcagcagccatagtccattgtcaaaatgtgattttcctaaggtgataacatttttattttggtagctgacaattgaatgctaattgattaaaatgcatattaaattgaaaaaacttatagaaaatataatcaattactttataatattgcattttaatatatcaatgaataaataagacttctttcatatattatactgaaaaataaaatatcraagtttccattaaacctatttaataaaatgttaaaagagcaattttattttaaatatgtacatcagctgtgtttttccccttcagattaaatattttagccttctctcttaatttgtattgtgggagaaatttatgtctattttatgtagcttgtaactctggagttactgtatagaatttgtatacaatctagagttatagaattctgatactaaagttctcaagcattaggtatgttatatacagtattctcagacactgggttagttgtttactaagggagtagagtttcaagcaaatctcttagactagttagagccccaaagaatctaaaactaagcgatttattttaggactatgagggcactaatttagctgaaagagttgcagtttcatcctggacctctgaggttaatgagatatacttaagatgagataaatgtaaccacttctgcctgagtttcatcagtattctataaaagaaatgcagcattaaaaataaatgagctgggttatttatatatttatttatttattttaaacgtggaggctcatgcctctaatctcagcactttgggaggccaaggcgagaggattgcttgagctcacgagtttgagacccacctgggcaaaacagggagacctcatctttacaaaaaataataaattacctggacatggtggcatggggctgtagtcccagctatttgggaagctgaggtggaaggatcacttgacccttggaggtcgaggctgcagtgaaccgtgatcatgccactgaacttcagcctgggtgacagagtaagaccctgtctttaaaaaaaaaaaattaacaaataataaaatgaacttgaaatcctatagtcttcctttttcccatcctagttttaatctccttaaccctccataggtagctactacatgaatttcatgtgtatcgttctagtctgtatttttatactttaccttacatattgtatctacaataatacattttattgttttggatttttaaaaaatgtataaatagtaaaatgtagatattgttttgcaaatattttcattcacccttttttttacatttattggtattgatagttataaatcctagttaatccaatttaatcattgtataatattccagcatgtgaccaaaccacaagtatttttctattgatcatcatttaggttgtttccaacttttcattattacaaagaatgctgtagtcaaacctccacactatatatactytaatgaaaagctgtaattagtttttctagagtatatgccttaaagtagaattgctggttgtgaattatgcccatttcatctttacaagattatcttaaaattgctctcaaggccgggcgcagtggctcacgcctgtaatcccagcactttgggaggccgaggcgggtggatcacgaggtcaggagatcgagaccatcctggctaacacggtgaaaccccatctctactaaaaatacaaaaaattagccgggcgaggtggcgggtgcctctagtcccagctacgcgggaggctgaggcaggagaatggcgtgaacccaggaggcggagcttgcagtgagccgagatcatgccactgcactccagcctgggcgacagcgagactccgtctcaaaaaaaaaaaaaaaaaattgctctcaaaagtgattgtacaggtccagaatccctttgaatttttttggaccaggtatatttcagaattctgaattttttgaatgtaatatggtaacattatggaatactcctagcaggtattctatagaccagcagtccccaatatttttggcaccagggactggttttgtggaagacagtttttccacggaccaggatgggggatgggggatggtttcgggatgattcaagcacattacatttattgtgcactttatttctattattactacattgtaatatgtaatgaaatagttacacaactcaccagaatgtagagtcagtgggagccctgagcttgttttcctgcaactagcaggtctgagctggaggtgatcggagacagtgagagatcatcaggcattagattctgatagggagccagcaacctagatcccttgcatgtgcagttcataatagggttcgtgtttctatgagaatctaatgctgccactgatctgacaggaggcagagctcaggaggtaatgcaagtgatagggagtggctgtaaatacagatgaagctttgctggcttgcccactgctcacctcctgctgtgcggcctggttcctatcaggctacagactggtagtggtccagtctggaggttagagacccctgttatagccaatatcacataatcaaacaccaattctttattagatagatagccacaccaagagaaacaaataaagactataacctcacacagctcaggcctggtttcgcagccaagtgagtcctgaaaaaaccgttttctgagctttttggatttcagatttgtacataagggtttgatagcttgtaccaattttcactcctgtcagcagtgtgtgaaaatttcatttccccacttttacttcatgacttagcattgccagatgtttaaaaatctttgtttgtttgtttgtttgtttttttgagwcggggtctcactctgtcacccaggctggagtacagtggtgtgatctcagctcactgcaatctcaatctccttggctcaagagatcctcctgcctcagcttcatgagtagctgggactacaggtatatgccaccatgctcagctaatttttgtatttttttggagagatgaggttttgccatgttgcctcggctggtctcaaactcctacactcaagcaatctgcccacttcagcctcccaaagtgctggtattacaggcatgagccactgtgcccacaccttaaaaaggttttttaaagccttaaaaaacctttacattatggaaatttttacatgtgaatcaaagtagagataataatataagaaaccccatgactctaggtatctatcttccagcttcaacaactatcagtatatggtcaatcttgtctcataccccttacacttcctcattccctagatggttttatagcacatttcagatatatcattccatctgtaattactaaagtatatggtgtatactaaagtatatatctctaaaagataaggactccttatatatatatatacatatatgtgtatatatatatatatatacacacacacacatacatatatgagaatcctgtgatcacacttaataagaaaattaacagtaactttgtaatgttataaaatgttcagcatttacattttcccacttacctcacaggttttttttcctctcctcaaaggttgttgaaattcaaatccaaacagggtccacagactgcatttagttaataaatctcttaaacttcttttcatttgaagatttctctcctcttctaggtagtttgttctgtaatatttgccatattctgggttttgcttattccatctgtgtgatgtagtttttgttctttatctcttgtattttctgtaaacaggtctagagccttgattaaatgcagatttgatttttgcaagaatacctcctcggtgtgctgtgtacttattgccatctgtatgtgtctctctgtttgtggtgttcagattgatcagtggattcagtttttatagagtattatggaatgtttttatttttgccattccaaggagtatgaaatagtattttactattgttttaatttgcatttccctgtttacttaaagttgaacatctttttctttgttcatttactaccttttttttctttctgacttggctattcatagcctttgcacatttttctgagtggttgtttattaattatttatgattgtttgtagtctacatagtaattctacatgggcaattactatgttatatatcttataaaatgctatttctcacactattacttttatatttacttatggtgtcttttaaacagaagtttttatattttaatgtcagctttattaacatttgtattagtaattggtgtttttattttatattttaaaagtttgttgtatcctacagtagtgtaagatattcaacttaaaatcttaagttatataattttcacatctacttatttgtattatctattgctgtgtaacaaattatcccaaacgtagtggctgaaaacgacaaacgttaattatctcacagtttctgtgagtcaggaatccaagagtgactcagcaaagtggttctgctgcagttgtctcatgacttgactgagggagggtctactttcagattcactcttgtggctgtcagcaggccttattccttgccacgtgggcctttccacagagctcccttaccacttggcagmtgattacctccagagagagcaattcaagcaagagtaagagagagtacccaaatgatagttacagtctttttgcagcctaatatcaaaaattacttcctaccactttggccatatttattaaacgtaagttagtaagtctagcccatattcaaggggaggggattactcaaggacatgaatgctagaaggcatggattactgggggccatcttagggctggctgctgtattaacagcccaaataaaaacaagaaaataattataaaaggaaataaaaatttaaatgataccaatatttattaaccaaatgtaacatttgctcactatttataaaatggtataaaaaccatatgtcaggtgggatgcagtggctcatgcctctaaatcacagccctttgggaggccaaggcaggcggttcacttgagtttaggagttcaaaaccagcctggacaacaagacaaaactctgtctactaaaaatacaaaaattagcctggcgtggtggcacacgcctatagtcccagctacttgggaggctgaggcaggagaactgcttraacccaggaggtggaggttgcagtgagccaagattgcgccactgtgctccagcctgggtgacagagtgagactccgtctcaaaaaaaaaaaaattatatgccagtagacactcagtaaatgtgatattcactaattttcttaccataattatggtacctttggtaaattttaaaataaacttttaaatttatatgtttgtatatgtaagtaagacttactaatgttttctttccttaaagctgtatatttgaaagattttgacattgccaccaccaagttacttttawtctagtgtctagaatagatggacacttgaattaatatcaatagttggttttggcccacagggagtagagctgtggtaatggagtgtcagtatgggccaagaagaaaaggtttccagttaaaaaaagtcagtgagcaggaaagcaggtcttgtcagctctacaaagccacttgtccagctcggtaagctttattttcttttatttgttttctattaagaacttatttttgaatagctaatacacatatttttattaggtttatacagtaccaaaaagtatacagtgaattctaagttttctcttacccacatttgttctgtctttaaagcaacaactcttactagttttttgagtcatcttccaaagatattctgtgtatatggatgcatataaaggcagagagacagagatctccttctttacccctataaatgttgttgaaaatctcagtaaagctcactaatattttctttccttaaacttacatagtagtgtaccttttttcttgatatgaattcacatagatttattctcaatctgaatgcctattgtggttatctgctgcacagatatgttacatactagtgtgaatgtaatgacatactttcctttttttcattctcagtgtatctcaaagctgactccatagatgtacataaaagtactattttttaatagccatataatattccatttatggatgaattatttaattcatgtaagctgtgaaaggtattccttattagtattatacaaagctgcagttattaacattgtacatatttgtgcactcctacaagtgtttcagtaggaaaaattcctagaaatgaaattgctagggcaaaggctgtatcttttaaaaatgttgacaaatattgcaaagttgctttttagagcgattttatcaatttagcagcaaattatgagaccaaygtagtaagttttagatagattaggactacagagtagtcattgctcttggtaagaatgaaaaatgtgaaccaatgaaagattttacaatgtcctttatgaatgtaaattttttagacattgaaagtattttaagacttaaaatatattgaaagtgttttaaactattaagtaaaataaaaaatttaaaagataatatgtagtggttggacttagttgatctttgaaacacttttagcatcacatctcacattataaataccttagcattcttggccgagcatggtggctaacgcctgtaatcccagcactttgggaggccgaggtgggcggattacaaggtcaggagttcaagacaagcctggccaactggtgaaaccccatctctactaaaaatacaaaaaattagccagccgtggtggcgggcccctgtaatcccagctactcgggaggctgaggcaggagaatcgcttgaatccaggaaacggaggttgcagtgagccgagactgcgccactgcactccagcctgggcaacagagcaagactctgtctcaaaaaaataaaataaaataaataccttagcattctcaagaagtttttaaagcccatttacaaggcttttcatatttaatcctgcaatattaactttaggtaatatttaaacctgactgtgaaacaaactttcagttgcttttttttttccatttagccttgacttgaaacttatcaactgcttcttaaatataagcattataaaaactttaggtataacttgggagaaaacctctacatgtgaagaaataattttattttccatcattctacaagtactttttgactgtctactctgtgcccagaaactacattgggtgccataggaaggagggaaaccaaaagaggaataaaattttacttaatcccagggaacggatcaggaaacaaaaactagtagacaacatgatagtatagaatatagtgtgaaatatatgatttaactacctatttaggtatttaaagaaggaatatatccatacaaattcatggcaggaaagaaagtacaatttaaactggatgttgaagtttaaattgaatttgggtgggtagagagttagagggatgatattgtaggttaggagaaccatataaataaagctatagaggccaggtgtggtggctcacgcctataatcccagaactttgggaggctgtggtgggcggatcacttgaggtgaggagtttgagaccagcctgaccaacatggtgaaaccccgtctctactaaaaatacaaaaaaaattagccaggcatagtgacacatgcctgtaatcccagctactgggggaggctgaggcaggagaatcacctgtgacattgaattatcaagtggatttaagtaatgaaagattggaggcacaggcctggaaggaggctattaaagtaatccagggccaggcatggcagctcatgcctgtaatcccagcacttcaggaggccgaggtgggtggatcacctgaggttgggagttccagatcagcctgaccaacatggaaaaaccctgtctctactaaaaatacaaaattagccgggagtggtggcacatgcctgtaatcccagctacttgagaggctgaggcaggagaatcactggaatctgggaggtggaggttgtggtgagctgagatcatgccattgcactccagcctgggcaacaagagcaaaactccatctcaaaaaataaataaataaataaataaataaataaataaataaataagtaatccaggcatgaggtgattatgccttccaggagaatgaagagaaggcaaatctasgggaaaaaaatagtaaaatctgtaagtacttagatatttttaaataatgtttacttttaatttgctaagtattaatacaactgagaatatggcatatattttacataagcctctgaatactttacagataaattgaattttctctaagcttaaatgcttaaagtagacttctggttgataagatagattatcttgagattataatataatgaaacaaattcttctttatcttgtataaaggatttacattaaaaaggtacagaagtttcctgaatatagagttcctacagaccccaaaattgacaagaaaattatcagaatggagcaggagaaagcttttaacatgctaaagaagaacttggtagatgctggtggtgttcttaggtatgacatttttatagttcttttattttacaaattaattagctcaatttgcaagaattattttgtaagggaaattatagttttccaactatttcattaagtaacggttttataaggtagagatatcaatagttccctaggtattaaattgatttgccactgtgtaagccattgagtttcttagccccaagttgtagataattcagaccaaagaattattccatactgtatagcatatactctgtataccatataccatgtaaaagctttttctcaaaatgacaaagacatacttaatacactttattatatatttagtactttgttttagctacttactatgagcagaaacttcagccgcctgtcatttttttaaaactaatctttgattmcttacggcagccagaaatgaattccaagccgtaaataaaattccatttcacaccttttatgctttaggttttaaatgtgaaatattagcattcttttttactttcctttatgtgtcagtctgggtgaataatttgttattgtataatggatttaagtgtatggaatatcgttttcgtgtgatctttaaaaaaaacttttaggtatgtgaaaaataaattgagtcaacaattagatccttcaatgaaagtcaaaaatatcactaaaaaaattagatcctgcagtttgaagagcattgcatataatttttaagtaggcattgtcagttattgtaataattttatacagaaatatcaattaaagcagtatcctaccagattagttcattttcctaccgtctacttttctttttttttttttttcatggctctccaagagatctgcattcacctttagttaattctcttgctcacttggccagcaggagctgggagtgctgtagaggcagtatgttgagctcctgtgaggaaagaatcaaccataaagttcagtcttgacaggttctatctttggttggaaggatggtaggtgtaacagagaagtgtaatttgggacgaatgtttgatgaatgggaaaatacacagttcaaaagatgatgatttacaatgtcttctctttattttgaggtaaaatgtacttaatatgaattttctcatgaacccaaaataatacaattaatatgaaatttaaaatgccattttcatatatacttaaaatccctgtatctccctcaactgtaggaccacagtgaaagtctataaatatttacaaatattttaatttaattggatataaagcaaatcttagaagagttaagagatcattttwaattttatttgatatgaaataaccatatataattttttcttaaaggattaatcctttcctttatgagtattaacctaagtaattatgattcctactttggtctaataatattaaataattttaatgtttaaattttagtaattttaaatattttctcttaccaggtggtatgtacagttacctacacagcaagctcatcagtatcatgaattagagactccctgcctcactttgtcaccttctccttttcctgtgtcttctcttgaagaagaggaaactgcagttagagatgagaattgtgcattaccctcacgtttacatcctcaagtagcacataagattcaagaattagtatcacagggaatagaacaagtgtatgcagtaaggaaacagctaaggtacaatagaagagcattgttcttttacatttttcagttttgtttsttgctttaaataatacagtgaacattggagatattttccaaaatatatgctatcagggtagataaggaatatagtttattaatttattaaaataatcttatttataaactgatcattttctaacaaatgcttggcaagcaatggtgtaatatggtttattataattctgattactcacttgagacattctatatttggatttggcaaattggactatgtctaaatgatgtataaaattaaatagttaataaatacttttagagaagaaaacctttgtagcaccaaagattttaaaacccaggccaagatactatttgaaatgcagttaaattttattacaacacaataatttggatagttctttgtctaatgaaattttatttgtagtactctggtctaagttttttgatcctcaggaaataataataattatataagtaattatataattacttattttgtgtgtgccaggtactgtgctaggctttttacatgtatgatctcatttagtcttacaatagcactattaagttggtatatttatcccaattctacacatgagaaactggagtctcagagtggttaaataattggcttaagaggcagtggcagagtcaggcgcagtggctcacgcctgtaatcccagcactttgggagtccgaggagggcagatcatgaggtcaggagatcgagaccatcctggccaacatggtgaaaccccgtctctactaaaaatacaaaaactagctgggcatggtggcacgcacctgtagtcccagcttctcgggaggctgaggcaagagaattgcttgaacccgagaggtggaggttgcagtgagccgagatcgcgccactgcactctaccctggctacagagcgagactccgtctaaaaaaaaaaaaaaaaaaaaaggcagtggcagaactgaaatttaggcctaacgctatatagcctgtgcctattaccgtgatttatgatacttagccttgctcttactgattattgtgtaatctgatctgaataacaaaataaatatagtaagccccctcttaaaggcatgaataggttctcgaaaactgctactttaaccaaaaggaaatacagcaggtccttgagttatatcgttctgttcaacgtcttttcttttgttgttttttttaactttttttgtaaaagaagcaggggtcttgctatgttgcccaggctggtcttgaagtcctggcctcaagtgatgcacccaagaagatgggattgcagaagcaagccactgcacctgattcggtgttttcttatagcattggagaaaataatttggttttgttgtatgtcctttcacttaaggtctcagtttccaggagcctaacaatgatgttaactgagagcttactgtaattcctagaattatttcctaattaatacatgacttttctatttagcagttttcttagacattttatatttatttccactggggcatcattagcataaggcaaaaatttggtaaagccattcactatttactaaacctgaatcttaacaatggaagtataatacagttctgcgatttggtccaccaaatgtaataagcatatatatgttaaattttatcatttcttttatatattgattttttatacaattaaataacagtgctgccttctatttctatcttcttttgtctccgtgtaaaattcaagcccatcatatttcatataatattaattgatacttttggaagcaatgtaacatgatgtttacgcacataacctgggtataggcccaagctctcttatttactaggtaggtgtatgattttgggcaaattatttcacttctacagtccttagttctatcatctgtaaagtgggaatgataattgtacgtatgtcgttgatcattaagggttaaaggagatatttgatgtgaagtgttccatacagtgcctgacatagcattaaaaacattattatacttaaactgaaaataatgatttctttaaattcataaaaatatcaaagctcagctgggcgtggtggctcacgcctgtaatcccagcactttaggaggccgaggcgggcggatcgcgaggttaggagatcgagaccagcctagtgaaacatagtgaaaccctgtctctactaaaaatacaaaaaattagccgggcgtggtggcacactcctgtagtcccagctactcgggaggctgaggcaggagaatcgcttgaacccgggaggcagaggttgcagtgagccgagatcacaccactgcactccagcctgggcgacagagcgagactccatctcaaaaaataataacaaaactcactctaatatatttagatgttttaccaatgaaaatattacatttctatagtctgcaataattctatgttgtatggaaaaagtttaaataggaaaatataaattacttacagagctataaaccatactttatagaagtttatactgaaagagaacctttctgtcttttgatctaaaggcatattgctaaatggtttatgtctttattccattttgtattctttacagaaaatttgtggaaagggaactgttcaaacccgatgaggtacctgaaagacataatttatctttttttccaactgtaaatgatataaaaaatcacatccatgaggtacagaaatccttgagaaatggagatacggtatataactcagagattattccagcaayggtatgattacaaccataattccttattacagagtctttctcagcttctattaatatttagtctaataagaatggctagtgttaggccatctgaataactgcaatataagcaaatacaataggccgggcgtggtggctcatgcctgtaatcccaacactttgggaggccgagacgggtggatcacctgcggtcagaagtttgagatcagcctggccaacacggtgaaaccccatctctactaaaaatacaaagattgggtgggcgtgatggtgggtgcctgtaatcccagctacttgggaggctgaggcaggagaatcacttgaactcaggaggcggagtttgcagtgagctgagactgcaccactgtactccagcctgggagactcagcgagactccatctcaaaaaatatatatatatagcatctttttcttaaaatgtaaatactcaatgtttagaaaatgactaaaagttttttattactttcacaagaagaaaaatcagtgaattcccaactccataataaaaacactggccaggcacagtggcttgtgcctgtaatcccagcactgtgggaggccgaggcgggcagatcacctgaggtcaggagttcgagaccagcctaaccaacatggcaaaaccccatctctactaaaaatacaaaaaatagctgggtgtggccgggctcagtggctcacgcctgtaatcccagcactttgggaggctgagatgggcagatcacaaggtcagaagataaagaccatcctggctaacacatctctactaagaatacgaaaaattagccgggcatggtggcaggtgcctgtagtcccagctactctggaggctgaggcaggagaatggtgtgaacccgggaggcggagcttgcggtgagccaagatcgtgccactgcactccagcctgggcaacagagcgagactccgtctaaaaaaagaaaaaaaaattagctgggtgtggtggcgtgcgcctgtaatcccagctactcgggagggtgaggtaggaatcgcttgaacctgggaggcggaggttgcagtgagctgagatagcgccactgcactccagcctgggagactgagacttcatctgaaaaacaacaacaaaaaaccactaatctttatttttaaatcaacatgtattttctctgtaaaaattattcttactcatttaacagacatttattgagtactattgtatatatttcccctcccttttttaataaatgggcaaatttaaatacagttgtttgggctgggcgcgttggctcatgcctataatcctagcactttaggaggctgaggcaagtggatcacctgagatcaggagttcgagaccagcctggccaacacagtgaaaccccatttctaccaaaaatacaaaaattagccgggcgcggtggcaggtgcctatagtcccagctacttggcaggctgaggcaggagaatcacttgaatccgggaggcggaggttgcagtgagccatgatcatgccgttgcactccagcctgggtgacagcagcaaaactccatctcaataaataaatatatatccatctatccatccatccatccatacatacatacatacatacagttcttcatacttgattgcccaaagtgataatgttggttccatatgccatctgtggatatcagtttaactcatacttttttttttttgagacagtctctctctctcttgctcaggctggattgccgtggcatgatcctggctcagtgcaacctccatctcccaggttcaagctattctcctgcctcagcctcccaagtagctgggattacaggtttcagccaccatgcccggctaatttttttgtttttattagagacgggtttcaccatgttggccaggctggtctcaaactcctgacctcacgtgatctgccctccttggcctcccagagtgttgggattacaggcgtgagccaccacacccgaccttaactcatagtttgatatggtagtttctccctgaatattagtcatctctgtgaaaattttgcctactctgaagagattaattacccagaaacaactaattacaatacagccagtgattatgccattaaaatctgagatgtagtatattttgctttcctaacttgttatccaaatgcagtatctgaaaaaatatggatattttaaaagccaaaactatttcttacaatccataactctttgtcttttttttttttttttgagatagagtttcactgtcacccagccagagtgcattcacacaatcacggctcactgcagccacgacctccaagactcaagcagtcctcccaccttagcctcctggcagctgggactacaggcaccagccattacacccagctaattttttaagtttttgtagagactgagtctcactttgttgcccaggctggtctcaaactcctggcctcaagcacctctccagccttggcttcccaagccttacgggcatgacccactgtacccagcccaataactcttaattattcactatctaaatgttagaagtagtccttgtcatctacactgttgtctaaatccttgctatctgaactcaggaatttaatgtatttgtatagtaaagtatacttgtgcttgaagaatatgaacaagtgaagagagtagttgcagaataaatcacatactgtgaataaaatatgacagtcgtaatgacgtcttaagatatttttcaatataagagctttatttttactgaaataaatgttcccatttcagcttcaatggactacagacagtggraatattctcaaagagaccatgacagttmcatttgcagaaggtaggttttcttgaatacctttaaaatataaattcaaatggtgtttaactggaaggaacttaagatattatctcatctaatcaaattttatagataaggaaaccaggatccaaagacgtaggagcagctatgttatggtttatcaacatacttcctactattttaatttcctcttatactttgtttttaatgcttttttatgactgacattttgaagctgataactagcacagttaactgtagctaattcactaagtctggytaattccagtagtaataaccctaagatgccctgatctgggaactatggtccattttttacggttgctttttctcatgtgttcttactgctgggccctttcaatattccaaacttatttccacccttttgcatttcttctctgttctggaaatgtcttttttcttatgcatggcaaactcctcttagtactcaaattgtaatctcttttaagtacattcataacttcaccccctatataaagttaaacctctgaatttctttttttgtttttgagacggtctcactctgtcacccagactggagtgcagtggtgcgttctcggctcactgaaacctcagcctcccgggttcaagtggttcttcagcctcagcctcccgagtagctgggatcacaggcgcacgccaccatacctggctaatttttgtatttttagtagagacagggttttggcatgctggccaatctgatctcaaactcctgacctcaggtgatccacccaccttggcctcccaaagtggtgggattacaggcgtgagccactgcacccggccaaacctctgaatttctataatgagcatctgactgatagcatttactgagctcagcaacactggcaaaagaatagagcattggtaggacaggagagagaataaaggacttactagatttgtaaagttgagtatctgagccatttcagtggcgtggattgggaggaagccatattggggtgattgaagtgtgaatgggagatgaggaaggagtagggactccttaaaaagtgtaccactttttcaggaattttgcaatggcaaatggggttgagggaacgtattttaagagtagagaactgaaaagatagatgaagatggtgatgggaagttgaagaaacttctgttggctttccttttctctgtaagagtgctaaggataaggaaaggtttcaagaagggtggcatggatttgagggaaatgcaaattagaaattatcctggatagagagtgaaacattgccagatacaggtgaaggtccaatcaaagttaatagtgaattggtattagtagaattagtgagtttctttttcagtggcactcagcttcccatgtattggtgcaggaaagccatttttatgcagagttagggttttactggagggatatgaccaaaggacagagaggcaagagagtttaggtacttgtaaaagagtgactgaaattttatagacctaggactgtaagctggatgggggaagaattttattaagaaagaggttgatggatctgaagaaaactgagggattaattgactggaggttcacatgaggttgaagaacaattgtagtgaaatacatgagcaaaatctctggaagaataagaggttgtagctgggcacggtggctcacacctgtaatcccagcactttgggaggccaaggtaggtggatcatttgaggtcaggagtttgagaccagcctggccaacatggtgaaacctggtctctgctaaaaatacaaaaactagctgggcatggtggcacatgcctgtaatcccagctactcaggaggctgaggcaggagaatcgcttgaacctgggaggcagaggttgcagtgagctgagatcatgccactgcactctagcctggatgacagagcaagactccatctcaaaaaaagaataaaaatctaaaaataagaataagaggttgtgatcagagaatgagatgtttgaacttgagattttagaggtaggatcatccagagtatgatgatagtggtgggtgactacagcagtgaagtaaaaggacattaataacgaagaaaccaagaaatgcatgattgctgtttagtcctctcagtggtccattgagaaaggactcttaagctgattttacagatgaggaagctgaagtttagaaactaagttataggatgggtgcagtgactcaacgcctgtaatcccagcactttgggaggccaaggcaggtggatcacctgaggtcagaagttcgagactggcctggacaacatggtgaaaccctgtctctactaaaaatacaaaaattagctgggcatggtgtcacacacctgtagtcccagctactcaggaggctgaggcaggagaatcacttgaacctgggaggcagaggttgcaatgagccgagattgcgtcactgcactccagcctgggcaacagagcaagactgtctcaaaaaaaaaaaaagaaagaaaagaaaagaaactgagttatatagcgtattgaaggtgacacagaaagccagtgcttaaatccattcttctctgatactctggccattttaaaatcagtcagttgtattatggaagcaataaatgttcattgataattaggttttctctttctgttttgagacagggtttcactctgtcacccatggttgagtacagtgggacgatcttggctcattgtatcctctgcctcctgggctccagtgatcctcccaccttagccccccaagtagctgggactacaggcacatgccaccacgcctggctaatttgtgtatttttactagaggcaaggtttcaccgtgttgcccaggctggtctcaaactcctggtctcaagttatccatctgctctggcctcctaaagtgctgagattacaagcgtgagccacttcgcctggccgataattagttcttcactgacttaaagagatgaatatatttgggttaacgtataagaattacatgagaatgattcaaattccctacaattagtttaaatttgagatactaagaaaatagagtttttatttttattcatttataccaaaatgagttattgaaataaatttaatgctgttatcattaaagaccaatttttccaggtattgtcctagttactagggctacaaaaggtgaattaagtttggtgttaattgagaagctccttagatttcacacttctagagaagtttagtatagtccagcattatagtacggagamcacactagattcgagttacagatatagcgtctttcaagwatatatatatatatatatatatatatatatatatatatatatatatatatagttgtgcctctgtatctatgggttctgtatccatggcttcaacaaactgctgaccaaaaatatatttttaattggatgtataccaaacatgtacatattttttccctattataatctagagatgatttaaagtatattggaagacttctacattgtattgtgtattataggtaatccagagaggatttaaagtttgtgggaggatatgcttagattttatgcaaatacgatgccattttatatcaggaactgagcatctgyagatttttatttctgatggaggtcctggaaccagtcttccatggatatggagggacaatcccattctagatctaccgaattaaaattaatggaggttaaacctaggaatctatgttttcttaaacatcccttagagattcttattatctgccaggttctgcaaatagtgggctacatcagcagtccccagcctttttggcatcaaggaccggttttgtggaacacaatttttccacagacccagggtggagagttggggggatggttttgggattaaactgttccacctcagatcatcaggcattagattctcataaggagtgtgcaacttagatccaagaatctaatgtttctgctgatctaacacgaggtagagctcacgcggtaaggcttcctcatgcagtaaggcttgcttgccccatgctcacctcctgctgtgcagcccagttcctaacaaggcacagactggtagggtcagggacccttgggctagatgacttattgaagtcctttgcaaaactttgaaagtatttcctattttagttctgacagaaagggttgtaataaagtatttttatgacttcatagaagccataaaaattattttaatagtttctttaatataatttaggaaattcaccaggagaatcaattaccaccaaagtggaaacaaatcagaccaggggttctttgtctcctgagccaacccacttgctctcctcactctcctcatttcagcccaaaatatttacacaactacaggtaggtatccagtaaaatatccaaatttgaggtccttctctttattcctccatttacctcttcttctcctagggattttagagaattgttacagaattataataatgatgaaatatgttttcattgttaatttcctgatctttttgtttcttgatttaagataattcaaacagtatgttttttaaaagtttaaagttgactatgaatgcagtaaatttagttgtactacttttcccttgattcttgtttctttcttcatttaataattatttttaaccatactctttttatttgttcggattttttgtcaaaagaattgtatatcctatgagaatatcatacataggaaattcaaacattttgatgtactctttttggtttaaaagggtttgcagttacaaccaaggtacacctctcctgatgaatcaccagctgtggtatcagtaaataaccagccgtcctctagtccttcaggacttctggatacaataggaagtgctgtaatgaataataattctctactgcttggtcaaagtcatagccttcaaagagatacatgcttaacccaaaacaatagtactgcctccaccatgggtaaccttccagaaccagatcaaaatctagttgcaatggacgagctggtagaagttggagatgttgaggatacagggaatctggaaggaactgttcatcggattctgttgggagatgtgcagactattccaatacagattatagacaaccactcagctcttagtaagttgaaatcaatttatgatgttattgttgtaacctttgtggattatcatcactatattatactatagataaaactattatttctacccagtgggtctatgatattatgtaaatgaagcaaaattatgagagagaaggaggagatttcattaccctgcgtttcagaacttttaaccttaaattttcttcttcttatttctaattatttagtaccgtagaaattacttattccctaattacctgttttccatggaaaatctgtggtaatgtgaaaccaggaaggtcattttagagtacatgaaaaaattaataggaaaaaattaaacaaggaaaaatattttcatgcaaaggttattatggaagaattgatgtatgcacacatacacaaagaaaaatgaaagaagtaggcatatatgaaggttaaaaggaagattttcatttttggttttttgttgttttgagacagagtctcattctgtcacccaggctggagtacaatgatgcaatcacaggtcactgcagccttgacctccttggttcaagcgatcttcccacctcagcttcccaagtagctgggaccacaggcacatgccaccatactgggcaaattctttaattttttttttttaaaccagcctgttgcgcaggctggtcttgaactcctgggctcaagcaatcctcccacctcagcctcccactcctcacgcagtgagccactgcacctggccaaaaggaagatttggaattacaaaataaatgttgagttgaaagggaactagtaagacttgggcatttaggtttagcccaagaccttcttaccttcactttattactaatctctgtcaacatagaagtaaactctgttaactcctactttatctgttacttctttgcacatgaattgttctggattgggcacttttgtgggaaaagatttgcagtttgctttgaagaacaaaagttttcacagaagttatttttagaatataaaatatttttcccctctcttccagtgtcatgaaatagattaacttttaggatttttctgtttgtttttaaagttgaagaaaatccagaaagtaccatttctgtgagccaagttaaacaagaacccaaagaaccagcattgtctatggaagcaaaaaaaactgtggactataagaaattatctgctacataaattattgaagcttttcagaatttacaactctggtgacttctgatgtcttagaaargaaggtgaatatagtcaaagcgtggcattgagataattggactgaagaccagtttgatgagaagcttttatttaaaactgatatatttgttgccagttccatatttttaccttccttaagagatgttttactcttcttattttgtataatttttatgctctttgattatctaataaggccagtatttcaaaagctgttctgaatttatccacagtaatatagtctgaacacaaatagtttacttaacttatccttggaaatattcaattttggttattacaaaacagaaaagaacaacagcaacaaaaacattgtgtgaatgtatgtttgtatgtgtgtatgtatatcatgaattttttttttaagttctgaaaaagaacttgttctctccttaaagttgtgaagaaattgttaattgccagacaggtaagaaaatgtttataatctatctcattaagaaagatgaagtattagattttacatcataacacaaagtccagcagctacatctgtggaaactgtgcagttgcattttagcctcttcccttccaatttttgtacttttaactacaaaccagtagtatactaatggttatctaatagaaatttaaagtgtcttggtaagtactgagaatttttacttgaattaatcagataagcaacagaaatcaacatatgtagcatggatttgtgctatattggaagtaaaacactataggcagaaagatgtagaaattaagagaattgaaaaagaataatagaattccttggtgtttacagataatttggaaaactttttgatgacagcagaggattttttcccccttattttgtaatgaagatccagcactggttaaaaaataatttgatttgtagttacatttttctatgccagagctcttactgaattgatgatattaggatttctagtattttaaggtaagtatttatagtttaaaatttagtttatatttaaaactttaaaacatctgatctgggatttttttgttaagtaagtatattaacttcaaataccaaattactactaagcagtatattgattataagcatctgttgtctaaagattggtactaggctggacatggtggctcacacctgtaatcacaatactttgggaggctgaggtgggtagataacctgaggtcaggagttcgagaccagcctggccaacgtggtgaaaccctgtttctactaaaaatacaaaaattagctgggtgtggtggtgggcacctgtaatcccagctacttgggaggctaaggcaggagaatcgcttgaacaccggaggcggaggttgcaatgagccgagatcgcgccattgcactccagcctgggtgacaagagaaaaactccatctcaaaaaaaaaaaaaagattggtaaactagaaatatcaactataattgtcaggaaattaacctaaaggcttttgtttctccagagaccatttgtgggtatattttatattttaaaaataaagattttaaatggatatcaatgtttaatattcaaaacatgcacaatataatatcaaatttaaccttaatactttacatgaatatgagtcacttttggcttttctaagtccagcctcccattcttaattgacttggtttcaggtacatgacatgtatctaaatataaagtactgttatagtagaggtaggtggaattctaatattccctgctctttagatttatattttatttaatataaagtttattatttataccctttttaatgcaaagctaatatttagttatatgtatgatttttaataaaaattactttactttttcctatgaatttaaaacatttgatgttggcattttatacaggcaggttgccaaatttaattatgttacactaagttaaacacagcacttaattacctcaaatccagatttctcttaatctgtgtgtacataaaaggaataagtccaaattaatttatagtttagtgttgcactataggtaatattcttttgttatttctagtttttatggaatccttttctttcaagattctaaataataaatcgttacgtctcaatagtggtaatagtggtaatggtttattattagctgtttcaccaattgaactacattcttttggagacattcctttcttttttgatgttgatttgcaaaggagaaatgcttgttaatatacaaactctagtcagttacctgtgaggatgagatgtgtcagaggactcagactttggtatagttagaaaaataatatttttctcacttgattctgtgtgaatgtctcttctgatactgttttttaatcagaaagttacagagcaactttcccacaaacaaaccaataaaacaaaaccccacaaaaaccaagagcatgaagaaaagtttaaatccctaattatatactcttttggtttttaggtagaaactggagctatcaatattttcatgtaagtatttcaaggagtagctctttaaaaatggtttctaaattagattttaaaaattcattgtcatctaaatgcatgtttagtcacaatgtatcagtattgtgtttaaaggtgctcagcatcactttttgaaaactatgtttacatatttaaaatgtttaattattttgaaatgtatagggtattaaatacaagcttctaaaattttcagtatctatattggctttctctaacagctctacagcaaagtttgacatgttttttgtgtgtgtcatgtattgtaagttgtaatatctgtaggagtgagttggacattctaaattagcagtaaaaaattcacaattacagctcagcttgtttattcattatagtttccacatttccaacttccaagtgaactttatatatactacagtgaattatagataaatacagccatggtggacctttccctcaatagtgattttttgtacaaacagttagtataattaaaaggaaaagcttttatattttatgcaaggtaaatgtttcctaaatgtcacaaaagtgatagaaaacatagcttttgggatctggtcctgcattagagtttctaattctgagacccaccagcttgtgtttcatcttctttatatcctgtcagaatacatacttaatcatgtgggtatgagaaagatgttgtttaacttgtaccaggtttaaaaaaagaggtttaaaaaatgtctgtgcgtatatatatatatatatatatatatatatatatatagcaacttgatgtatagtgtccttgttaccatgtatttttttcattaaaaatcctgctttttttttatacttgttagttttctttttatatttttcttagagatagtggcaattttgttcatcttgaagatgctgaataaacacttgaatacccgagaattttggccagagatttatgtccaatttggaacctgaaagttttaagcataactacaagtaactcctgttagcattacattttggggagacatatatgcatttaataccctgcaactcagccaagcatcaacattttaaaacaatgtgtgtaataagtaattctccacgcccacccacccccagccccccgatgttttggcaccatgacattttcaagtatagctttatattttaggagtaatgacaaagtatgtgatcaaaagagaagggattattaattttttccctctttgcttttttttaaactttattccactctgtacctatttttgaggaccttgaaaatcttaatctctccagaagggatactgcattggttcttctccatcagctggcttagacatcaaacatcttaaatgatacactgttttaatatctaaaaatctgtcattctacttaattaacttagtcataaggacaaagccttagtatatttttgccacatacatgttatgtataaattttactgttgaataatacaagtattcattgctgactgaattcttaaaactttgggaatagaaaaaacacatttattaatggatgctaaagtgattcctgagaaaaataatgtgtatggttaatatggaaaacctttggtaatgtgatttgggtataagaatactaaaaccagagtacagggtgtgaatcatgtaccaggagggattttatttttaaatatctttattgaggtataattgaaatacaataaactgtacatatttaaagtacccaatctgataagttttgtcatatgcatacagccatgaaatcatcaccataagcaaggtaatgaacatattcatcactctcaaagtttcatagtacctctttgtgatcccttcttacttaatcctccttgccaccccaccatcaccagaccactgatctgctttctttatgatcagtttgctacaaatgaaatcacataatatgaaccttttttggtctagcttttgtcacttagcatagtaattttgtgatttgtctatattgttgcatttatgaataaatcatttatctgctgctgagtagaactgcattttatgaatatatcaatttgtttattcttttgatgatggacattaatagttctaggctattatgaataaagtttccatgaacatctatgtacaagtctttgtacagacttatgctttcatttctcttgggtaaacatctaggagtagaatgcctgggtcatatgttaggtatatatttaactttttaaccaactgccaaaagattttccaaagtagttgtaacaatttatattcccaccaacagtgtatgaaagttccagcttctctatatcctagccaacacttgttatgaacagtttttaggttttagagattttaataggtgggtagtagtatcttactgtggttttaatttccatttctctaataaccactattgagcatcttttcatgttgtatttgccatctttatctctatatcttctttattgatgtgtctgaatcttttgcccactttttttttttttttttaagaccaggtcttgctctgtcacccaggctggagtgtagtggtgtgatctcaggtcactgcaacctccacctcccaggctcaagcaactctcctgcctcagcctccctagtagataggattacagtcatgcgcaccatgcctggctaattttttgtagagacggggtttcaccatgttacccaggctagtctcaaactcctgggctcaagcaatccacccaccttggcctcccacagtgctgggattacaggcatgagccatcgtgcccagccttgcccacttttatttttgttttcttatttgttttttattctttttttttaaccacagccagcatcatagctcacccacttttaaattgttttcttttttttttttttttttttttttttgagatgcagtttcactcttgtcgcccaggctagtgtgcaatggcatgatcttggctcactgcagcctccaactcccaggttcatacaattctcctgcctcagcctcccgagtagctgggattacaggtgcccaccaccacacctggctaatttttgtattattagtagagacgaggtttcaccatgttggccaggctgctctcgaactcctgatctcaggtgatccactcaccttggccccccaaagtgctgggattacaggcatgtgccaccacacccagctaatttttgtattttttagtagagatggggtttcaccatgttggccaggctggtctccgaactcctgatctcaggtaatctgcccgcctccctaagtgctggtgctgggattacaggcgtgagccaccactcccagctccacctgcactttcaactgactacaaatctgagaggttctcacatccccttttaggtttgataatttgctagaacaactcacagaactcaggaaagtactatacttacaaccacagttttattagaaaggatacaaaccagaaatgaccaaatgaacagatacgtaagatgaggtctgtgagggtcctgaatgcagaacctctgtgccctctcgtagaatcaggacatgttattcacttttcatatcaatgtattcaccaaccaggaagatctactgagtttcatgtccagagttttcagggggttttattacataggcatgattggttcaatcattggcccatgattggactaattcttcagtcctcctgtctttcctggaggacagaaggctgagttgatatcattggctcaaagccccaacccaaccctctaattagatgtttggtctttatagcatgactagctcccatcctgaagctatctagggacccactatgtgtcatctcattgcatatactcaggtgtgattcaaggcgctcatgaataacaaatacactcctagtacttgggaaattccaagattcactatcaggaaccacagataaaggaaagtcaaattatttattatatagcagtgtaatgcatagttttgttgttttaattgtggacacctactttagtctgagatttgttaccatgtcacactatactaggttcatctcatttttcttcaaggctattgtgtgaagtgcaacatgttttatatattaagtgtatcaactctctgttacttttcctggtttgtagtttgccttttaattttgatgacttctgtgcttaaacaattctcctccaactagatagaagataaacatttatctaaaatttcctatagctttcttatgtgttgtttttagtatagtgaaattattttgttgcagaggataagtttaagtagatattttttcaattaaccaactctcccaatatgatgggttttttccccctctcttccaatagaaacctaactcccaacacaatggaatgaatttttcacttttttaattcacctttgaaaggagtaggcaggttgtaaggaattggagattttgtgtcccattttttttagatgaagaggtccaaagtggtaaataattttccccaggtcatctggaaagggcagaattgtctgactccaaagtcttaaaaagacgtttacttagtgtcactattgcgtcacatgtaattacccaatgacttcaaatgtacctgacattatcaaataatttgttctgatatgaaaattgaaaattaaatggaacacagaagaaaatatagttatgacattagacaagacaatgacattaagtttaaatctggatcgccaaacacaaggtaagtttcccttgagttgatcaatttaagttaaatcaagtctctattactgaatcatacaaaaatgaccaaaaatgttcaccaaacttaggggcatatgtttatgatgatccaacttgtagattttgtggttcacatgaaaatccactttaggaagttcaaagagccacatcaaaaagatagccatcttccagagcagctaaaattcag

SEQ ID NO: 5722 - DNA, 17263 bp, Homo sapiens
ttgccctaacttgtcctgtagacaagcaaccacctctctctttattccaagcctgtaaatcagagcatatctgggagggcagctggactctgataagggatgtgatttattttagttacaaataacttggttggcatctctgatatctgtggccaaacctggccaaacctggggagagacaggccagggcagggcagccaagagtccacagcctgccggggatggagagagaagccacccatgcaagagttcacttatgctggccacaggggacaggtagtgtgggagagccacgtatagcttccaaagtcctccagacacataatgaattgaaggagcataagcattggagtctaacatgggaggatgttagataatgcggaaatcccaactccaccactggatcctggggcaagtcatgccatctccacaagtctcgatctctttatctagaaaatggagttaaagagagtgctaggtgtattgggctgttgggaggcttagataagatatcctgtgctacccccggcttcacatctagtatagagtcagtgctcactgagcagtatttcctagagactcaggacttaggaccctgctttacacaggaccatatggtaccacagcagagcatcaggtttttaaaactttggtgctcctgaccatctagcgatgttccaggaggtgctagaagccccaggacaatacagagaatcattgtcgaacaccaacattgctatatggtcaaaaatatatatcattattattgtattaaactcaaattgggtatattgtagagtaatatataaaactgtaatgagtctgtaaggtagtatttaaggtgtgaaacaaatgttgttaccccagtagaccacaccctccccacccactgcagggggtggggttgaggctcccacagtcctcatgatagagatacatgagagaaatgccctgccctaatatcttaacaagtcgcagagaggggaagtcactagtccctctctttcagattttctaaatgatccttagagttcccatctctgagtctatgacaatgagtcaggaaatagttcctgaatgaatggaagggaatctgtcatgaactaagaatttcatgctgtccagcatcccctcctttgtggggaaatttgggaaaaaacaaatggaacattttcctactggctgccagcctcccacacaaggacttgtcaccatgcctttgcagcaagtagatgtccaatgtgtaaatggggaatacctgaattagttgatgctagccccaacagagatgaagctttgcctctttgctccttcacatgggaaaacacagctaaagttctaactcccagcagggggcggagtctctaatgctcaattagagagaagggagcagaaaggtgtgtgccagccctaagacccagggctctcagacgctctcctctttctcaacaccaggcatgcaattcccaagcaaagatcccctcacccagtctatcattgttggacatttgggttggttccaagtctttgctattgtgaataatgccacaataaacatacatgtgcatgtgtctttatagcagcatgatttgtagtcctttgggtatatacccagtaatgggatggctgggtcaaatggtatttctagttctagatccctgaggaatcgccacactgacttccacaatggttgaaccctaaaacttaaagtataataataattaaaaaaaaagatcccctcacccacagagacaaggagatgcatgtgcatgaaggactcatcccccctggcctccaccaagggccactttcttcctcctgcacaagaccccgaattcaagatatctgttccccaactcagagtttctgggtccaatgtcacttaactacatttggccatttctccactttttgctttcccatacaaagactggactcctcctcaaagccttgctcctttccaaagtttcctcgtggttgtccagagtccaccactccccagaatggggcaacaagagctcctttccttcccctttcctccttctccccttcgccacccacaccatgcccagccccaagccctctgacaaagtcatgtctcctttccaagtcccagttcctgccaaacaactttacaagcacatgaaagcgagggccggggcagttattgctactggcacttcattgtacttcctctaaatgatgctgcgcaaaggggccgtggaaacacggggcaggagggagactgcgggtctctgggagaacctcaagggttaggacagtgccaaatatttggaagtggggccttttagaaggaacggggagacaggttggaaggagtcaggagtcagaatgcccaaagacaaagcagaagatggcactggtaggtaacatacaaataaacttccctagagactatagggaaaccaccagggccctcttctttcaggccaggcccagggctctccctgatctccagcttgactcttctctcccatcctgaatgtttccacttttcaagggcttatttgagctccagtcccttttggaactttccctaaggcctagagtccaccaaaatccttccctccctgaaatccttccaagttcgtccatcttatacagtctaacatattctaagcctaggctttggagctcagtggagctgggtttccatccagcactgctcctggctatgtgaatgccagcaagtcacttaacgtctctaagcatcagttttcctcctgtcaaacaggcctgataacaggaagcttcttactaggccattgtgagggtagaatgagataacacatggaaaatatttaacataatgcctggcacagtgaaaatatacagtaaatggtagctagcactgtattcatttttttttttttaacagagtcacgctttgtcacccaggctggagtgcaatggcataatcttggttcactgcaaccttcacctcctaggttcaagcaattctcctgcctcagcgtcccaagcagctgggactacaggtgtgcaccaccacaccctgctaatttttgtattttttgtaaagatggggtttcaccatgttggccaaggctggtctcaaactcctgaccttgggtaatttgctgcctcagcctcccaaagtcctaggattacaggcatgggccaccatgacaggctgtgttgttgctatcattattattattatttcagcttcagtagtataaatcctagatccccaaatccccacctagcaaagacctctcactcacacagaaagggagatgcatatgcacagagaactcatcctgcctagcctccacctagggtcactttcttcctactgcagaaagtaggaagatagagaaagcagaaagtaattcaagatactttatactgggtactcaatctaaactacctgggtgagactgtgtgtttcaatttctcagtactcccgtggaactgggttaataaatatttgctgagtagaatttactgcatgcaggctgagctgtcttaatgacccagctggcacttcttaaaagaaagattaattttggccagcgataagcaaatcggccatgtaattatctgtacatacatagacaaagaaagagaatgcttggagttgagccgtgctagaatataccttacacgcagcccctcccctccatagccaccacaaagcactgaccctgtttggatgagatattggagccctagctccagggtccctgatgttgccctggtatcaaggctcttctctctgctctgaggctgccaggcagggaatatgagccaccttactgttgagatttccccacactgattggcagaagcaggaggtggtgaggaccaagcagctggtccagtggttgcctctcatattcatgctccctatcccaggctggaatctcatggagacccaagacctcaccgcagagctggttcaagcttccacagcgctaaggtggcagtgacactgcggactgtaagctttggaacaaggctcagtggggagctgggagaacccaggacccctttctggaaaacccattgccagctagtctcacacttggaattgtgatcccttctgtgaccaccttgataacagccactcgccctgttccagccccagtctctgccccgcccagctctgccctgcctagacacagcccggtggggcttggcgagcccttgggcacaggagcctgttagtccagacaacgactgtgcgcatccgggagaacggttactttctgccatgtgctgcagctctagcgacctcgcccaaaactgcgcgccggcagcctgcccaacaaactttcttctctttctctttttctttcaaccaaatggtgcttccacagacacattctccaacggtttagcgcaaatcccagccctgctttccggagcccaatgcacttcgcagacagctcacttgactccagtcccccagggccgactcagccggaggggctgccgccgggtccgcgctgagcaccccgcacccatcttgctgcccaggctgcggcgggcactcaccgatctgcgccaggctcagcggcacgaggcagagtccccaggctgcgtgccaccaaaacttgtccatggtgtccggagcgaacggagggcgcgggcgaaaggagctggaggatccctgggcgcggggcaggggccggcggaggacgggacgaggatggcggaccgaacctggcagaggctggggtccgctgggcaatgaggctgcctcggaagttggctgcagtttttattcgaggttgaaaacagtgacctaagacggagggagggagcgagcgaaggacacacccaagcaaggggggctgtgactaagcagcccgcagaggttttaagaagtagcagccctcccgggcgggcccctctgcccccgccccgtgctctgctgaggctgtaaataatcggggctgccagggacgtgggtcggggaacctggagtgtcgcggggtgcctgtgcctccgagccccactggcccctgcgcccagagacgcactggctttcttctcccgctggccccgcggcgtcaggacagaggatgaccgaaccgtaaaaccttgcaccattgggttcagcctttggcctctcctttcccgctaaatttctctgaatccggctggagcaagatctctgggtttcacaggatgttggatatcctgggagaggagctggagagagggcgaggtcttgccctgggtggcgcagtgcctccgtgcccacagtggggagtgaggggtggggagttggtgaatcttccaagtggaaagagggagagctcattctttttcccctcaataacaagtccacatggcttgaatgaattttagcttcttggcagaacagctcagggaaagctactgatggcctgtcatagggctggcatttggctcagctaacccatgtgttcaagccagtgtgaatgggcacctctctccacacacatgctcattcatcctcctaaatatccttccatccgcccatccatctatccacccatctttccttatgtccttctggggctctcacatccatccatcctcctgtccatccactaaccacttaggtccatctatcatcccactcattcattcatccaaccacacaccttttaatttattcaaccacctattcttctattcatcttcccatacaacttctcatccatcattccacacttcctttttcacatctcttcataaaaccacaaccatccaccatcctcttctccacccatccacccacatatctgtttattgatatatccactcatttcccatctgtccaagatcaacatatccacctatcattttatccattctctcatccacccatacgttcatctattatttttgcccccattatcctcctttctgtgtaaacattaattcattttctcccatctttcctacccagcagatcttaaagagaggaagagtttgtaatattcttcaggggaagccttttgagattgaaatatcatactttgaatgataactctatatctatctataatatactatggtttaatgtttggaaatcaaacgcagtatttatttgtcatgtgaactactaaaagtaaatctgcatggacttcttgcctggtgagttacacagaaaatgaaagtgattatcagtggctgtggcaagatgaaaggaaccaygccaggacttctgagggaaggtaagattttgttatttatttcaagaaattgaaaagttgagagaaatgcacccagccatccccctatgcattcattcatcagacatgtaatgagtgttgtggggtatcgaggtaaataagacctggcgctatcttcagagccctcaccctctggtacggaataaaactcacaagcaggccattaccatgcaaggtgaaatatgctgcaaaatgtgtgtgtttggggtgctaccattcctagagaagggagtcacactctctcctggagaacaccaggcagtcttcacaggggaagtgatatttgaggcaggcctcaaaggaaaaggaggaggaattcttcagatgaaactacagggacaagtaagtcatccacaggcagtacagtgtagtgacgaacagcatggattcaggagctagaacacctagatccaaaccctattatggctgcttcttagttgtgtgaccttgcctaaggcaattagctcaatttgctcaagtataaaatgggcttaataatagtatctattattactattacaattctattacttcatagaattggtgaggattaaatgactcaaaagccctgcatgtattaagccgtagatttatgtctacatatgcatgcagtaagcactttaaataagtgtttgctatcattactaaaagcaaaattgtgtttgagcatagaaaagtgaaagaacatggcttgtccagagaatagagagcaatgtgagctgatctgaacatagatcagatgaaggggctgggggaagatagcagacatgaggttacaggtatggggactacaaggtgtaagctatgccagggagtttgaacttgrccctgtaggaaataaggaggcaacgtacttagttaaaattattatcattgttatgttaaaatatgcataacataaaatttaccatttcacccatttaaaagtgtttatagcagtgacgtgtagtactttaacaatattgtgcaaccactaccactgtctagtccggtataaatttttcagttgtggagattctgtttgactaaagactactcctcttgcattttcaggaagagtgtttgggactgaaaaatccttgtctggatctagtcctcagccactcagaagctggcatgccatgactcaaagagcyrcccgtctggaatgaagacagtgacccgtaactcccacctgaagagcaggtgcttggaaaatgctgccagtccgcaggaaaaagttgttactgctgctgtctgtgaccaagaggacactttatttcttgaaacaactgggggcaaactggctcycagataaggcttcagtccctactcatgtgaggaaaccagccctggtaggttccatgcacaagaatacaggacaaggagcagcttttttcacctcatgcaacctccagggatttcagcttccttttcttggagcaagaaagtgaagtgacgtggggagtcactaggaacaatgtctgtcttactgtgtttcatggaacctggaggttccttagagacccctcagaagcagacctagtggtcagagtaaaagctgaggagtaagctgtgcctctccctccccaggmcccatcccaaccacagaagttccacttgcatcagttttatataccagactattgcatgaaattacattttgacagatgattattcttaaaaaatatataaaaaccaacaaactaggccatatcaagtcctggtcccttctccattagtgcagtaaacaattccaccaaggaaaatataggtgtgaaagtgctttgcaaactgtagaagggcatgcaaattctaggggctgtaattaggattattctccccagaagcggggattattttgtttgcttgcttcccgatagtttggtgagggactgaggtcatttgcccccataccacaaatgactcatttcaaataacagacctggtgacttactgagtcaaggtccacctttgggaattcctggatcacctctttgagctcccctctcatccactttccattctaaagacaccctgcccacaccactggtcacacaaacccttcccaaactcttagatgcttgatatctgttgtgtgttgcaccatctttctttctaagccaaaccatgggatgtgggaaactggaaaggaaacttgaattgatttgagttgacacgagattacactatttgggaagaatccagaattcaatcagcagccttggaccragaaagtccaggtctgagcattggctttcccccttatcagaggatgacttaacctctgggagtttcggtaatcccagccacaaaacaagggtaatcagacctttcccatagtttattatgagtagtcagtgaaagaagacatcaagaccatttcctggtgtgcctgcctcatggtgggactcaatgacctctaagctacctgagaacagggacatgtccttctggggtgccagcacatactcagctctcagtccctaacatatacactgtgctccataaataagcattacataaatgtatgagggactgttattttttttccctcccatcaaagcgcataggggtgtttcaggaatcacatgaactggtgggaggaaacacatagacaacttgacagtttctaaataaatgcaagcagtgacatcctatttggggtgactggttcagggagacttgagtgcaaacagagcattactcactctggcagactagggttctttgctgaaatattggggmctgatggcttctgactggtagtaataaatcctgttcctctcgagcaaagaaaagccaaatctaaaccaaatgtgagcaggagtgtgaaatggaaagctgggagatcttgggctgaatcatggaattcaaggattacaaatgcagcaggtcacagactcttttaaagggacaatatttaattatttcacgggacagcttcccagaaaaggaatgatctggcacagtaaagaaaaaatgacattccagttaaaccttaactcttaaaaaaattcatccttagttcatattcacagtgtgaattctacacatataaatgagcagtggtgaaaaaagctcttgcgaaataattattagtaaagtctaaataaaccagtagctgggaagcaatcttcatgaaaaataaataacctctaaggattagtctcaagctaaccaaatgtgattatagagctgagcctttaggattaataaggctttcaaattatggtaaataaagaaattggtgtggctgctgcaccctggaagtcccaaggggagagatgcaactggattttttagatagatccatgttagccacaaaatgggttttacgcagacctttggaggttaaaatagtatgcagataggacaattcctagacttggatgataacaaacttagaaatgtgaatttttgacgatgaaatttgaattaatggtatgtggctttatgtagcaagctaactggaaggaacacaagcaaaacagtctatattttatgcactattayttaagggaatgtaattatatttatttttaattatatttattttatgttcatgtagtaactaaaattcatatttattcctcttctctccacttcatacaaagtggttaaacatctattggaaggctttaggaatctgttttgatgaacatttaagcatgatttgttttggacatatccatggttggtatgtaaatggtaactaagagccttgtaattatctaaaaattgcttgttctctgcactcatttactatgtgactactatgtgctgagaacaatttatacattcttggttctgtcataattaatcatcaccactccttcactgccactattgccatcatcaccactaccacctccaccatcaccactgccactatcatcaccacgatcatcaccaccaccactaccattatccaccatcaccactagagttattactaccatcactacaaccaacattatcttcaacatcatagctaatagccagtactttctacatgtcaagcctaatgtcatttaattgtcacaacaatcctatgaaaagttaatttctattttacagataaggaaacaaagtcttagagaggttacaaaacttgtccaaagtcacatttttatttcacttagcaaatctttcctggctttaagagatatggggatagaaaagtttaatccctttttgattcttgatgtagcaaaaatgctaaattaatggagtcctaattcatyagtctttactaaattttattctgaatcatggaaatcagtttcttttaagaaggaagatttcctttggaagcttttgttggagtggaggaggtgaaaagagtattgctaaggtagagaatggagaatgttgactctcacagccctctgacaaattagaatcctagaataagacaactttaaatgtgtagactcggacygtggctattcaatggacaattttagatttgcataggactatgccttgattccttagagtatcattgtgagatggttgtatattctgactagaaataacaccattttctctttrcagcacctgagartttattcagtgacgataatactcacaagaccctttttggatttgtggcccamcccacaagttatagttccttctctgaatatttcatccagattgtgaagagcagcttctggcagccacagttgtactatgtgacccctacttcccatgcccaggactgattcgaccccgtagtagacacctaaagcaatcctgatcagtcagagtctttgttcctgacatttgggattagagcatggctgaaggtttaagacacaaacttggaagctgtggggcagcaatacacctccatgaggacagagaagcaggggaaataagaataaaccagaagctcacagaaacgcaggaaatacttctagagttctaacacttttcgggtttcttgttctagtccattcttgacacacttgtgcctcacagaagccaatggcaagaatgcagtcagatccttccaataaattccttttattctgtttacattagcataagctggtttccgttgcaaccaaaaagacttgatgaatataggagagcatcacaccattttacaaaagagtaaacagtggctcaagtggatggcggatgcccctaccactgggtcttgaattcaggactttgactctaaatcttaggtcttctgattctgaggtctgtgctcttttcaccagttggcctcacctataatccctccccacatcatcccattctacccaaagaatacagttctctctccttcgttgtgatagaaactagacatctctgatactttgcctacagttgtatgtcaatccaaatgagtggcaggtcttccgagtcccatcctcccagatcttctccagagagcccctgtctgcctgaacatgcctcacagtctattttcaaagggcaaaacctttcatctggcagatggtaacagctgcttctctttaaaacacccaaagggtagaaattctgggctctaacgtacaggcataaggctcctgccaagtcctgactgggcttagcatcaaatcctgtagaaaaggaataggtacagaacatggatgtgaggccaggccaaaacgcattttattgctggctactgtttcccagccacagaagaatgctgctgtagaaggcatggcgtgggtgagaaagagacttgttgaactgaactttaatgggagaggatgtggggagggtgggctagggagagagaaaggaagagacgtcttgagagagcttatgaaggtgaaagaaggcaaaagacacagatgtgactccatgatgaagcaatggaaaataaaagtcttttaatcatccaatgggaatttaatggacaccttctgtatgcactacatggattcgccacagaggacaagccacagatgaggaggacctgccctctctcttcagagactatgatctagatcagagttggcagatcagttgccttcattagtttaagaactattttgtatgcacctctatattccaggcactactctaaattccaaaaatacaacagcacaaaaagacagactggcattttattatcatcgaggaagtgggtggagggtgcaggcaattttaataaggtagactaggaaggtctgggtgaagaggtaacatttcaggcaaatttacatgaaaaaaaaagtgcaaagcaaatgtaaaggctttgagattggagtatttttagtgtgtttgaggaaccaaaaaggttaatgtggatggagcagagtgaatgagaaagcaagtagtaggaaatgagattgaagaggaaggtaaagccagctcttgtgcacccttgcaggccccagtaagaagtttggattttatgccgagtggaatggaatgactttagtgggtttcccctaattttcacctctaatcaattaataatgactgcttagttcactgtgatgagaaagattctgaggctttacagttcaatggataaaagtccattgatggattaataatatacatcatgtctgtagcatgaggcagtggtaacactgatgattaatatttgacatctctgatcatgatggaagattaaattgtatttgtcaaagtactctgagttgtgctgcagtaacaacataagcaaagtctcattggtttcacacaatcacccaggtgacttcttgccatgctaagttggctgtgggttcaggaaactctctaaaacaactgtcttccatgcagttgctcactgatcttgtgctacctctgtctcgtaacacaattgctgcagcagggaaaaagaatagtagaaggcctcatgccagtgattaaatgctttgtctcagaaataatagatgtcacttcttttcccagcccattagctagagttagtcacatgatcccacctaagtgcaagatgactggggaagggtaatccttccatttgcctaaaggtagataagaacccaatgtgagtaagcagtaaaaatctagcatataaatcgaccttagaacaagtccagtaatactctaaggaagcttgtaatgcactgggtaaggagtagtaaataataaagaaattcagaggccaggtgtggtggcttatgcctgtaatctcagcactttggcaggttgaggcaggcagatcatgaggtcaggagatggagaccatcctggctaacacggtgaaaccccgtctctactaaaaatacaaaaaaaattagctgggcatggtggtgggtgcctgtagtcccagctactcaggaggctgaggtaggagaatggtgtaaacccaggaggcggagcttgcagtgagcagagatagcaccactgcactccagcctgggcaacagtgcaagactctgactcaaaaaaaaaaagagaaaaaaagaaattcagagtggtgataccaacatgtgtagctcaaaaagtctctatagagaggaagggtactcgggccagatcttgatggatgagcagcgtcctgttactcaatcctcaccatctgatgcccaataaacgccccactttccctggctcaatcccatccactattctgcaagtcactttaactgactctttagtcttattattttggatgtaagatgatatgctgttgaagagcattgtttatttgctgtggaattttgggcactgtactcaacctctttgagcttaagatccccatttaatgcttgatataattatcatgaaaattaaagtatataatgtaatcatgcatctattcaacttatcgaagagtttagaatatggcagggtctaaaaaacagtcattgttattattgactcacccttccttaaaattatattttcccttgtctttatagatacagctatagcctatctttcattctgcctttcagattaatttatctttctgtgttttgggtccaatttcagctacgaggtaaaacggcttaaacacatacacatttatcctgtggttacctaatacttgtaagggtttctggttagataggatggtgaagagggataaacaattcaggctgatagagactctccaattttcttttttttttcttttttttctttttttttttgagacggagtctgagtctggctctgtcgcccaggctggagtgcagtggtacaatctcggctcactgcaagctccgcctcccaggttcatgccattctcctgcctcagcctcctgagtagctgggactacaggcacctgacactacgccgggctaattttttgtatttttagtacagacggggtttcaccgtgttagccaggatggtctcgatctcctgacctcgtgatccgcccgcctcggcctcccaaagtgctgcaatacaggcgtgagccaccgtgcccggccaaactctgcaattttcaatacatgacttccgagttcactgaggtcacttccattcagttggtggaaggaaaaagagtatggaggagaattgtttgtgaggtttttatgggctagacctgatagtgggaccctcacttccatccacattccattggccagaacccagtcgcgttgcctcacctaactgcaaggaaagctggaaaggttatgtggtccagttgtgagtccagaggaaagagaagaacgtggagttcaggaagctgttgtctttgctacacttctctctccatcccttgctcctcctctgagtcttttcccctgtttcttcttctaatggggggttgtgcatgttgatgtcttggtctgtactcatttcttcacttatttcctaggtccactgcacctgtcacaccacaaacaatgataaaaacggagacacctgggtgagcctcactcactgcgcatgcctccatcttcgaagagctcctgttcactgtactctgaaatagactgtgcaaaacattaaaactgaccaaatcaataaggtcttgttttcaacatctctatgtttatctatgaataggaaagggactgacgtgaggtgggaccattggtgattttgttctgaaataagtgaaagtttaatggaaagatacatatggcacaaaaggaagataaaattttttttcttttagaaaaaaagaaaaaaaaacacctctttttcttttctttttgagttggagtttcgctcttgttgcccaggctggagtgcaatggcgtgatcttggctcaccgcaacctccacctcctgggttcaagcgattttcctgcctcagcctcctgagtagctgagattacagacatgcaccaccacgcctggctaattttttgtatttttagtagagacagggtttctccattttggtcaggctggtctcaaactcccaacctcaggagatctgccagcctcggcttcccgaagtgctgggattacaggcatgagcaaccgcgtccggccaaaaacaacctttaattatggaaaatttcaatcataaatacatacaggtaaagagaaaattataatgaatttccacacagccattacccagcttctacaattatccactcatagcccttgttatctgtctgtacctcctacctcctccccaactgctggattattttgaaacaaattccaaacatcatatacacttatctgtaaatattcagtatgtatctctaaaagataagggcttttaaacccttatttaaccacaatactattattacattattggtaattttaaactctttctactagtggctttgtacatgtattataaaaatatgtatattacttttgaattgagcaatattattttaaaaacattaagattcagtaaacatcacacacacacacacacacacacacacacacatgttgagtggctctgagatcacctctatggaaacacccttgtcctgaggacagttttcaacacatgctaggtggactcgatacatctgcattagaagtgaaaaggaagcctctcatgctcacactagtcctgtgggaaatgggggctggggatctggcccaatcttacacccagcccacagcacaagcatagtgagtggtcccaacaggggactctgaatgacactgacaaagacgagaaagcaggaggcaaggcaccctatggtgtccttcagagaaggtccttctggcccctcgtctgccagccagctgatgccccaaagtctaccatctgagcatttaaagtctgatcagtccctttgcctttgggtcaatgagtttagatgatctttcctccccaggatgtttgacccagggtcgtagatgtgggtgagggcatgagaactctgagcactcagaaaaaaaaacaagggaaaacccagaaacacccagctggctttagccccagttatgcctaagtctgactttctcagaagtaaccaatgtcctctgtcccagtccagatggagctataccaatggtggttgctggtactctccaagtcattgcttgcccttgttcatggatggaaaacttcctccattctcacctagtgttgtgggtcaggggacatccagcatgggggagtcatgtctccacagacaaaccaaccaacaacaacatttccgttgcttcgcccaatggagaagccgcccctcatccagtgaacagtgcctgctccccaaatcattgcattcaacaggtgcctcctgctttctccaggatgcagaagaatgatgacgattctaccaatttcccagatatttttaacctttctcaacctccccatcctttttgtcttcttttaatttctgtttttctcccactttttctccccttctctttttctctgtcctcctcactttctcattttgcatcctctccttattttcccttcattcctatctcttgccctagttcccctcccaccagtcaaatatatgactgttttggggagttttttggtttaatttcactctttcttccccaccttggtcttgctgctgcctgccacctcctcagactgggtttgtccctttttcttcccccacccacagagtgtcagctcctagtggcctgattcagaccttttatattaggttggtgcaaaagtaattgcagtttt

SEQ ID NO: 5723 - DNA, 25257 bp, Homo sapiens
gagctgctggcccatgtacaggggatggagagggtgggccagcgcccaccagtcagggctggctgactggggttctttgtgaaccttcagggtctcccaagctggaaacctgggggtcggccttgctcccctcactccatggccagccgctgcatcatcccctgccctgggccacctgccctggacgtgggccacagtgccagagagagggacccttgcaggtacagctcagaatctccctcctacccagacacccccaggttctgtactgccccgggactggtgccctgcccatccgcagcccggatgctccctcctccctcccagcatcccctgtggcagtggccatgcctgcccccagagcagctcaggctcccctttcatctctccaagccttagcccctgcagccctccgcctggagtgtttgcctccccctcgctgctgctcagggtctccctctgcccccaggctccctccccagcccctgagtttctcctctcactgtgcttccccagccctgagtgcttaggggtctgggtggcatgtgtggcatttaaccccatgctctctgctgagccctgagctcccagagttccctccagccctggccctggggagggggtagcatgtgaccaggagggcggaggggcttgtgtgtgtttctgagacgcagtctgagagagacacgggtgacagacagttggggaccccaaacactggggagcagagatagacaggaggggcccgcagtgagacacagaggtgagcaggagaggacacatagccctggagaaaaggagcaggtgtgggcgggcttccctccactgcagtcacagttccctcactcataggcagatcttcctgggtcctccctgcacaaagccccagtggctccctcgtgtcccccagccacagtccaagctccctaatgtgctagataaggccccagtccagcctttcggtcccagcactccctggacttcctgtttgggcctccaagcctttgctcccctttggccttcacccccatctgctccctagacctcagtccatctggcaaacacttcaccatcgccctctccatgaagccttccggcccaccttccaggatgacgtgagctggtgcccttgctgcgaggctgtcttcccccatcagcacaagtgtgagattccctcagggcagacccacatgctacttgggcctggtacaagtgtctgatgtcaggctgggcactgtggcttcacacctataatcccagcactttgggaggccgaggagggcggatcacctgaggtcaggagttcgagaccagcctggccaaatggtgaaaccccacctctactaaaaatacaaaaattagccgggcatggtggtgcatgcctgtaatcccagttactcgggaggctgaggcaggagaatcgcttgaatctgggaggcagaggttgcagtgagccgagattgcaccactgcacagagccagactctttttcaaaaaaaaaaaaaaaaaaagcaggtgtctgatatccccaaccagctctgtccaggaagggcaggaagagaggaggagacaggtgggttgggggagatggcaggggagcactcggggtcatggagaggctttggctagacggagcagaggaaccactcagggtctgtgtcctggctgcggggtccatccccctccctacccaagaggaggctctggtctgcccccagacacctcccagcacccagcagagggcccacccaggcggtgctggttgaggggctgaattggggaaccacaggtagaaagagaggccaggccgggtgcggtggctcacgcctgtaatcctagcactttgggaggccgaggcaggtggatcacgaggtcaggagttcaaaaccagtctgaccaagatggtgaaaccccgtctctactaaaaatacaaaaattagccgggcgtggcagtgggcgcctacaatctcagctactcgggaggctgaggcagagaattgtttgaacccgggaggcagagcttgcagtgagccgagatagcgccattgcactccagcctgggcgacagagcgagactccgtctcaaaaaaaaaaaaagaaaagaaaggggggccccaggcgagctcggtcccacccagcaggcgggggcggggcagggcagagtgctccccccgccccccgcttcctccccgagggccccggagcccagctcagcctcagtccccgcagcttgtgcggcggcgtcggcaccatgaggcgagggccccggagcctgcggggcagggacgcgccagcccccacgccctgcgtcccggccgagtgcttcgacctgctggtccgccactgcgtggcctgcgggctcctgcgcacgccgcggccgaaaccgggtaagggggacccacggggcgcgcggcgccggcagctgcggggagaacggggccccgatcgccagggcgcaggcagagccccgacccccgggggcgccgagggctgaaaggaccctgtgggcagggcctggaggggcccgcgatcaccgcgtggccctcaccgccgcctctctccctccccttgtccaccgccccccggctgtccctcccctccccggccagcctcgcccccctccgcccctccccgtccccgctcctccctcccctcggccccctggcctccctccctgtcccctcccgaagcagccggggccagcagccctgcgcccaggacggcgctgcagccgcaggagtcggtgggcgcgggggccggcgaggcggcgctgcccctgcccgggctgctctttggcgcccccgcgctgctgggcctggcactggtcctggcgctggtcctggtgggtctggtgagctggaggcggcgacagcggcggcttcgcggcgcgtcctccgcagaggcccccgacggagacaaggacggtgagttccgtgtgtaggggaaccagtctgagcggggcgcaggggctggggtgtcgggacggtctagggggagatgcatggcccctgagggggagagaagggctttaaggggaaacggagacagagtggaaaagagtttgcgctgaggagctcaggctggggagggagacatagtcctgcccctgagaccctggtcggagccaggaacagctctgccctgacagaccccagtgtgaggaagagacaggttgcaggaagggggccccgtctgagggaggagtctgtcctgccctttgggagtctaacggagcttggttcccccataaatccctgaagagtttgccagactgagccccagctccccaactccctgccctgccagctccccactggccaggcctctggactcagggtcagccaggtgccacccctccccaccctgcattgggcttcatttgacggaggactgcccctccagaggagtcttctaggggagggagggaaggctgtgactgagtacggagcctctaccccctctgcctgcagccccagagcccctggacaaggtcatcattctgtctccgggaatctctgatgccacagctcctgcctggcctcctcctggggaagacccaggaaccaccccacctggccacagtgtccctgtgccagccacagagctgggctccactgaactggtgaccaccaagacggccggccctgagcaacaatagcagggagccggcaggaggtggcccctgccctccctctggacccccagccaggggcttggaaatcaaattcagctcttcactccagcatgcacatgccctctttctgggaccaggctaaccctgcagaagcacagacactacagaccacagcattcagcccccatggagtttggtgtgcttgcctttggcttcagacctcaccatctttgacagcccttgaaggtggtagcccagctcctgttcctgtgccttcaaaaggctggggcactatgagtaaaagaccgcttttaaaatggggaaggcaccattaagccaaaatgaatctgaaaaaagaccaagtgggaggatgcctaatttgtagttgggtggttttttgtgtttgtttgattttttttttttttttttttttttttttttgagacgagtcttgctctgtcgccaggctggagtacagtggcgcgatctcgcctcactgtaacctccgactccttggttcaagtgattctcctgcctcagcctcccgaatagctgggattacaggcacgcaccaccacagccagctaatttttgtatttttagtagagacgggatttcaccatgttggccaggatggtctcgatctcctgacctcgtgatccgccctgctcggcctcccaaagtgctgggattacaggcatgagccaccatgcccggccttgttttgtgttttggttttttttgagacagggtcttgctgtatcacgcaggctggagtgcaacgatgggtccccagctaattgcagcctgggctcaagcaatctttctgcttcagcctcctgagtaggtgggactacaggtgctccaccttgcccagctaattttttttttttttttttttttgagacagagtctcgctctgtcgcctaggctggagtgcagtgacgcaatttcggctcacttcaagctccgcctcctgggttcacaccattctcctgcctgagcctcctgagtagctgggactataggcgcccgccatcacgcccggctaattttttttgtatttttagtagagacggggtgtcaccgtattagccaggatggtctcgatctcctgacctcgtgatccgcccgcctcagcctcccaaagtgctaggattacaggcgtgagccaccgtggctggccttttttttttttttaaagacagggtctcggtatgttgcccaggccagtctcaaactcctggcctcaggcagtcctccccgaagggctgggattataggcaggaggcgccgggcctggcctctatttctttaatacctgccctcagagccgtcctgcttttaaactgatgcaaatggcagcagtgaataatcaattcatgggttcgcttgctttgggatttagtacaagattattttaagaaataacaaaggagaaaagattgagctggattttgctgattctcaggtatctgtaccccagggtcaaccctgagattggcccaatctgccagaacctaagatgccattttgaccccagtggcagcttccagagccacaagcctgcatttgggaggaggtgcgcagcctccagggctggactccaaactcgagctgaaggaacatgctggcaggtagctctctcagggtccacctggggttccagctgctccaagacacagcacatttagccataaacatggaagggctgggacctacaggaggctcctttgtgtagaggccagggcaggcgtgtgaccttgaaccaggtggacatgaggtcccttgaactcccttctctctctggcttgttcccctgaagcactggccccccagtgctgggcttatttggccatcctgtgccagccccctggtcacccaccgtcacagtggaagctgctccctcctcttacaatggtgttccttgctctggggtctggggacaagaccatctctttccactcctggacgacactgtgcactcagtcagccgcctcctacctgccctcctgcacagggtcagaacctcctgacctggacttcgccctgggcagcttccttggaacttgttgcagcttagcatctttggaagggagcactggactaggagtcagaaggtggagttctgggtgctgttttcccactcttgggccctgggcatgttctgttctgtgcatcagatgttttctgcctgcctccccctgagctgccaccagagccacctgtagacccctgcttctcctgcccctcctgtcccttgccaggcctctggactcagtgcttcctgtcccaaggacctgttgtgtgcccagcttggaagacagtggccactcacatccaggtctctgcctggctatttgctccatgaacccatctcagatgcccctgcccccagggagccaggtgacagggtgaggtcaagtgacaagcagtaggtgtgggagaggtttggtggggtcaggcccacatgggcccagccatccactccccttccatctggagttgggggagtctgagctgctcctggccaccccatctgccccaccccatcttttcctggccaccccagctcccaccccatcttctcctggccaccccatctcccaccccatcttctcttgacaccccatctcccaccccatcttctcctggccaccccatctcccaccccatcttctcctggccaccccatcttctcctggccaccccatctcccccaccccatcttctcctggacacccccatctcccaccccatcttttgctacagccagggttagctcagcaggtgaaaaccccgagggtgggtgaaacccctctggggctcagacatgcaaaccttgggcatctctctgtcccagctggccccgccagccggtaggaagtttcccctgagttctcagttttttcttctgaaaaatgaggggttgtatgcaaggttctcctcctggcctgtggtccccagagaagggcaggaaggaaccttagataattctcatatgcatttaacagacgaggaaactgagacccagagccgtcacatcaatacctcatttgatcttcataagagcacctggaggaggggggtggggtgtttgtgtttgtttaaatttttttttgtgaaaaaaatgaagataggcattttgtagacaatctggaagttctggaccggaatccatgatgtagtcagggaagaaatgacccgtgtccagtaaccccaggcctcgagtgtgtggtgtatttttctacataattgtaatcattctatacatacaaattcatgtcttgaccatcatattaatatttggtaagtttctctctctttagagactccacaataaagttttcaacatggtaaggttttccacctgggcatttggatactttggtttttgctgttgtggccaagacggcacaggccacatgcgcctgtgcaggagtctctgtttcccagcacagttgttgcgccaaaggccttgactttttttttttttttttgagatggagtttcactcttgttgcccaggctggagtgcaatggtgcaatctcggctcaccgtaggctcctcctcccaggttcaagcgattctcctgcctcagcctcccgagtagctgggattacaggcatgcactaccacactcagctaattttgtacttttagtagagatgaggtttctccatgttggccaggctggtctcaaactcccgacctcaggtgatctgcccgccttggcctcccaaagtgctgggattacaggcatgagccaccgcgcccagccagccttgacctttttgttttgtttttttttttgagacggagtctcgctctgtcgcccaggttggggtgcagtggtgcaatctcggctcactgcaaactctgcctcccgggttcacgccattctcctgcctcagcctcctgagtagctgggactacaggcgcccgccaccacgcctggctaatttttttgtatttttagtagagacagggtttcaccatattagccaggatggtctcgatctcctgacctcatgatccgtccacctcggcctcccaaagtgctgggattacaggcgtgagccatcgtgcccggcccagccttgacctttttaaaggtccctgttggtccaaattttctcctgaaaatctagaccatttcacatccatgaggagggattatatggtccagtttgcagataggaaaagagaggccctgtgaggtaatgggatccggcccaagatacaacaggtgggtggtggagctgggcgaaccctgggctcctgcgcttggcggccatgcctgcccagcagaatgtcattggcccggaccccctccttgggagcggagaactcggggactgatgccaggccccactccctggtttcatcactactcagattttctccccaactgttctctcattttgataagagggatcccagacagactctggaagcgccgttttgcgggtgggaactgaagggaaaagkcctctctctgagcctgtgtttcgggccagcttttcctgaaggagggtctgattcccaccaggtccccagggccctggccggtgggggcaggcctggctgaagtctcgcttcctcctggggcttcctgcaggcccctttcacttcctgcctggtagccagaggctgggggctccaggaggggttgtggaggcccagctggtgaggccagggaggaaggcctgaccccccactttcgtttcagcagggatggctcaacacagcactatccctgcaagctggtagcatctcactgggcctcaactctctgggcccctcttcccatctgcaaaatggggctcttgaggcccacctagctgtccttggagattgaagaggtcctgtggcatgtagggacagagggacccctgctagagccagggaacgcccccagcagggaggtgtgagcaggcctggtcctgccctcatgacccgagggtggggagagaatgggggtgcggtagaaacgactgccccaaatagcggaatagcggggcagagtcggggagcaaccgggaggagagagatgccagagttccccgcccctacgctttcctcccgggactccgaagggcgctcagtggttggcgtgggggacggggggagggacgctactggggtcccgggacccagaggaaccttgggcatctctccactcccctaggctgcggataatctgggatccaggcccgaatccagcgacttcggggcaagcgagtctctgcgcggcttccgccgtcagccccggccaccaccggccccgggagatttggacgtggggcgggggtagggggtgctgccaaggggcggggtcaagaagagaggcggggctgagggacccccaagcctcaaggtggccggaaaggggcggggccagcggcatgcctaaggggtggagtcaaggccaaggggcgaggaaaaagcttgggaccggataaggggcgggaccaaggccaagggcgcctgcttcgggctcccgacctctgcgccctcgggagtccgggtcctcacgcgcatcccgagccctgggggcctggatgcggcccacggccccgactcaagggcgaggctcaggggrgagggcgcaagacgcctccgcacagaactgtgaccgaggagcaggggggctgccggggagggcgcacctgtccccgtgcacgcgctgtggcctccgtggagctctgtcctctcttggttcccgcgctaaggtctcggtgtccgctccggattcgcacgtacactgagggctttggagcctcccagtcccgccgctccctggcgacctcaggagcccgggcgccccctccctcccacgggcagctggagcctgagtcagagttgcctcgcgggagacaaagacagccgtgggccctccctccagaacccctcctggtatcggcatttgcaccagcagggagcccagagtccccaagagcctctgcttcttgggtaactgcatcattgaggaaatggaagtgaaattagcttaggaatgaggccttggaggcttgtgggtggcatccgcggtcacggtcttctcagcctggcttcagtgtctctggggcccactgcttctccctgtaaccctgccgaaatgctggtagcccatcttgcagatgacaaaactgaggcctagaaaggttgaatggccctgaagagcaggaattccaacccggtcagcctggctccaaaataaaggataaaggctgggcgcagtggctcgcacctgtaatcccagcactttgggaagccaaagcgggccgataacttgaagtcaggagttcgagaccagccctgccaacatggtgaaacccccgtctctactaaaaatacaaaaattaggccgggccccgtggctcacgcctgtaatcccagaattttgggaggccgaggcgggcggatcacctgaggtcaggagttcgcgacccgcctgatcaatacggtgaaaccctgtctctactaaaaattacaaaaattagccaggcgtggtggcgtgcacctgtaatctcagcaactccggaggctgaggcaggagaatcgcttgaacctgggaggcggaggttggagtgagccaagatcgcgccactggactccagctgggcgacagtgtgagactccgtctcaaaacaaaacaaaacaaaaattagccaggcatggtggcgggtccttataaatcccagctactcgggaggctgaggcaggagaattggttgaatccaggaggcagaggttgcagtgagccgagatcacaccactgcactccagcctgggcaacacagagagactccgtttcataaataaataaataaaacctagaaactctgggcatgtggggctggaaaggggttccaggaagagagggcagcctgcgtgaccagacagggggcaaatgagcctgggtcaggtgttggcaagggccctgtcgtggggtaggrgtgcctcccgggtgtgctgaactggccagaatgtggattcgggactcatagtgcaggttccaggccagaccctgcccttcctggctgtgtgccagtcacagcaagtcacttcctctctctgagtcttgagtttctctctaggaaatcccaaacctttcccagggctcagcagagctggcagactggtcacccaccacctaaaatggggacactgaggcccagcacaggctgtttgtcatgtccacacctctcagggcccccagccttccccagccagaactgagcaccaggtgagggctggacatggaggaaggccgttcgtgcacaggagcatgtatgctgacaaacacgtgtgcacacacatgcccaccgtgcagggaaggccctcatagtcatgctagccccagacatgcacactcttgctgtcacccaaacacgcgcagacacccgcacactcgagctgccagcattgggagctgggggcggggcgggtgccyttcaggagcagggactcggctcctctgcccgccccgcggggcttgctgcagatgccaggggttattttaagcctggatcaatggatgagttttggtgacacaggcttagtggtagtggaggggggcaggcagaagagataaggggtggctgccctggagccttgatggggtgagagacccyggggtccagggcaaaggggtcactcctcggccgggctgctctatctccagatcccctcacccggcacatggccaggcacctggggcagtgtcagctgaatgggcgatcagatcccaggactcagccagtcagggtcagctgggctctgtgttcacagctgccctctcctgctccactcactccccgcggccaggtgttcccatggagagaagagggtatccagtgcctggcacagacccagtagttatggttacctatggctgctggctgaccactgaatcagattgagacggggaggaaggtgtgtgtgtggtggggggtggggggtggtgttgggggttggacatcagtccctgggaggggctggaatccacttccttcattggacaaatggctgtcactatgtatatgtatgtgaaggcctgatggggtcaacatgaggaaagcacccagtgccaggacggtgggggcaggagggtgtccaggaagggggagcactgggagacttgctctgacccctcactctaacttggaagaggccccagttccaagggggcagagacaagcctctttcaacccagtgcccggcaacgggtgggaaaggtgggagaagaggcccccctcagagctcctgcagcctccagggcagtgggcagagggcggtggggacttcaataccagtgatacgggttgtgccacggattccatttctaggaatggccctaaggaaaggaagcaggaaaggacgctccagaaagtagagctcagaagctctgagaagaatcacaaatgagaaggtttttttttgtttttttttttttktttgtttgtttgtttttttaagacggagtctcaatctgtttcccaggctggagggcaatggtgtgatctcagctcactgcaaactctgcctcccaggttcaagcgattctctggcctcagccttccgagtagctgggattacaggcatatgccaccatgcccagctaatttttgtatttttagtagaggtggggtttcaccatgttggtcagcctagtctccaactcctgaccttgtgatccacctgcctcagcctcccaaagtgttgggattacaggcgtgagccactgcccccagccaaacgaaaagtttaaggatggcaaaaagtaaaccacaaactagttacaatccagcatgtaaatgtggcatattttagtgtggttgtctctggacatgggattaaagcaatttcatttaattcctttgttcatctgtgttttttcttctaaactggtaataaggggtcctttaatgagggtgggttttcggggctggatgggaagtgtgtgtacatgtgtgtgcacatgtgtgtgtgtaggtggagggagcaggctgtctttggccagggcacaaggagaagctctgagtggggaggtcacctcctcttcctgtctgaacccattaatacctgaaattagtctgtcagcccctcatgtcaggcaacagacttgatcctccttaaaatgtaaatccttcctcttcttctcccccaccttctccactttcataagctggtcccagttgctgagagaaggacggatggaaaggggaccaggagggaccctagggagccccaaatgtttcatctcacagaaactaggcgctggagtcctttcattcatttattcattcagcaaatgccgacagaggcctgagctgcacactgggtgaattgcacgcccagtccttgccctcctgctgtttccgtctggacagagggaggttccatatcgacccctatctcctggaaggggcagattatgagtctgccctccaggaagagtctttgatgttaagatgagatactgaggcagggagaagccaagcaccaggaccttctccagttcaactcaaccccgaaaacaccactgggccgtgctgggaccgggtccgggctccttagggcccccacaccctacccctcggtttgtgaaaggacctgcgggtgggcgcagggcggaggtcttccttttccaggctttccttttccagggcaggggcgagcccagtccccctctcctcacacctggggagggagcagatcgcggaagtgcgtcagccaagccgtgcccatcgacgcagggatggggacatccctggaccccagcccagcgttcgaggggttctggaactgggctcgcgccgtggggtaaatccttggccctctgaagcggcgctgccaggggaagtccttcccatttgacaggtgggaaaatcgaggcgccgagaggggaaggggccctccttatgttatgatcagaacggacagaggggacgggaaggaggtgagagggtggccctgcccgtcccggggcaattccgggctgctttgacctccgcgcctgtaaggtacaggtccccgcacctgtaagacagggacgctctagtcgcgggccctagaactgatccccttcgagcgcccagttccgatgaatgtttcggggcagtctttgtggaggggggttccctgtggggcctcccggctccgcggggcctgctgcctcctctcgcccctcgcggcagccgcgctcctcccccggctctgcctcccttccgccctccctcctctctccctcccccgcccgcccgagcccgcgccgagcccgagcgggagccggagccggagccggagccagagcgcgggctgtactgagagcgcggcgggaaggtagcgcagtcgggcggcccgcggccccggcgcggcctccgctagggccaagacccgcacacctgccgggccggggagaagccgggggccgcgcgcaggcgaggacccgccgcccggcccggggaagatctcaggacgcggaccgggcagctcgggtccgaggtgagcccgggcggaggacgcgcccaccggaggtgcggcctcggagctccagacccagcccactcggggctggggtccccagaggaggccgacggccgaggcggcgtgcgccgggagccagcgcgatccctgcgggagcggaggagccgagccggagggagccgcggcgcccggccatgcaccgggcgcagtagcgggaggcgcgggcccgatggcgcgggccggggcgcggggactgctcggcggccgccgtcctcccggcctccggctcgcgctcgcgcttcggctcgcgttgctgctggcgcggccgccgtcgggccgcgcgggagcccccgaggcgcagggtcccgcggcgcccggcacgacagccccggaggggggcgaccgctgccgcggctactacgacgtgatgggccagtgggacccgcccttcaactgcagctccggagcctacagcttctgctgcggcacgtgcggctaccgcttctgctgccacgacgggccgcggcgcctcgaccagagccgctgttccaactacgacacgccggcctgggtccagacaggccggccgcccgcccgcgcccgcgacaccgcagcgccccgggaccccggccgcgagcgcagccatacggccgtctacgctgtgtgcggcgtcgcagcgctgctggtgctggccggcatcggggcgcgcctgggactggagagggcgcacagcccgcgcgcgcggcgcacagtgaccaggtgagcacgcgccgcccagggacccccgcctgctcctcggactgctctccctgcccgctgatccttcccgccgctctmgaagcgctggttctcccagcaggccccttctctgggttttcctgtctccttctccccccgccgcccccccaacacttcatcagggagacacctgacaccgccctgactccctttgaccttctgcccgtgctgggcgccgcaccgcctttccctgctcgagtctcctctggagggcaggggggtgggggcgggctgggagggggacaggtagccttgcacagagggcaccgggtcactgtccagggtaaggggcgccgctggccagggaggtgaccgggcgtcttgggcacgggaaaggaaggggcgcttggttctctgggtgcccatctcctgcttctccccactcctccctcccctcttccacctcctgcctctcccctgcccccacagctgtgactcaaggctgcccttccctccttgggtttcaaaggcctccccccactcaccccatgccacagctcccaggtgaaggtcagggctccctctgcgtagaaaggggactctggaacacagtcgtgtgttgctgaggccaggacaggtgcttgttgcattctgagcttggtgtgaagtgggcactacagggtccaggtccccttcctcggttggaacgaggactctaggactctatgtgtcctgaccctggaactcccacccacatgccacacgtggcactcacatgcccccagcaacccccatgccctggggcctgtgccctcctcatccacccggtcccagcaccctttgggcctgtgggctgctgacaccgaatgtgacaggctggtatttaaaagtgaccatagagaagccttcataccctggcaggccagatgtggacacttccccctcctgggcctcagaggcagggggtgagggcttccttggcacttcagcacccctcgctcccgaaaccacgtagcccactttctcccagggagctctaagggaagcccgggctggcaccctggcctccaccctcagcttctgcactgccttcaggaggtggagcctcctggcctggcttctggatgctgcaggggtaggggctgggctgcccaaatttgggggtcccccatgatgggtgagggtagcttggaagaggcctggatatgtctttgacaggggcggggaaaaaggaacttagggctgcgatggtgaggggtggctgcagcagcccagctgacatgttcatcctgaactccctgcacctgctggggatggggcagcaggtttggtgatgccgcaggaaagccatgcccacccttgctgtgctgtgtggtgtaggccagtcccttctcctttctgggcttcaggctcccatggccccaactcccttttctctgctggggagacctggaatgggacgtaggcttgtgtgtgggtgtgtcctgagtccctgtcctcccctcgagtctcacccttcattctgctgtgttggggttgaaggccagggaaggcttctcagagggcttgggcggggcatctggaaagagtttgtgcaaaggcccagaggcgtggtggttactcagctgtcagggagacaggagcttgaggtgcttgcccagagatgaggccacagaggtgagcctctggggagagggcagggcaggaaggtcagcccaggcaggtactaggatggtttcagaccctgccaccaaacctgaagccaaacctcggccatccctggtgtcctgcctcctgaatgaccttcacgaatcagccatttgaggctctagccccggaaggagggtcaggctgagtgggagaaaatcatgggttccgggttctgaaggcagctgggctgcagacactgtcacatcacagctgggtgggggctgggtgttgggtccaaggaggtggctgtccaaggtcacacagcctgtgggtcctgggctgccaccagggggtctcccaamatccccattccgtcacccatctgtccttcatgcccgtgatggcagctttatcccaggtcccagcagaagccgcggctgcaggggcagttaggcaggcaggtaaataaggcatcctgggccgggcgcggtggctcacacctgtcatctcagcactttgggaggccgagaccggcggagttggagaccagcctggccaacatggtgaaaccccgtctctactaaaaatacaaaaattagctaggtgtggtggcaggcaccttataatcccagctactagggaagctgaggctggagaatcacttgaaccggggaggtggaggttgcagtgagccaagattgygccattgcactccagcctggacaacagagcgagactctgcttcaaaagataaaaaaattaaaaaaaaggattcctggaggaggccgctgatggggtctgaagaatgagtagcagttttttgggagaagaggcaggaaagcagagaaagctcgcattgggaggggaggctcacctggggaaggtccctgagagtgggctccagggaggggaggggagggaaggggagcctcattagagtttcctgacctgctctgggaagcagctgtcttggggccacaggtgaggctggcagatactgcctgggaggggaaactcgtgcgtgatttcgagcaccggagaggacggcctggagaggccgaaagaactgcccagggccacacggtgagacggtggtggccggggctggcttttgatgaggtgggagacagagggccacccctgactgctgtccccgcagggcgctgacagagcttctgaagcagccgggcccccaggagccactgcctcccaccctgggcccacccctgggtggctgtgtccaggtgcagatgggggacggcctcccccggggctccccccacaacagcgcaggtgagtcggtggcgggcggggctgagcggcggcggagcacgcggaggggcstgagaggccgagaggcggtccctcggctggggcatagaggcttccccggtggaaawgagccgcggcctctgcgggtgaggggcccgaccggccagccagctcgccagggtggaaagggaccccccacgggtcctgcggcctcgagtctggggggctgtgatgtgtgaggaaggttccagatgcaggatttgctggccggggctgtgatctgaggctcgggctccagagcctccccctgggtctctcgagaggcaggcaggcttggcagcccccacgccccgtctgggttctgttcctcagacatcccccgtctcggcgggagcaggtcccaggactccgcgcctggctcgagcgtcgcctccgggcgagccgttcatgagggtggcaccccccgggctggctgccgccgccgctgcgcgtgactcggagccaggccctgttccaggcgctggaggctgcggcgaagacaggcttggctcgcagcctcgcccggagaacggtcccccaggttctcaccgaacggcctcggggagaggactacggagaggtgacagcgagggcggagtgaaccggggcatcggaccgagccgcgtctcactcctcgctccagacaagaagcgcctcaacaacgcgccccgggggtcggccgccccggggcccccgcgcggcccgcggctgcagggcggcggcagcctgacgctgcagccagactacgccaagtacgccacgttcaaggccgccgcgctcaaggccgcaggtgagtggcgggtgcgggcagcgtcagggcacctgggcgcacgagctcccggactgcgaagcgcggggccgcagctccaagcgccaaattcccagttccgcgcgcccgccgctcggccaatcggctccctcgccccagcgggccccgcccccggcccgccccggcccggtccccgtcccagtccccggccgggaccccttgtccagtcctgagcttgggtgctcggcgcggcgtcactcttccctgccctgtccccgcagaggccgccccgcgggacttctgtcagcgtttccccgccctcgagccgtccccgcggcaacccccggcgcgggctccgcgaccatccccggacttgcctgcgccgctggacgcctgcccctgggccccgccggtctacgcgccccctgccgcgccgggcccctatgccgcctggacctccagtcgcccggcccggcccgccccgctcagccacccgacggctcgggccttccaggtaccccggcgacccgggcacgcggcccggcgccagttcagtgtgaagatgcctgagaccttcaacccgcagctccccggcctttacggcagcgcgggccgcgggtcccggtacctaaggaccaatagcaagaccgaggtcaccgtgtgaagcggggccgcggtgccctcgaggcatgggctggggtcctgtctgcccgtcggagcctcaggccacagggagaggagcgcctgccgtaaggccagctcttctgtctgcctcaacggcagtggtgtcttggagcctgcaggccgcgggttcgtcttgtaaataagcccttttatgtggttcctgcccctgagaataaagaagccccagcgtggctgcgaggcaccattggtcactgactgtacagatggcagtgcaggcagagggcacggcgagtgcaaggttggaggactgctccagtgcaccggccagagccagggggaagtggctggagaggggggccagggttgaatgtcagggttaatgcccacccccgtgggagccctgggagagagggaacagttagacttcagccatagaaaggcccgggcacaggagagagggctgttgggtccaaggcccagtggggggtccatgccctgtactgaaggtgagccccctccagccgccactctgcagcttgagttggctgaacctggctgatgctcactgaccactggctgtgggccagcccctggcctgcaggtcgcttggccagattggccccgggctaccccccttaatgggtgtgggccgtgtggacatctggtgctccggatgggggcgcctcctcccaggagcttctctgaaggaaatgggggaaaagctggagcagggtccctggcagtgtccctccgggagggcttcctgcacctggctgtggtccagagcactgctagcagtctgcgtgcatcttccacagagttcctctccgccaggtaacactggggaggctaggggtcagggctgtggctggttgaggtgtgtgatgtggggaggctaggggccagggctgtggctggttgaggtgtgtgatgtggggaggctaggggccagggctgtggctggttgaggtgtgtgacctcagcaaagccacccaggtgggtctgtttccctcctgagtacctgaagtgtggtgtactgttttaagaacaatggccaccatttgttggcctttctcaggaaatccacaagcgcctcaagtgggtgtgtctttacagaggaggaaatttgggttttgaaacctaagtagcttgcccaaggtcacccagcagactcccaggttaggactctcccgaattgctgtgaatcggctggaatggcaagcaacaggcagtttggctgggagggagggttctgagggttggtagggaggggtccctgttcccagggtatatataaacagtctggagctttccttctgctggttgggctgccctgaggccccagaacccaccaggcccggtctccgctcctgccacaaagggtccacctccctgtccctttaggctgttaaggaaaccaaggcctagaagcaccaggacagagctctgggcccacggtcctgcccctgtcccacagctgtgcagagctggaggagggtgggggctgaggcatggagcctacacagactcacaaaggaatctggttgcttctcaccccacctcccaccccctgctgggctgtgccaagagtgggcaattccccctgctcattctcagttccaagggccctggatctccatcccagtggagccaggctgaggctgtgggcagtggccatccctgaaaatgatggagctgtgcacgggaccagctgcaattgggcctcaccgggctgctctggtctcagggtagcctgctgtgactacccttcagagaaggatgtggctcatagctgagggattcagccacatgctcagtcacatcctgactcctcttgcgacgaggcccagcactcccatcccagtctgtggtcctgtcccctggtgtgtcttacgccaagcctggcctcaccagccacacaaggcactcgctgtaaacttgcatcccatcactcagtcctggcagacaagcctttggagctgcagttcatggctgagcttagcttcccaattctgcacacgtggaagtggagactgaggccaggtcccaccccaggtgacccagctgggaagcacaggacctggacttggatctgacttgtgggccagtgagcctcctggctcagaggatcactgacttcagggagggagaaactaaggagcagtttacccagtgggggagagggtcagcaccccaaatctgtcagccagcctgcattacatccagggaacaagctggaacctggatacagtgacctctgacccccaaagtgccacccacagcccttttatcccaggctggagggtgcgccaggcaccggaaggaaggtggacaagggaggcccattagactgaagccaggggccctctcagcagttggggggctgccctcagtccctggcccattgcctgccaagtcacgcagccccttggctgggcaccacagcagtcgcactacagaccctcacacacctcgtgctgggtggtaccaatctgtgtttattgaatatgtctgggacacagtgactgattgattgaacatcaagaaagctataggtgtaccccccttttcagtgaaaaaccaccccctcccacacccaaacaatagtgagaaaaggcacaggacatacacacaacacgcaggcgggcagggtccataaattacagtgagagtaggggaggggcaggagagaaagaaagcaggtggggtccaagcacaccccagggataacattccagcctgcatcaaggtggccctgctgtgagcaccccccagtctgtgctggggctcctgcccaccctctgctccaaccagcctgaggatgaggcacagggaggcagggcccatcactcaggaggccatgggagaaacagtctccgggaggtgctgcacctggggacccagaaaagtaggactttttctcctaggacccgcatcgaggcaggggacctcattcctagtgcccaccataggcaaccctctgcccactctgaaaagaggggcttgccgctggggagggattaggggttggtccctgccatcctggtttatttattttcagctcaagaattaattaggtttaaatatatacagatatgcctcaacttaccatggggttacttcctgataaacccatcataaatgaaaatatcctaagtcacaaattcatttaataccccaacagaccaattgtaaagttgaaacatggtttaagttgaaccactgttaagttggggacagtctgtactgtggaggtaggagatggggtagggggaggagggaacctagaagccatgctgaaggcccctggtccccagtccccatgggtggcttcatttctcccagccccctgggcctaccctgagcttgggctaacatcctaggaggcggggagtgggaaggaacaggacaattaaataagataccatttattttttaaaaaattaaaaaataatgccaacattatttcatgcatccgcaggcctgccccctgcctcccaccagcctcccagggctgggcccccctcctcccctggctgtcctgtgtaataaagggaaaaacaatgagcaggctcagtcaggcccaggggagggaacgcagacccagggagagaatcaagacgctacagcaactcagcctcgcatcatggcaaacccaagcacactggtagaaaacattcgtataaaaaggggagggcatgctgggcacaggcctgagggcaactgctccctggtgctcagagactgctgtcccccagagaaagcctgataaaaactgaggaagcaaaaaggagagagtagggttcaggagagagaaactcaggaaggctggaggcaggggcttggcagcttgggagctccccctgctgctatcaagtcagggctgcccagtttctgccctgccacctatcctctcacgcccaccaggccctggaccatgggcatctagtgacagcagctttaaggggctctgcccaggggtgcactggcctgagtggcccagaagcctcggcaggtgacagctaagaagacaaggctcttccccaccactctcagcgggaagatgctgagggggagagagagaaatcgagagagaggtggaggggtgggctgagcctggtggtcaggaggcggcaatggcagtgccaccacccagcttaacaatcatctgctggcagtcgttgcaggagcgccggtcgcccaccttctccagggtgcgggcagcttcggccagcagcactgcccgctggcccggggaggagaggaaggagaggggcaggtggcggcaggccagcaggatggcggtggcccgctctcgctggccgggccaggcatccacctctcctgtgggaaggagatgtgtgtcacaaccgagaatctaccatgaagttggtgcagttccttggcgttacctggactcattcactgaacgctcacatccatcctgggaggtggggtctgctgccccacccaatccacggaaaagaagtgaacttgtccagcctctcacggccagcccgtggtggggctgagatgggcccacatgacctggctcgagcttctgcttctatgcctgcacctgtgctgggacgccaccccaaccctccttccctgatcacagcatgacccatgaccaccccaacccctgcaacccaccaagggcggcctcgggcttctttcattctcagagaggcgagaggtgtgctgggcaccaatgccagatgtgggagctgggctggcccctcttctcctctcttcctagggcgcagggcctggcccagcctgtgagctggggaggggtggactcaccgtgcttggtgctctgcgtggtgcgccgccgcaggctgtgttccagcagctggtgggtgcgggtggggctggctcctgccatcaggcgcacggtggcttcatgcaggaacacctggggaggtgccggggtgacatccatcacacccctggtccccacccatctatgcccagggtagctctccctgagccatctcgcctgccacctcatgacatcccttcccacaccaccctgccttgctcacccctgaaaagcaacctctgttgtcccgtactctgaccctgagccaggcaggaaacctggctgaacagcaggagcaggatgagaggagagagaggcaaaaggcctgcttttcccaactggtgacaagaaagccctggacgcacctcgtggggctggtagacaagtgccctgggtgaagccccaaggccctggaggctgcctgcagtttgacaaaaggacaggtgtgacagggacagaggggtgaggagggacagttgggctggtaccagagaggtttggtatcctctttccgtatctttagaaaggaagagagtctagaggtgtgcgggtaaagtctgcagcgcttaggtatgagccactggtgggtgaagggcaaggctgaggtctgtcatttcttaaaatctcaagctctttttgatgcctttatatctcagtcttcagggagggtcttcagtgctgccaagtggattctggtcctggtaggcaatggggagccgctgatgggctctcagcagggagcagcagaatggaaatggtatttaagaggaggcctttggaccaggcgaggtggctcacacctgtaatcccagcactttgggaggccgaggcaggaggacagcttgaggctaggggtttgagaccagcctgggccacatagcaagaccccatctattatgaaaaaaaggccactgatgccagccatgctgtgagcagaccagagagctgaccagagtgggctccaggaggcaggggtgccgctccaggcctggggtacatgccctcttctccacagtaaggaatggctctccgatgatactgtctgttgtgtctgtcttggcttgctgcacacagtggccacagtgcaaccctgggtgggccccgcagcacctcagggtgatgggtgtgggggctgaatcccaagctccacggcagcagcctcgctctgaggccttcttccagcccag

SEQ ID NO: 5724 - DNA, 12815 bp, Homo sapiens
gccattctcatcactgtggttttaatttgtattttcctactggataatgatgttgagcacctattcatctgcttattagcccagtatttatcctcttcagtgaaatgtctgttcatgtcttgctcattgcctgttttgtatttggatttcatttttattgttgtttaaaatttcttcatatattctgaatacagtctttacagaatatgttgcctgcaaatatcttctctcattctgtagcttgtctttttatgctcttcataggtctctcacagaacaacagtttttagtgttgataagatccaatttattaacttttatggatcatacttttggtgttatgtctaagaactctttgtccagtcttagctctgatgactttttcttaaaaggtttgtaatttaaaaatttaaatttattatttattttagaaaaaaaattcttgcctaggctggccttgaactcctgggctcaagggatcctcccacctcagcttcctgagtagctgagagtacaggcctgtgataccacacctggctcaatgtttgccattttaactctgtgctttacatgaaagcttgtgactcattttgagttatttttgtatgaagcatgaggttttggctcaggttattttttttccactgtggttgtccagttgttccatcaccatttgatgggaaagctctccttccttcattgaattgcttttgtgcttttgtaaaagtcagttgagcatgttttgctcatttttagttgagttgctcatcttcttacattgagtttaagaacttttcacatattctggatacatgttcttcatcacagatgtaatttgtgataaattgtgaaatattttctctcaatctacggcttgtcttctcattttctcaatattgtcttttggagtacttaagttttaaattttaactaagcccaatttgtctctcacttttttttcatctgtagatcatgttttttgtattttatgtaagaatcttttgcctaactactcaatgtcacaaaaattttctcctatattttcttttagaaattttatggttttaacttacaaattttagctgtttaggtctctaatttgtttgagcttatattttatatggcgataagtgtcacatcatattacctatgcaacttcattgaagatcaattgacaaaaaaatgtaagaatgtctttctagattctcacttctgttcattaatctctgtgtctctcgctttcacactgtctggattattgtagttttatatgacattccattttttttcaaatttgcgttggcttttctgcatcctctgcattttcacatacatttttaggattaaattgtcaattttccataaaatgcctgctggggttttgatagagattgtacagaacctatagatctcttggtggagaattgtcatcttaacaatattattgagctttccaaccgcatctctccatgaatttagacctttaatttctctcagtaatgttttgtagttttcaacaaactctgctgtcttcctaaatttattcctatttctctctttttgtaactactgtgataggaaagtttagattttaattgcttgtatagagaaatatgttaataatttttaatttgattttatatcctatgggagcttctggattcattttttagtgctagcaggcttttatctgcttgtgaattctacagacaaggtcatgttatctgtgaatagagttttatgttttcctttttatctggatgcctttaacttttaattatttgccttattgcaccagctgcaatctccagtacaatgttaagtagaagtgttggattggacatccttgcattgatctccatcttaggagaaaagcattcagtctttcttcagcaagcatgattttagttgtgggttttttatagatgccctttatcagggtgaggaaggtcccctccattcctattttgttgaaacttatgaacatgagtggtgttaacatttttgtcaactgtttcttctgtatcttttgagataattatgtcttttattcccttactacagtgcattccattaattgatttctaattgttaatccagccatatattcctgggatgaatcccattggtcatggaatgtaatccttttttacgtggctttctattgtctgccaatgtttgttaaggatgttttcatttatgtttattggtgacactggtctatggtattcttttcttgtcagtcttgctctgactttgatattagggtaatgtcagttctgtaaatgagctagaaagtcttgcctcctctcttcttgtctgaaagagcttttgaaatatttgatagaattcaccagtgaagatatctgggctttggcatttctttgtgagaaggttttaaaattactgtcttagtgtacagttctcttcagattttctatttatttttgagtcagtttcagcaatttctatctttgtataaatctgtccattttatctaagtggtctaactgattggcttcaggtttttcagagtattaacttataatgttttttaacttctaaagggtcattagtgatactctctcttgtgttcacaattttggtaatttatctcatttctcatactgtctgttttgacttttggtcaagaaaacagacagaggcagctctgtgacagattctgtagtgggaagctttgatcattcatagctggcaagccagactaatgccagcaaccccaaaggagctgccaatggatcttgacagggaagtcactgactctggattgggctatgatcaaccaggggtagatgtcaatgcttcaaaggctatacaagaaccagaaaaatggagattacaccaatttggactgttgagtcacatttctttacacaagaaaacacactttacagccttaaaaagccaacagtgcacagggaaatgtactattcaggggaaactttgatagaatattgaaatggctgaccaggcgcggtggctcatgcctgtaatcccagcacttttggtggccgaggcgggcggatcacctgagtttaggagtttgagactatcctggccaatatggtgaaaccccgtctctactgaaaatacaaaaattagctgcgtgtggtggtgggcgcctgtattaccagctactcgggaggctgagacagtagaattgcttgaacctgggaggcagaggttgcatgagccgagatcatactactgcactccagcctgggcgacagagtgagactccatctcaaaaaaaaaaaaaaaaagaaatagtcagttgaaacattggttgtctaattgtctaaaaactgccaatataattgttgggcaatataaacatgaaggactggcttttatatcttcatgaatgtgcttactgtcaacatgggtggagctgcgaaactgactccactaggtagcttcctctctttttcctgatggatcagggtgatgctgttatgactgtacatacaattcttcttaaggggaggatgctggaataatgactacacttcatttcttatttctttttttacacagggtgcagtggtaccaggaacagggatgcaaatcgaactgccagaaacaggaattatccctaaggaaaaaaccataactatatttttatacctttatgtaagaattcccaagcaaatcaaggattgcgctgtgccttcatttcatctggcaaagtcgggattaactgtaagtagagctacgtagactggtggtcagatagcctgcactagttcctaacctatgtaacctactgtctatgatcaagagtagattaagagaagacatggtagaatactattgctgcatgcagtctaggccagcacagcagccaaacctaatgtcacttctagaactggaaaagactgatataaagggacagaaggaggaatagtggctgagggtaggtgaataaatcaaagggttatgtaatgaggaaaattcaatattagcttatctcctcaaaagtggtgtgagcaagagatgttgtctcttaggtcaactatactggatgcctaaaagggtgaagctgtatgtccctgagaccattcttgtttttggaacctgataagattgaatggtgtctgcaaagctgagtgatgtcattctgggagacatattcatacaagaggatgataaactggcctaattttgaatgaccgaatgagacttggataatatgccaatgcttctttactgttataatccttttcgtatgaaaaatatgtggtcaaagaaaagggggtaatatgagttatcacaaaaacatttagttttgtccctggtttctcctaaaaaccttagaatctcttgagtgattagagtgtctttagaatactgaggaaaggactcttggctgagtggatcctggataccttgagaatgggggctggctgccacagacacatacctatgatgagagggttgtcttattccgttttgtgttgctataaagaaatgtctgagactgactaatttatataaacaaggttcatttggctcaggattctgatgtctggaaatgtttgagcatttagcgagggcctcaggctgcttccactcatggcagaaggcaaaggggagctggtatgtgcagaagtcacgtggtaagagaggaacagagggagtaggaaggtgcgagactcttttaacaactagctcttttggaaactaatagggcaacaattcattgactcccgagagagggcagtatctctctgttcataaaagattggcccccaagacccaaacgccacccattaggccctaagtccaacattggggatcagattttaacatgaggtatctggggataaatatttatatcattgcatcctgtccctagccagccaaagctcacattcttctcacattgcaaaagacaataatcttctcccaattgtccaaaatgtgttgggttgatccagcatcaactctaaattccaaagtctcatctgagactcaaggtaagttcttatagctgtgcacctgtaaaattaaaaaaagttatttacttctaaaatattaatacaacagtggtagagacatttcctatacatttccattccaaaagaaataaatggaccaaaagaaatgaatgcagtgtcctcacaaggttgaaactcatcatggcagacattaaaacttaaagctctaaaataatctcctttgactctatatcttgaaccctgagcacactggctgctgcaagcaatggactcacaatgccatcttcagcctcatatccgtggctttggtgaacataatccatatagctgctctcatgggtgaacattgaatgcttatggcttttccaggctgagcttgcatattgccagtggctctatgatttagtagtcttggcaggggtcctgttcctgcagctccactaggaattgtcctggatattaaatttcccctttaaatatcagttccagtttcaggtcatgtctttgctcacacatatgtgcataggctattacaagcaggcaggccaaatctggaatgctatgctgcttagaaatttcttccaccagatacccttatacatcactctcaagttcaaagttctacagatccctagggagggggaacaatgcctccaagttctttgccaatgcataacaaaagtgacctttcctctaggtcccaataagttcctcatctccatgtgagaccttatcagcctggactctattgtccatatcactatcagcattttggtcacaacagcttaacaaatctctaggaagttgcaaattttcccccattttcttgtcttctgaactctccaaactcttccaacctctgcctgttacccagttccaaagctgtttccacattttcaagaatttttatagtaatacccaactcctggtaccgattttctgaattagttcattctcacacttttataaagaaatacctgagactgggtaatttataaacaaaataggtttctttctttctcctcccaccatccaagatgccaaaaggaaagaaggccaaggagaagaaggtggctccagcccctgctgtcgtgaagaagcaggaggccaagaaagtggtaaatcccttgtttgagaaaaggcctaagaathttggcactggacaggatatccagcccaaaagasacctcacccactttgtgaaatggccctgctatatcaggttgcagcagcagagaaccatcctctataagtggctgaaagtgcctcctgagattaaccagttcacccaggcaccagacagccaaacagctactctgctgcttaagctggcccacaatacagaccagagacaaaccaagagaagaagcagaggctgttggccbgggccaagaagaaagctgctggcaaaggggacattccccactaagagtccacctgtccttcgagcaggagttaacaccatcrccaccttggtggagaacaagaaagctcagctggtggtgatwgcacatgatgtagatcccatcaagctggttgtcttcttgcctgtcctgtgtcataaaatggggtcccttactgcattatcaaagggaaggcaagactgggacatctagtccataggaagacctgcaccactgtcaccttcacacaggttaactcggaagacaaaggtgctttggctaagctggtggragttctcaggaccaattacaatgacagatabgatgagatccgccrtcactggggagacagtgtcctgggtctcaagtatgtggtttgcattgccaagctcaaaaaggcaaagggtaaagaacatgccactraattgggtgaaatgtatgctgttgagttttctgtatgtaaaaataattaaaataatataaattttccttcaaaaaacaaaaacaaaacaaaaacagaaaagaggtttaaattgggtcatggttctgcaggctatacagaaagtatgattctggcatctgctcatcttatgagagggcctcagggaactttcgattatgctggaaggctaaggggaagcagacattacttacatgcctggagcaggagggagagagagcagggaggtgacacagatttttaaacaccagatcttatgagaattatcacaagaatagcaccaaagagatggttctaaaccgttcatgaaggatccatcctcatgagccgatcacctgccaccagacaccacctccaaaattagggattacaattgaacatgagatttgggtggggacacagatccaaacaatatcaggggtcatggtggacatgaggatgggctggtctcccatttcttacctgttactgtagacatagacacattcagacgctttggcagaaagagaagccagaggcccttaatgtcacaaagaggaggcatgaacaaatcttgcatctcagtccctcacaaggcaatcttagaaaaaacatagtcataaactaatccaggtcagtcacagtaagttgtgacactgaacagcccaccacaccttgaaaaattccaaatcaaagaatctccagagcttagttgtgtcccctctgcccaactcctctttcacttcaggccctctaaggtgtcacttttacaagccgtgagagacacatcagagccctgggtactgttcctgtttggggtggaacaaaaacaaaatctggtcagagcccacaggtgatgtgactaaaggaggaattttggggtggctgagctcccccatgggctcctgtctacactatcccaaggatctcagggatcactcttcccacccctaccacacttacatgaagcctgagcataactgcctccttttccatctgtggaaagaaaacaaactgtgagaggccagggaggaggcagggcatgagatcctagagaagtttccagaactgtgactacagacccaggtcaggatcagaaaacccaagggaagaggatgtgttgaggctggaccagttgtcctcctgaggtctgtcctcagcagggaccttcccctgacctgtgactgctgggagtcaggttcccatgaccacaatcaaggtgataaatttgtccttcattttcacaggtgctttacaaaagagtaagtgttgatagacagggcctctgaacagggtaaatgtgtgtggagatggtgcctcacaactaggcaagatatgagcctactcctacctggggcttgaaatccaccaatggaagaaggaaactcagagctcacccctttcctacctgggatcttattcctccacatcacagcagcgaccacagctacagtgattacagcaactagaagaaccaggccagcaatgatgcccacaacggggatgatgggctgggaagacagctctaagaaaggaggtgaacgtgaggggccctgacccccaggcctcagccctgaccctgcttaaaggctccagaaggacttctgctttgcctgagaagagacatgacccctcattcgtctccttaccccatcttagtgtgaggggctcaggcaacccctcgtgctgcacatggcatgtgtacctctgcttctctccagaagacaccactgcagctgcccacttctggaaggttctgtaccctgcaagtctggtctccacaaactctgcatcctgaatttggtcctccccatcccgctcctgggtcagtgtgatctccagagggtagaagcccagggcccagcacctcagcgtggcctcatagttggagatggggtggagggttacctgtgccttcaggggatctgagggcaagaggtagaaaattcaggcactttgcattcctcatgagacacagcacccatgtgaccatcctgagaatggatgggacatctggggtggggaagggagcacagaacccagacaacattctggacacaggcacctgggataatctcttattccttggaaagttctagtgtctgaggcggaaacagagatttctggtcctgacctgagtggaggccgagggactcagaagagctggaatcagacccccacacacattgagtatgaggcagagaacaaggcctgagaggaaaattcctggtgcccaaggctgctggggggtcaaaggggaccgcgtatcagtattccagggattgtcttcccctcctttcccgcagagacttcatccgttaattgtcccagagtgcagggcgggccctcagtcactctctggtataggatttagaaacccaggaggactcttctgcctcaggacaagagggagagggatattttagcgttggtcccattttcctccccttcttttggaaggtggctcagggatatctgcaggagatcagggaggcgacccgtggcctctggtacctgcgcattgcagcctctccttctcattcttaaggcctttgctgagccactccgcccaccttcccggcaggtaggttttgagcagctctgcatgttcctcctccaaaacatctgagccgccttttccgctgcggtccaagagagcagttcctggtttaggacgaggtaactggcgccatcgtagggtatgttcatccccgcgcgaagaggctccggtccgggtccaggtcgcagctgtgtatccactggaggtgggagaccctgtccccaagcccgcggtcagcctcagccactgagctcctcctctgccccgatcaatcccccggggatttgggcctgaactgaaaatggaatcgggtataggcacctggggttcttgtgtcgagggtctccacgagtcccgcagcctcggcgtgggtctccgattgtgctacagtgggtagcacaatcttggtagcccctgaatggtcacgaatctaatttgtaaaagagatgatttttggccccattatatataaatatgtctaaacgcattgcaattagactcacaaagtgaagttttactttcccagactgtgtatctgtgactctggtctgttgtatttttacagtatctttatttcatagctctgagtttgtgtgtgcgagtccaggacatctcaatacaaagcacaatgtattaccgtatattgcaaccaggagcctgtacagaatttaattacctcagaattgcaagtgcttaatgcagccaaagtgcccttcgccagtgctcatgcactccctttattattaatttttttattttttatttatttacagacagggcgtcactctgttaccctggctaaagtgcagtggcacgctcatgactcactgaagcctcgacctccttggctcatgtgatcaatgctcctccctcagcctcccaagtagctggcaccacaggcttgtgccaccactcctggctaatttttctaaaaataatatttgtagagatgaggtctccctaaattgctctggctggtcttgaactcctgggctcaagcaatcctcccgcctcagcctcccaaaatgctggtattacaggcatgagctataatggccggcccatgcacttgcctattattatgaattattcacatctaagctatgtgtatattttattgagacatttggtattcttttttaacctttttttttttttttgagacggagtctcgctctgtcgcccaggctggagtgcagtggtgcaatctcgctcactgcaagcaccgcctcccgggttcacgccgttctcctgcctcagcctcccaagtagctgggactacaggcgaccgccaccacgcccggctaatttttttgtaattttttattagagacggggtttcaccatgttagctaggatggtctcgatctcctgaccttgtgatccacgcgcctcggcctcccaaagtgctgggattacaggcgtgagccaccgcgcccggccttttttaacctttttatcttagagaggcaattaggttttagacagccccacagaatgcattaaagaccaaggtgcaagtaacactgtgccaggctttgcggataaatgcattaaaaatctataaaacactgtatttaagtctgagaattccattgctttagaattctttctctctgttcctttacctcacctcctgcttctccagcccttctctctgtccctgtcatccttcaggccctcctctccccttagtctctactactctgtcactactgaattgtgtccctagctctgtcccttgcctgctgcccatgactgttctccccacaaaggtcagcaatcctgctaatgtgagtcagattgtttcatttcttcacttaaaagcctctaatggctccatcttactctcaagaagcctctagaatggaaggcacaagcacaggggctttgggttgttttgatcaaagttgtatctacagaatataaaagtatatctgccacatagtaggcactaagttaatttttgttgaatgaatgaatgaaatataattgtgttcaaaattgtatcacacaaaaatcatgaaatggaaaatgcaaagcaagttaggaaatatttggttttatgcaactactatgcatatcagttcatgaattcattccggtggagaaaatgtcatatacttatcctttgaatctgtttatttatttcctggcagtacataaccaattaccacaaacttagtggctgaaaacagcacccatttatttgtctacatttccttcatcagaaatccaggcctaatgtgatagactctttgttcagagtttcgcaaagctgtatcctcatcttaagattggggttctcccccaagcttgtgtagagtttgttggcagaattcggtttctggcaattgtaggattaaggtccctgtttccttcgggctatcagagtagacagtggggagggcttctaattcctattggccaccagtgttctttccccatgatccctccattttcaaagcccaaagtggaggaagcccctcacgctgaatccctctcacactgtgagtctctattctcaggaagaacccagtccttttcagagcttacctgattaggaccgtctaagcaggataatcctcatcttaaagtcaactgactggggactttaaatatatctgcaaaacctcttcacagcagcacctgctttagtgtcaactgagtaactggggtaacctgagtaaccaagggtggttattggggtgtcatcatagaatcagcctagcatagcctggatcttcctttcatgtttaaatagaacatacaagttgaagatcaaaaaatagatcattgttaatgataataaaatatatcttatatagccatggaaatttttattaaatattaaaagcaaatgacatgtttaatatcttataatgaatttagagcaaatgaaaaagttcagtgattcatcctctcttgtgaagctgtattagttatctactgctgcataacaagtcacctacaacttagcagctcaaatcaacaaatatttatcatctcccacagttatccatggtcaggaatccaggagaagtttctctgaatgcttctggctcagggcctctcacaacgttgcagtctagttgtcttccagggctgaatcacctgagggctcaaatggggccagggattcacaagacacaagaatctctcacatggcttttggaagaggctttagcttcttattgtctggtcccaggaggactcacttcctagtcacatggaccacaggcctccttatgacacaacagccagcttcccccagggctcatgattccagagaaagaaagaaccaaagtagaaacttcagtgagtcttatgttctacacccagaatcacaaactattatgtcagcattactctatcagttagaagtgagtcattaagtccaggccacacgaacagggagggaatgaagctgc

SEQ ID NO: 5725 - DNA, 26277 bp, Homo sapiens
agtataatacatcatgactaagtgagacttatcctgggaatacaaaattggttcaacatcctaaaaaatcaatataattcatccaattaacagaacaaaacaaaacatatatcaacagaatgtgaaaaagtatttgataaaattcaacagtatttgatgtaaaaattctcaaatttttacatgagtaaaaaagaaacttcctcatcttgataaaaaggatctaagtaaaacctgtagctaacatcgtatttgtgaaagactttctccttaaatcaggaacaaggcaatatcaattcttaccattttattctaatctgtactgaaggtcttagccattgcagtaaagcaagaaaaggaaataaaaggcacatatattagaaaagaagacatggaactgcctttattcacagatgatataattacatatataaaaaaaatcccaaggaatctaccaaaagctacaagaattaataatgaagtcctagcaaattcacaagatataaggccaatatacaaaaatatattttggtatactggcaatgaaaaactagggactaaaatatttaaaaattaatattatttacaatagcataaaaacattaaaaacttagggataaatctaacaaatgtgtacaagatttgttcactgaaaaatataaaacattactgagagaaattaaagattttagtagagcaatgaactgtgtccatggattaaaagactcagtattgctccaaagttaattattgtcaaattgatctctacctacaaagcaattctaataaaaccccagcagccttcaaatttttttgcagaagttgacaagtatattctaaaatacatatagaaaatcaaaaacaattttgagggaaaagaacaaagaggattcatattacttaattttaaaattggcttttaagcagtttagaaaacaatcaaaacaaaggggtattggcacaaagacagatatatagattgatggaacagaataaagggtcaaagaataaactcacatacatatggtcaattaatttttggcaaaagcaccaagataacttaactggaaagtatagtctttgcaacaaatggcagtataacaattggatatccatatataaaaataaaatcctcaacccttacctcactacaaaaagttaatttaaaatgaatcatagacctaaatacaagagccaaaattataaaacttctaaacaaaaacattgaaagtttgttttgtgggtttttgttttgtttttttaccttgggttagtaaaagatttagtggaacaataacaacaaaataaactaccatttagaaaagaaaaatatgtgaataatttgatttcatcaaaattacaaattttcttcaaaagacactatttaagggaataaaactgtaaacatttgtcaaaatatcaaactacaatatgaaagtgtgagttttactgtacaaaaattatgcctaaatagaccaaatttttaaaaaacctaatttaagatttttaatctttaagaatcctaggagagaacatattttttaagttttaatttcattcatatcactaataactacaacttattacatgttcctgtggtgggtcttttacccatattggctcatttcgtcttcatatttaagtatagttccatttttatagatgaagagaacctaactctgaaaattttattatccatgtcaccctgagatgataaacatggactttcaaaatctaaagcccttcctttcccactatgttttgctgcatctcaagtatttatttaatgcaaacatgttaactgtatttacattaattcatgcagtccttggaaccaaagtgtaaggtgtatgccgttatatccattttcagatatggaaacagagggtaaattatttgcctgggtcacatggctcttacaaatggaggccaatcctgctgtaattcaaaagactatgctctctctactctcattgccccctataatgatctggtcttgaattgtctgtgtgtgtattctaataaaattgtattttgtgacactgaaatcttaaatttttaaaagctttttattttgaaataattttagattttcataaagtttccaaagaaaaacgtatagggatataccatgactgttgtacacaatcaaaaccaggagcaaattgacattggtacaatccacagattccaaagtcactaatttataagcacacatttgtgtgtgtgtgtgtgtgtgtgtgtgtgtgtcattccatgcaatttcatcacctttgtgtagctttgataactatcactgcacacaagatacagaacagttcatcagtccatgcctgatgctatccctttataggcattttcaacccttttcttccccatccctaactcctggaagccactaatcttttctccatctctataattttattaatctaagaatattatgtaaatagaatgcagtatgtaaccttttactatttttttttcactcagtaaaattctacggagaaccttcctaagttgttgctcacatcaataattcattttccttgttattgctgtgtaggaccctttggtattgatgtaccacagtttgtttaaccatttacccatcgaagggcatttaggttgtttccagttttgggttccaggtttttgcatgagcatgtttcctttctttgggataaatgcctaaatgcaatttttcagtcatatggcaagtacatagtttttaaaatgtggctgtaccattttacattcttaccagcaacataagtgatgcagtttattcacattcttgccagtactggtgttatcacgattttttagcttagtcattaccatggcatgtggtgatataacattgtgggtttttttttttttttgtctaatagctaatgatgttgaaaatcttttcatattcttctttgtcatctgtacatcctcctccgtgaaatgccacttcatatcttttgcctattttcaaatttattttttttactattgagtttcgagagtcgtttatctattatagatacaagtcctatgtcagacgtgtggtttgcaaatattttctccctgtctgtagcttgtctttttcattctcctaacagggtatttcttacttgaactgttttctaaaaatatccagtaaatgttaatttttctaagcaactttaaacaaagtcaattagtagtatagaaactatagactgtaaagtatactgcatttctgcttagagttctctatacacagaggcctaagacagcacaaaataagtatgatttatttagcccaattttcctgcatcgtttccataaaaaatattgaagtggctcataatattagtattcaaacacctgtcatacacattccatccctggccttaacctttccccctttatcccttacgtatttgtattaggataagaatatcctctctcccaaacttcacataccggggcctgtcaaggggtggaaggataggggagggatagcattaggagaaatacctaatgtagatgatgggttgatgggtgcagcaaaccaccatggcatgtgtatacctatgtaacaaatctgcacgttctgtacataatgtcccagaacttaaagtacaataataataaaaaaaaaatcccctctcccttcttttccgaaaccaagggcctctcaagactaatgggaggaaagtttatttattataaaactcaagatattttgtttaatatagtatgggagatatatgaggggagcttaatcttaacagtgcaatgacctgatttttaaaattaacccgagtccctgtccaacagcagagcatgacagaacaaactaatgctacctgctccagatacagaaaaggtaggacattggaaaatctgggtggatgggggtaaaggattcggatcagcccataacggccacgtgatataccctgacgtcctaggattaaggccatgagccatggaaggaggttggaggacaaatgaaatacagaaagtcataatatctacaaccctgtggtctacaaaggagtttggttatactacatgaacctgaaatagatgatggattaaagtctccattattccatgtaatgataaaacaatttcaagtgatcataagaccattttataatgaattccttctttccactgtaaaggccatagtgttagattgcttactcttgttaagatttactggatgctaacagtccagcactggctaggcatcgagaacataaaaataaatgagaagtgttcctgcttttaagatgttcctactgtggcaaacagagagctacaaaatataataatatagaagtatgtaaaaaaaaaaaaaaaaaggaataaccaattctgccaggttgaatagtagggtcacgaggaaacgacgtttgagctaggtcttgctagatgtttttaaataaaatgtttttcttccataatgaatatgaaacaattagaaaaaaaatgggaaaattgagttttcaaggatgagttcttcaggaaaagaaaagctttggcttttagagaaattggattcattcattcattcattcatattcatttagcaaatattcattgccttcactccaagctagattccgagaatccaacaaacggtacttgccaaagggaacctgtcggctggtgggatgatagagatcagacagttgccacacaatgtgaaaagtgccgtgaaaaagtaagcatagggtgatgtggaagcacatggttgcctctaatctggacagactgaagacactgagatttacagttaggccagggtcatttgaagcactgccttgttgtatttgtatgtaatgacatttcgaaacgtggaatgaaaggaaaagtacaggcagactataagaagcttccacggatgtgtctaactttgcaaatgaacaaaaatctaatgtagacatatcctggaaacttctagtttgcctgcacttttccattccaaatggaggtttggacatttaacagaggcctcaaagggttatcctgttaagattttagtatatacagcaggggcttgaaggaatgttgattccattcctcttggcctccttttatgaatccagttctgtgctagctctgtgagtaaatgaaaatgccttcaaaattgggatgccagagttagacagcaaaggagcaaaggaacccgtatcagctaagtgtgggaagggaaatatgtaccagttgctatatactttcacacgttattttaacctcataacaactcttatcaattcagatgatggaacagggttaaagaatagaggctgagcacctggctgtccacggacacactgagccagcaggagcacccgtgccccgcagcagcacccagggccctcctagagttccggccttaacgcctaggaacgtgccattggctcctgcgtttctcgttcccgtcgggaacgccactggctagtaccttgcctggcccccagtgctcaatccctggtagttgggaggacgaaaaggaaatccctctctggtcggtcctcaccgcagccctgtgtcaggccgtcacacggcggcctccagagtcgaaggcgctctgaggagatgcaggttgtgtccaaaacctcccacctcggggtctcctgaacgtcccaacaagctccttgggcccttaggcgttaggccaaccccaggcctcggctggccccgcccactctccgcggccggaagtggcggcgccgagtgaggtaaatgcgtgcccggaagcgcgacctcgggcggttggaggggctaccgggtcttaccagtccgtggcgggagtcccggaggaccctcgacgggggagttgccgagaaaaggcctcgccggcattcttcccctccactgggtcctttgaacctagtttggctgggactcgccttcaggcggcgcggaggatttcgaggccctgaggcgcggcccttaatttccggaagtgggggccgcgccgcgccgtcaagatgtgctcgacgcccggaatgccggcgccgggggcctcgctggccctgcgggtgtccttcgtggacgtgcatcccgatgtgatcccggtgcagctgtgggggctggtgggcgagcggcggggcgagtacctgcggctgagccgggaaatccaggaagcggcggccacgcgcggccagtgggcgctgggcagcgcctcggcctcgcccggcgagctgtgcctggtgcaggtcgggcttttgtggcaccgctgccgcgtggtcagccggcaggcacaggagagccgtgtcttcctgctggacgagggccgcaccatcacggccggagcaggctcgctggcgcctgggcgcagagagttcttcaatttgccctcggaagtgctgggctgcgtgctagcgggcctggtgccggcaggctgcggcgcgggctcaggcgagccgccgcagcactggcccgccgacgccgtggacttccttagcaaccttcagggcaaggaggtgcacgggtgcgtcctggacgtgctgctgctccatcgcctggtcctcctggaggtgcctgatgtgttccaacagatgcgggagctgggcctggctcggcgggtgcccgacagcctcttccgttcgctgctggagcgctatctcacagcggccactgctagcgtgggctccggggtcccggttctctcgcgagtccygctcaagcaaaagcagcctggtctggattacttctatccccagctgcagctgggcgtgacggaggccgtggtcataacccaagtgtgccatccccaccgcattcactgccagctccgcagcgtctcgcaggagatccaccgcctctccgagagcatggcccaggtataccggggttccacggggacaggggatgagaactctaccagtgccacctgggaggagagggaggagagcccagataagccgggctctccgtgtgcatcctgtggcctggatggacattggtacagagcactgttgcttgagacttttcggccccagcgctgtgcccaggtgcttcatgtggactatggaaggaaggagttagtgagttgcagcagccttcggtacttgctgcctgaatattttcgaatgccggtggtgacctacccttgtgctttgtatggactctgggacggtgggagaggctggtctcggtcacaggtcggtgacctgaagrcactgatactaggcaaggcagtgaatgcaaagattgaattttattgctcctttgagcatgtgtattatgtcagcctgtatggagaagatgggattaatctgaaccgtgtgtttggagtacagtcgtgttgcttggctgaccgagtccttcagagccaggcaacagaggaggaggaaccagaaacatctcagtctcagtctcctgctgaagaagtagatgaagagatttcactcccagccttaagatctatcaggttaaagatgaatgccttctacgatgcgcaggtagagtttgttaaaaatccttctgagttttggattaggttgaggaaacacaatgtcaccttcagtaagctgatgaggagaatgtgtggtttctattcctctgccagtaagctggatggtgtagttttgaaacctgaacctgatgacctttgctgtgtcaagtggaaagaaaatggttattatagggccatagtcaccaaattggatgacaagagtgtggatgtattcttagttgaccgaggcaattcggaaaatgtggactggtatgacgtaaggatgctgcttcctcagtttaggcagctaccaatattggctgtgaagtgcaccctggctgatatttggcctttgggaaaaacttggagccaggaggcagtttccttttttaaaaagactgtgctccacaaagaattagtcatccatattcttgataaacaggatcatcaatatgttattgagattcttgacgaatcaagaacaggggaagaaaacattagtaaggtaattgcccaagctggatatgccaagtatcaggaatttgaaacaaaggaaaatatcctggtaaatgcccactccccagggcatgtttcaaaccactttactacggagagtaacaaaataccttttgccaagactggagaaggagagcagaaagccaagagagagaataaaaccacatctgtttcaaaagctttgagtgacacaacagttgtaacaaatggttcaactgaactagttgtgcaggaaaaagtgaaaagagcatctgtttattttcctcttatgcagaattgcttggaaattaagccaggctcctctagtaaaggagagctggaagttggaagtacagtagaagtcagagtgtcttatgttgaaaaccctggctatttctggtgtcagctgaccaggaacatrcaaggacttaaaactctaatgtctgatattcagtactattgcaaaaatacagctgctcctcaccagagaaacacccttgcttgtttggctaagcgaacagtaaacagacagtggtccagagcacttattagtgggatacagtctgtggagcatgtcaatgtaacatttgtagattatggagacagagaaatggtatctgtgaagaatatttattcaattagtgaagaatttctgaaggttaaggcacaggcttttaggtgcagtctttataatttaattcaaccagttggccagaatccctttgtttggratgtaaaggcaatacaagctttcaatgaatttatagataatgcatggcaaaaaaatctagaattaaaatgtacaatatttgctctggcttcaattaatgaagaactgtttaacattgtggatttgctaaccccctttcagagtgcatgccatttcttggtagaaaagagacttgcaagaccagtaaaacttcagaagcctttggagtcctctgttcagctacattcctacttctattctacacatgatatgaaaattggaagtgaagaattagtttatataacgcatattgatgacccttggacattttattgccagctggcaagaaatgcaaatattttagaasagttgtcatgtagtattacacaattaagtaaagttttgctgaatttaaaaacatctcccttgaaccctggaaccttgtgccttgccaagtatactgatggaaactggtataggggcatagtaatagagaaagagccaaagaaagtcttctttgttgattttgggaatatttatgtagtaacaagtgatgatctgcttccaatacctagtgatgcatatgatgtcttacttttgcccatgcaagctgtcagatgttcattatctgatattcctgatcatataccagaagaagtggtggtgtggtttcaggagactattttagataagtcattgaaggctttagttgtagcaaaagatccagatggaacactgattatagaactatatggtgacaatattcaaattagtgctagtattaataagaagttggggctacttagttacaaagatagaataagaaaaaaagaaagtgaagtcctctgttctacaactgaaactcttgaagaaaaaaatgagaatatgaagttgccatgtacagagtatttaagtaaatcagtagggtacaagttacctaataaagaaattttggaagagtcatataaacctcagatcaactcatcatacaaggaactcaaacttttacaaagtttaacaaaaacaaacttagtcactcaatatcaagactctgtgggaaataaaaatagtcaagtgtttccattaacaacagaaaagaaagaagaaatttctgctgagacaccyttgaaaacagcaagagtagaagctactctttcagagagaaaaataggagattcatgtgacaaagatttgcctctgaaattttgtgagttcccacagaagactataatgcctggatttaaaacaactgtatatgtttctcatataaatgacctttcagacttttatgttcaactaatagaagatgaagctgaaattagtcatctttcagagagattaaacagtgttaaaacaaggcccgaatattatgtaggtccacctttgcaaagaggagatatgatatgtgctgttttcccagaagataatttatggtatcgtgctgtgatcaaggagcaacaacccaatgaccttctctctgtgcagtttatagattatggcaatgtttctgtggttcatactaacaaaataggtaggcttgaccttgttaatgcaatattgccggggttgtgcattcattgctccttgcagggatttgaggttcctgacaataaaaattctaagaaaatgatgcattacttttcccaacggaccagcgaggctgcaataagatgtgaatttgttaaatttcaagacagatgggaagttattcttgctgatgaacatgggatcatagcagatgatatgattagcaggtatgctctcagtgaaaaatctcaagtagaactttctacccaagtaattaaaagtgccagttcaaagtctgttaacaaatcagacattgacacttcagtatttcttaactggtataatccagaaaaaaaaatgataagagcttatgccactgtgatagatggacctgagtacttttggtgtcagtttgctgatacggagaaacttcagtgtttagaagtagaagtacagactgctggagaacaggtagcagacaggagaaattgtatcccatgtccttatattggagatccttgtatagtaagatacagagaagatggacattattatagggcacttatcactaatatttgtgaagattatcttgtatctgtcaggcttgtggactttggaaacattgaagactgtgtggacccaaaagcactctgggccattccttctgaacttctgtcrgttcccatgcaagcctttccatgttgcctctcagggtttaacatttcagaaggattatgttctcaagagggaaatgactatttctatgaaataataacagaagatgtgttggaaataacaatactagaaatcagaagggatgtttgtgatatccctttagcaattgttgacttgaaaagcaaaggtaaaagtattaatgagaaaatggagaaatattctaagactggtattaaaagtgctcttccctatgaaaatattgactcagagataaagcagactcttgggtcctacaatcttgatgtaggacttaagaaattaagtaataaagctgtacaaaataaaatatatatggaacaacagacagatgagcttgctgaaataactgaaaaagatgtaaacattattggaaccaaaccaagtaacttccgtgaccctaaaactgataacatttgtgaagggtttgaaaacccctgcaaagataaaattgatactgaggaactggaaggtgaattagagtgccatctggttgacaaagcagagtttgatgataaatacctgattacaggatttaacacattactaccacatgctaatgaaacaaaggagatactagaactgaattcacttgaggtgccgctttctcctgatgatgaatcaaaagaattcttagaactggaatctattgagttacagaattctctggtggtggatgaagaaaaaggggagctaagcccggtgccaccgratgtgccactctcccaagagtgtgtcacaaaaggcgccatggagctatttacactgcagcttcctctcagctgtgaagctgagaaacagccagaactagaactacctacagcccagctgcctttagatgacaagatggatcctttgtctttaggagttagtcagaaagcacaggaatccatgtgtactgaggacatgagaaagtcaagttgtgtagaatcttttgatgaccagcgcaggatgtcattgcatctacatggagcagattgtgatcctaaaacacagaatgaaatgaatatatgtgaagaagaatttgtagagtataaaaacagggatgccatttcggcattgatgcctttgttctctgaggaagaaagcagtgatggaagcaagcacaataatggtttaccagatcatatctcaggtatgtgaattttttttcctttttacttttttttttttttttttgagacagggtcttgctctgtcacctagrctggagtgcagtggtgtgatcttggctcactgcagcctctgcctcccaggctctagtgattttcccacctcagcctcccaagtagctgggactacaggtgtgtgccaccacacccagcttatttttctgttttttgtagagacagggtttgtcatgttatccaggttggtctcaaactcctgggctcaagcagtccttctgcctcagcctcccaaagtgtgcttttacttttaagtttaacatagtgactttccagagttgttatttgttttaaagaaaagagaataattcttatatggatttctaaaaaataattttttgtaagagattaaaaacctggaaagtgaatcagattggattttatgaagggcattttaaacttggggaaaatatattgtgaaatcagtgcaaaatatgtgctggaagaaacactgaaatattagttttgtgtttaaaagttgaatgcttgaaatctattagtctccaaaaggtaatcacatttaaaatgtaatcacatttataatcaagagggcatgtgttggtaagttttataaaacatggtattcccttgccaaatttatggcactactayaggcattaatttacactaaggattatttcaacagggtcttttagacttaactgtatcatgcattgatcttgcaattcattagaaacccttaaagaaaaaaaatagatttaggtagcctatattaatcaaaaactgtttcatgtgtaaatcttggagaacatttattaacttttttataaattatttttactactgtttgctacttaaaaagaattgttaaatgggtaacttttagctttttataatcaatgctatactttttaaatgtcaatttttatattattaaatttgaaccattgtaaaaataaggaaaataatggaatagtgagaatgaaaatcaacaagaagtgatcaatgttaacaccatgatgtattttctttttgttgtcttttactgtctttgtgtatgtctactatatagttttaaaaacaatttagatcatactatcatacagtattgaatcctgcattttagtcccttaaaaatgctttcaaaatattttaattgcatggtatgccatcctatgggtaacacataagttatttaagtattacccttgcattagatatttattcctcattgtcatatttaataatagtattaactctgtgataagaatgtctgctcatttgtaacatgctgctttcttatagaaatggctgttgtaagtataaaaaacaccacttgtcttaatagtaccatattttattagcgattttcactgttagaaatcaaattcacatccttgtggtgattttttgtttggtttgttggtttagaaaagcaataagagattatatgggggggcgggcactgtaagaattttaaacaaaattgagggagacagtcataccaatgtactaattacatgatattratgatatagaaataatgcagattaggaaaatgctttgcttgtgtatgttacattaaggaattaagagatatgcattgagtcttactcaattcaatttggcagctcaactacagaacacctacactctgaaagcctttactgttggatctaaatgtgtkgtgtggtcaagtctaagaaacacatggtctaaatgtgagattttagaaacagctgaagaaggaacaagggtaagtgatgtttaagtactttatctccaaatgtatttgcagactattaaggaaagtttaccagactctgtcagactagagaacgcgattgaacaaatgtttacttgcttgttccccctgataacttgatgtaatgcacatatattttaaatctccatatataagaatcgtagcaagaaatcatcctaggctgtatcatctatctcccttactctttctaaatgctattagtcacctagttccacactttacacatcttatctcttagttggaattttttatatctaatgccactaccttagttgagtcatttcacaactacattaataaccttctattttgtttgcttcttctagtcttccttaaattgattgtccatggtgtcagggtgaagtttgtaaaatgtaaatttgattacttcattattgtgtaaaacttattagggagcctgttgatcgtgtttctcccgtgatttgaaaaccacctgttcgagagttacttggtatatatatatatatgtatatgtgtgtatatatatatatatatatgtatatgtaatatatatgtatatatatgtgtgtatatatgtgtatatatatgtatatrtgtgtgtgtgtgtgtgtgtgtgtrtrtrtrtatatatatatatatatatattttttttttttttttttttttttttttgagacagggtctcactctgtcacccaggctggagtgcagtggcgccatcttggctcactgcaagctctgcctcccaggttcacaccattctcctgcctcagcctcccaagtagctgggactacaggcgcccaccacgacgcccagctaattttttgtatttttagtagagacggggtttcaccttgttagcgaggatggtctcgatctcctgaccttgtgatccgcccacctcagcctcccaaagtgctgggattacaggcatgagccactgcgcccggctgttttttaaattgtattatagattcctacgccttggcctggactgctaattcagaatttctggggttaggattccagaatatgcattcatattccattaaaattggagagcccctggcctggaacataaaagtcaagctcattaacatggcataggaaatcctctagggttaagtgtttatgtactctctttggccctaattctttatattttgtactttatattaaatggacatcaaaattcttgacttctcttacatataccatctgcttgctctttcgatatatttaatattgcagttctattttacctatattccatcctgttaccaaactggttaattccaatttacttacccattgcctctaccagggagcattcactgatgttattttctaaatttattcttgtcctcaaccttcccccatcccaaaaaaagccttatttctgtattacaatcctatacctcctactacagaagtctgaacttcctatggtgtattgtaattatctgcttagaggtcttttctccactagattttgaactatttgatgttgaaattttatccatctttgatcaccagtcatagatactctacatatgtttgggaaactgaagtagcatggagtttgaaacataaggttgaagctcaataaattcattttcattgtcttttaaagtgtttcattttagggccaggtgcagtggcttatgcctgtaatcccagcactttgggaggccaaggcaggtggatcgcttgagccaaggagtttgagaccagactgggcagcatagtgaaaccctgtctttatccaaaatacaaaaaattagctgggcatggtggtgtgcgcctgtagtcccagttattcaggaggctgagatgggcagattgcctgagcccaggaggtcaaggtcacagtgagctctgatcctgccactgccctccatcctgggcaatagagcaagaccctatctcaaaataataataataataatagtatttcatttttaaaataattgctctggtacataaatcagttatttttttgaattggacactttaaaaaaatttgttttctcctgtaggttttgaacctttcaaatggtatggaggagatagtgaaccctgagaatgtctggaatggcatacccaaattggataagagtccacctgaggtatggaattctataaatagtaattagtgagagcattgttcttcattttgaaaggtgatttaacaaactatttccaaagtccttgtgtttggaaaaatgggagaaaaatcctgtgacaatagttaaaaacagcaataacaaaatcagtgattttagtccttatgccaagtattcttctgagaaaactagttattaatgttttactccttgattagaaaatgttttggtcttcatgactctaataaaatacatattagatgcagaaaacctgagaaatataacaatattaaaaatgagaaagtaacaatcaccgataatatacccatccagagacaaataggttgaccagtttggttttcttttataatttttctgtttatatgtaatataagtatttcatctacatattttagacacaattgatttcatcctatgtatagttttatattctgtttttcttcatttaagactatatggtgggcaatttgccatgacattatgatgtgtctgggcatttgagtttatcctgtttggggttggttggacttcttgaacttctcacttcacaatctttgtctgatagttttaatatctggtcatcttggggtttgtagctgttgattttcttttccctagagaaatggtcagcttttcttggttctttgtatgttgagtaattttggattatatcctgaacattttgcatattatgttttaagacattgggtcctgttaaaatctggagaatgttgaagtttttgttacagcagatgatcagctggtttcaattcatcctacatgttctctttctccttctgtggttggtgattgtcctgtcagtttagttttcaaagcctttgttgttcaggtcttccaggtacataagccacccagggtagtcagggactttggtcagtggtttatatagtagttaagtgtcaaagactttgctgtgcttatttggctctgttctgcatgtgcatagctcargggcaatcctgagacttagagttcacatgtagcattaggagttaaacattttcaactcctttcctctctgagatgtcctccacattttctggctcccaggatcctctcttatccagcctccaatggcccctttttctggtcacctagccagacagtatttttctctcagcctctgctccaccacacagttctgtttgcccgtaagagcgaagcagataaagagakaacaaaaacaatctcctattactattcttcagatgacagaaagctcttttcctggttccactggctagagagacgggtcatctctcacatttgtaggtgcctatgttgccatagctgtcaccaggmagtaactggggttagccaccctcagggcagggccagaaaaaaaaatagaaataaacataacaccacaatacagcaaagagatttcctacctatttcttactctctagcattcagggttcctttatccctagtccactggctataaataagaaatttctctcagagttttgctgtctaygctagctaggcagttttgatttggcccaccctcagatcaaaatcaggagacaaagaagtaaaaaaaaagaaaagaaaaggcctatgaaactcactcctgttgtgagtcattattcacgtttttactttaattcttaatctacctatttctgttcacttttgagtctttgagtagttgctttttatattctgtctagaatttttcattgtaatcagcgaaagaggttatagtcagcttattccatcttggctgcacccagaaggccataaacaatatttaatagctaaataatgctgcatgacactagtgagccataatgtattaaaccatttcccatagtgttggatatttaggtcatttgaaatttttactataaaaaatcaatgaatatctctctttatgttaattacttttttgcttaggtcaaaaataccagcctactacactttttgcatcagtatttactaaaactttttacatttgggttgtctccatccattaattatgaagaatccacagccaaatgcatacatatgtacatacaagattcagtttggataaagttctctatgcctgctacatagaaaagaactatttaaagtagacataaaattatatatctagataagtaaatagataactacctctggctttgactaggccagttagcagacatatagaaactacttatgagtaagactctaaaaattttgatttggttactaatgagatttaaatatccttccctcaaattcgaggaagctcttaactctggatacctgtctacaaatgagctagctttccttacaaagtgagtgttgtattatgcatgacttttttttaatgatacatcaagtcactatgatctaggaatctaattactttttttaaaaaaatggtttcttatctgagttattttattttaccataagagtattttgttagttactgtatcacataatgcatgcacatgatgctattggttgttaaaaggaatataggagaaatatttcccttttcattgtccttaataaagcatctgtggctctacatggatactgtgtttgaataacagccccttgaacaatgatgtccctccctccttcaccaattaccagagttgttggggatttgagagctaaacattggaaaagggtactttactccctgtgtagagtgctccagggatatgttctagagaaatgagtatttgaagaatagaaaaagtacttgacatgattcctcattataaaatcagattgtcataattttgatagaaatacattttgttgttyacatcttttctggcttatctgtggttccatttctgatttgaattattttgtactcgtgataaagaatcaatagcaattcaaaggttccttttgttaggctgtatcccaaagagtagggaaagatctttacttcatgtcagtgggtgataccactattaaaggtaacttgtgtttttaaaacaaaatacttttatcacccagaattacaatttcttaaaaatattgttatgctgaatccctcaaacaaaaatggtttatcaatttctttggacataggtagcagggaagaaaaaccactttaggtaaaaaaatttaaatatacttatggagataaataacccaagatgaggatttcttgaaatataggaaatttattaattgaattaatcttgaaagttaaattatgaatgtgataaattcacattttaaagaattttctctgttaattagctcatatgttcaaatgatatttgttaaataatctcttggaatttctgaatctttagtttatataagattcaaattattggctggttcttggtattgcacattcttgttcataaataatgcagtggttcttagaattgaggcacattgagaataaaatcagctaatggtagctttaatatcatgtgaaaaatatatactaatcaaaaaggaaaaakaactaattgattatcagccttgttcacaccattctctagcaaaatataaaatatgccaatttcataatttttagagaaacttgatttgatggtacagtgtgagaaccaaaatattaataagaaaataaaacattgtttctatagaaataatgccctatagtaattagaatactcatctgtcccctctcccttttagagaacattacatttgtcatggtaacacccatggaaataaatttttttgtttgtatgtttctttctcagtttgaagtttttctctttttgtttcagaaaaggggtttggaggtgatggagatttaaccgtggatctatagctgtggccaatcagtcagaagctgcccttgaacaagtggcatcttacgcagaccaacagagtatttgagaaaattgaaaacatgtaaccacaagaagttgtcattttcaaaaacttctatataggtggaaaacaaattaggtctcaggttgatggtggggtgtgtttatagtgatcctgttatatatacagatctgggatctttcgtctttattgtcttacgtttctaattagttgggaggatttattttgctaaacagtttactaacacattacatttcaaaaactattttggtacmtttcaaatacagtgtttaaattaaaatagaaaaataagggctcatgacaagtacattatttgattctacttaggatagctttttagcaggatctccttcagaatttttgtcttgactttgaatctttgcctgtttgtctaaacatttgactaacattctgtttgaatttggaagtattctaatacaagatttgaataaagtttatccttaaataaagtttatccttaatatgatggtctcattttattaaaaaggaaatagaactcttaaatatacttggttccatctctcctctgtaatggaggattggggaaagcatagtaatattaaatgttagctcttatgtattagtcacttagcttatactttaaatgcattttttcactttattcatcaactttgaagtgcatatcaatattatccatattttataggtgagaaaattgaagcttcataaagaggttaaataacttgcctaaggtcagatagctgatgagtctcagaggcttgatcaaacccagacctacctaactttgaagcccatgactttttaaacatgattttgcaaagcatagatcttagcttttagaaacagatctgagctatatgctgcttaacagatatgtgacatgggcaaattatgtaatattttgaactttgatcttcatctgtaaagtggtgataataaaacctttcttgcagtgtttttttaagatgagaaataattgatataaagtccctgaaaaggagtaggcatttgataaatgtgtctttctttaccctgaaaaatactcagtgtgcactatgttaggttatttctttttaaccttaacttattagatattttcaatagttattttctcctttcagcatcagcatgcgccatcaacaaaagactgtaaaaaacaaacaaacaaaaaagtgttgaatgggacatccatacagttggaatgcttatttctaaaatgaatagggaaaaggtttgctaaatgagactggggtaaaggtgtatctctgtgaagcattatcagactctgaagcctaatggaaatagaattatgaaccttaaaaacccattataatttccgtaagtagaagggagagaggtttgcattaaaagtaattgaggtagatgagtatattacttattcctggaataatgaatagacaagtttggcttactcatatagataatataatgtgaattgccagaagcaaagctcagagaagatgcattaggatcagattataggaagccttcaatttcaagctgagtttaactccctattttaaaaaatttaatctgaatggctacagaagtaaaatttctcagaatgagtgactttgcacctgacaccactaagataggactagggtaccaaatgagtggtataaatttttatgtcccctgggaaataaaatcattttccatgattcccatatttataagtataaattcttaagctatatttttacctccatttaatcgtgttattctgttttactactacatatagaattgaaaacattaaataaaattaactggaatatgaagaagctaaatgtaattctgaatgttttattatccttcacagcctttgtgtgagtaactaatgtattctaactggaatccctgctatatgctgtaatacctgtggaacctttctttagcaagtagaatgccttaaagaattaaagaaagtgtcaaaaaattaccaatttaatccactgcctttgcctcatctctaatattcttaacccttctctactccttttagtcatcatttgaaattgtgtagtaccaccaatcctgtgctgaaacaatggcttttgcttgttctaatttttcttaccgtgaccaaaagtcaaagagaagagctgccaaattctacctagaatatcatgttgctataattaaactccactgcccatagtagataataaaaggcaagaaattgttttttactctatgtttagggagtcttgtatcattgcaacaggttttcactgggattttgcctgttttaatctacttgtctgtcaaagtaatgtaaaaacagtttttaacttcgacactgaaaaggaatcatctttaaaattaaaatttaggctgatatgaatattgtatactgtattctttctttacatctaaagggaaaaaattcttagtccaagcttcaatcacgattacagtatagcctacattttaaaatatgagtcctttgggaaaatacattaaaattctctctctctctctctctctctctctctcacacacacacacacacacacacacataattttagacagttttgaaacaagacttttaaaaaacctattttaatcctaattgtatttctctattcctgaagagttctgtaacatgatgtgttgattggttgtgttaatgttggtccctggaataagattctcatcatctccttcaatcaagcagtcccactgatcaaaatctttatgaagtcctataaaatataaagtgttaatcaacatattaaacttttgagagcattaaacagtttggtgcccctaggtggcaataaagatttacaaattacacaagttccgttaggatggtagagacgatgtgctctgtatcagctgcctcatggctgctttagcagctgaatgcaaacgggataggagtgaggcaacctgctgtcagtatcctcaacatggaagtccactctaggcttcatacaaagaatattacctttaacagttggatttgctttctatgatatagaggatgtaaagcagcaaaattgactttctcaaatttctgttttcaaattgatatactgctttgttccattgtaaaccaactggaaatagtttaaatagtactaaagctgtattaagatagacagctttgtcctgagattcatctggtttaggtcatgaaaaaaatagtttcttacctaaatgcttttgtaagaatgctaatgaagctttgttgctaagatcaatagctgcatttgaatctatgtctccctttaatttgagcatgtgtccaattattttgccagttgcaaaagtgaagtcagcaaaattctggtggactgaacccctaaaagagaacaagacatttaaaagtcacattgtttgataaaattattatttttttagttagagtgtaagaaaggtactggtcttgttggtctgtttactgaaaaccaaagaagaaataaaacttgtaatttgatctacttagatgtgtttcaagggtcacaggctgtttgtttagggatcccagagtatattcttcttccctctagaaatacaactcaaagaatcttgttcttgcttggtatcttgattttagaagaaatgattcttgctttttagtgaattggaatacttccagtttgaatactggaatgtgttctgtattgaagggtccctgaactcagagccagagcctgctacctgccctcaccactgaacgtggtatgtatttgatgctagtcactttaaatttaaatcactttagatttaagccttagaggaaacagatttcaaacaccacttttcccagtattaaactgtaagcactttataaatatcatttgcactgctctgtaaattcatcaatagcctaacgtcaaatagaatggccttttttaagtcctcgttttctaccaccactgggacatttgacacttgatggccttcttgcactttttttctttacgtttccttaacattgcaccttcccttctgacgctaaccactctatgttcttcactggctcttcacccatttcccattggctgaatgtaggcattccttaggattctactggcagaccaactcttttctcactttgcaatctcttctacttcaaatgtttcatctgtgttatcatgtaaattatgtaatcatccaatgtgtggccagacatctgtgtacagattcctcagttctcaagctaagaaattgtgaagttaaaagacatcttcccagtcctgcccaaagctgctctgcctcttgactctgctggttcttataagcaacccatcattcttttagtcatctaagctcaaaacagggccacttaactccctctcactcttccccacattgtagtaggaaacttgaatgtcagaaacataaagaagataaacagcaggaatacaagagaattgcgagcagaagcttggatgatctgactgtagagaactgccagaggagaagaaatggaaggagtggtataaatgacaggagaagcagcaaagaggtgggtcatagtagccaagggagcaggaagaggggtggtcagcaatgttgaacagatgcagagagcaaggttgagactctgaagaggctgctggtgtggcaggcagcaggcctttagtgtctttgttttggcatgcccgtgggggcccaggaagctagaccacaagagtcaaagagtgaatagaagtaagcacatgcaatgactaatattggctattctttgaaggtttctagcagagaagggacaaaagcaaaggtgagagcttagtaaggaaatagggttgagggaaggttaggtgttctgtattatttccgttttagaattagaaagagttgcacatacacataagctaaatgaagtccttgcctgaaatacctaaacccttccttactatctaaactctcttgatcttacaaaatccaattttagtgtcatctatgaatccttttctgttggaagagacccctctattctctgagcccatagtgtttattgcctatactccatatatttccttcctgcctcttctcttctcctaaataaaccagatttcagataggaaaggggtgagttcaggtccatctttgctttgtaatatctcatcgagagttcaaaaccttatcaggagttctttttcacctccaggatacaagaattgccaacacgtcatggtaccccattatagctttggggaatttataaactcatattctttctcaacaggttagtatattgcaggtctcagtcgataatctgactttttctttaaagagttcctaccccagcctaatgatggaatacttccccctagctctaaccccaaaaatctgtaggcatattctggtgtttagattgaagtagcatgtagtataatgctaattttaattaccagtgatatagtttggatctgtgtccccaccaaatcacatgtcaaattggaatccccagtgtcagaggcagggactggtgggaggtgattggatcatgggagcagtttctcatggtttcacaccatcccccttggtgctgtcattgtgacagtgaattcttgtgagacctggttatttaaaagtgtgtagtaccttcacccatccctctcttcctccggctctggccatgtgaagtgctcatgccccggttgccttccaccataattgtaagtttcctgaggcctccccagaagccgagcagatgccagcatcatgcttcctgtacaggctgcagaactgtgagccaatgaaacctcttttctttataaattacccagtctcaggtatttccatatagcaatgcaagaacagactaatataaccagtatatatactatatacgttaacattcccattttaaaaagagtaagactaaatgtacttagaaactgagattatctaattctctccttattgaaagtctaaacaaccaattcagcaattctttaatagttaccaaatgatatcgattgatatttacccaagcttcaagtttgtttcacataatgaaataagtcactaatacttacctgattgtaatcatctttctttctttatcaggtgagtagcattttttcatttttatgatattagcaggatattggaaatattcagagttgataaaaaagaggggctgaggaattctggaatatacttcatcacccagtggaaacatccatgcatccagggcaataccacatctgtagatatttgttgacaatgatgaaattaaactggttacatactagccaacattgaggacatcctaataatgctaggattggtggacacgcaccataccagtttattatgggttatctgattggaataaagaggtatcatacttcaatgtgggaaagggatatgattaactttgtaaagtagcagacctggaattttatataatcattttctttatatgcctttaggaattgcaaccatttgagtgatatatccttaaaactttttattcaaaataa

SEQ ID NO: 5726 - DNA, 52745 bp, Homo sapiens
ccttctctttcagaggggcaggtccttggagttctcatttacactctcttctagggtggtctcatccagtcccgtaggtttaaataccatctgtatgttcgtaactctagtactgacgtcttctataaatgtcagactcacagatccaatgtcttctgggtatttttccacttgtatgtttttataggtatcttctaactatctttctgccttaaaatcctttataacctatgttttaaaagggtacccagcattttttttgttgttgttttgagacagtctagctctgtcacccaggctggagtgcagtggcaccatctcaactcactgcaacctctgcctcccgggttcaaatgattcccatgtgtcagtctcctgagcagctgggattacaggcacatgccaccctgcccagctaattttttagtaaagatggggtttcgccatgttggccaagctggtctcgacctcctggcctcaagtgatccatctgcctcggactcccaaagtgttgggattacaggcgtgagccaccgcacccaaccctaggatttgttttaatcaggtataccaagacacacagacacagaaatgactatgatgaaataagtttttatactcacagatctctagaaacaggaaagcagagcatgccacagagggccacacggagaggcaccagtacatgtcaggagacagagacagtgaggagaaaacatagccaagagcctttgttgtggttcctgggttgaggcagggtaagcaagcttagcataggctagttttaattagttcagtagactctggggttataggggctgtccccagttgtctggtacatggacctggggcaattaggaaaagagaatactggcctacagtatgacagccccaggagaaccctgatgaaggaggtgattggaagtatggactctgggttggttggtttgcctatgaaaggaaagctcagaggtgacttgttagctgtatctaggaattagctagccctgggacacgtagtccttctagtgtcgagaaggccccaagatgtcaaagcatcaaatatagaaactagaaaatgtgattattacacttgataatcctttctatttctgtaaagtcagtagtaatgactcctcttttattcctgatgttagtaattttagtcttcttcttttttctttttttggtcactgtaggcaaagaattataaattttctatcttatcaaagaaccaacttttggttttattctttgtattctttttaaattctctattgtgtttctactctaatctttattatttccttccttttgggcttagtttgctcttatttttctagtttctaagatggaatgttaggatattgatttgagatcctttttcatgtaggcattcacagagacatattttccttgaaacaatgctttcactacatctcataaatttgttttcattttcatctatctcaaaagtattttctaatttctcttgtgatttcttatttgacttattatttagaagtatattttctaattttacatatttgtgaatttttcaaatttctgttattgacttctacttttattccattatggcaagagaacatacttcatataatttattttacgattcttgagacttgttttatagcctagcatctggtatatcctggagtattttccatgtacacttgagaagaatatgtgttctgctcttgttgggtgaagagttctatagatgtctttcaggtctacttggattatagtattgcccttctatatccttgctgatattttgtctggttttttattcattattgaaagtagatattaaagcctccaactattattgttgaattgtctatttcttccttcagttctgtcagtttttgcttcatgtgttttgggactctgttgttaagtgcatttaatttatatttattatatatttttggtagattctttgatcattataaaatgtccttctttatctctagtaagaatttttatcttatgtctattttgtctgacattagtataaccactccggccctcttttggttaccatttgtatggtatattttttccatccttttactttcaatctgtttgtctttgaatccaaaatgtatcttttgaatgcagcatacagttaggtcatgttttctatttttgttgtttgttttggtccattatgcccatctctattttttaattggaaagcttaatccatttacatttaatgtaattactaataaggtaggatttgtctgccatttttctattttttctacgtcttttgtctttttttttgtttttcaactcctctagtactgccttcttttgtattaaatagatatttgccagtgtgccacttaaattatcttatcatttctttttttttctttctttctttttttttattgagatggagtctcactctgttgcccaggctggagtgcagtgatacgatcttggctcactataacctccacctcctgggttcaagcgattctcctgcctcagcctcctgagtagctgggattacaggtgcctgccaccacacctggctaattttttgtatttttagtagagatggggtttcaccatgttggccaggctggtctcgaactcctgacctcaggtgatccacccgcctcggcctcccaaaatgcagggattacaggcgtgagccactgtgtccggcctcatgtattttattggttattggttgcactaggaattaccagcaacatcttaatttataaaaatccagtttggattaataccaatttaatttccacagaatataaaaactgcttctctatggcttcactttccttccccatttccttctgctgttattgtcacaaattacatcttcaaaacattgtccatcaacttatatttgtaattactgcattatgtagttgtcttaaatcagatgatgggggttacaaacaaaaaatacgtttatactgtctttttcatttacctgtgtagttacctttactggtgcttttctttcttcatgagaattccagttgctgtttagtgtctttcactttcagcccaaaagactctctttagtgtttctcccagtgctagcaactaacgggctcagctttagtttatctgggaatatcttaatttctccttcatttctgaaagatagttttgctggatataaaattcttggttgattcttttcacattttgaatacatcatcacactaccctctgcatgcatggtttttgatgagaagttaactgtttttattttattgttgattccttgtgcatgatgagttgctactttcttgctgctttcaagattctctttgttttcaaaagtttgattatgatgtgtctaggtgtagatctatttgagtttttcctacttggaattcattaagcttcttggatgtgtagattaatgtttttcatcaaatctgagaaattttagccaaaatttcttcatatattctcgctttcctttctctctctctcttctccttctaagacttccattttgtgttattggtatatctgatggtgtcccacaggtctctgaggctcttttcatttttctttttcgtttctgttccacagaccagataatcatcaattgatctatcttcaagtttgctgattttttttttctttcgcatgctcaaatctgctgctgaacccttctagtgaatttaacatttcagttattgtactttttggctccagaacctttattggttccttattataatttctgtgtctttattaatattctgtttggcaaggcatcattctcatcctttcttttacatttttagagatggtttcctttagctctttgaacatatcaaaaatagctgatttacactctttgtctacaaagttcagcatctgggttttcttaggaacagtttttattgattgctcttatttcctttgtatgggtcttactttcttgtttctttgcaagtcacataatttttagttgaaaattggacatttcaaacaatgtgccaactctcaaagtcagatactcctctctcctcagggtttgattgtgcttattttagtattaggttggtgcaaaaataattgcggtttgcaccaacctaatagttgctgtttagtaacttttttgaactaattttttaaagtgtgtatcttcattgtgtgtgactattgaagtctctacttggtcaactaatgattagatggagatttccttaaacacctggaaccaatatgtctcctagtctttgccaaggggctctgtatgcactttggggtatgtcttcaattttcattaggcagtttgcaactctgcatagcttttatttcctgctagcacagagcctcagtgtcagctagtagtgagaggttaggatcttctcaggtgttaacagagcatgtgcacagccctacacatgcacatggccttctaaattcctgaaaatatactggagcttttcaaagcccctatggacatctcttccttcaacgtttccttttacatttctttgttagtctattgtttgcccctaccgttacctattgcctcagccagttacaatgttaaaatatttgacaaatcactccctcttcaggtggaaaaacctttaggactgagctagttccaaagaggttgaataaagacaacccttttcaggatttttttccagggacccactagataggttaaataatgactcttctttgggaatgagactttgaagtagctccagccctgtctcctccctctggtacaggtactaggaacgtgggctgtaagttttcaaggctgccatggaactagagatgggggtgcgataggactagggtaaattaaaatactataaatattgctgttcttactgagagtttgctgtttttcctgactaaatgccagatgggttgctgcaaacctgtgactaatttctagggctctaagaaagttgattctgacaatttttgtcagttctttccttgcttcctttatggaagggcaaacttgctgggatacttaatccaccattttcactgacatcactcttcctttctttttttaaaaatgttattttattgcaaaaaaatatggaaaccacaactaaaattaactttttttttgagacggagtcttgctctgttgcccaggctggagtgcaacggtgcgatcttgactcactgcaacctccgcctccctggttcaaactattttcctgcctcagcctcccaggtagctgggattacaggcacacaccatcacacctggctaatttttgtatttttaggagagatggggtttcaccaagttggccaggctggtcttgaactcctgacctcaagtgatccacccacctcggcctcccaaaatgctgggattacatgcgtgagccactgcactctgcctaacattttaaattaaaaattaacattttaggctaggcgtggtggctcactgtaatcccagcactttaggaatctgaggtgggaggactgcttgaggccaggagttcaagatcagcctgggcaacaaatgagacagtgtctctacaaaaaaatataaaaattatctgggcatggtggcacgtgcctctaggcccagctacttgggaggctaaggtggaaggttcgcttgagcccagaagttccaggttgtagtgagctatgactgtaccattatactacagcctgggtgacagaccaagaccttgtctctaaaacaataacaaaaacaaaattaacattttatacaatgaaaacattaaaatcacaattaaaatccaagagaaaacccttcattcaatttcctaattaaataaattcattttcatttgtccatgttactatctagtctttatccatacacttattatttacatttttgtagtaatagtacaggtaattttttttttttttttaaagatggagtctcactctgtcgcccaggctggagtgcagtgtcatgatctccgctcactgcaatctctgcctcccggattcaagcgattctcctgcctgtctcccgagtagctgggattactggcgcccgttaccacgcccggctaatttttacatttttagcagagacggggtttcaccacgttggccaggctggtctcaaactactgacctcaagtgatccgcccgccttgacctcccaaagtgctgggattacaggcgtgagccactgtgcctggcctatagttaagatttttatattcatttttagtgaatgttataccgtataccgtaagtactctccccccacaatctttctgcctctcatcttcccttttccattttcctaatacctcctactgcctcctctcaactacccttgtgtgtttcttcatctttctccgtgcttattcaaaaatatcctgccacacacacacacacacaggcttctctttttgttattcagacatttaaaaaaattaattcttgatcattcaacttgattatttagacatttctgtacagccatcttttctcgtttaccaccacatcatggctgtctgcccctctacatccgcacacggagctctaacgcatgcttgttaaacagccttcgtaatagtctttaaagatcaaccacactgttcccacgtaaccctacctcccaggtagggttcccccagtaacactttcacacataacttatttactgttccttttacttctggaagattccgagaggaaagattgctgggtcaaaggtcacacgtgtttycaattttaatagctattcctggattacctcytcaaagggctctaacaactcgcattgctctcagcgtgtgagagggtcctttgctctgaagggtcttctaaaatatttgttcaatcrttacttagcaggggctgggagtaacggattttattttattttattttattttttgagacggagtctcgctctgtcgcccaggctggagtgcagtcgcgcaatctcggctcacggatttgctcttttaaaggacatacccttttatgtttaaatgaaggaactcattgatgcaccgaggcgaaaggaacctttaattaagtgcgtcttctatgcggagtgatcgcttttgtcacttgttcgaggggtgagagctcccgtcagttgtccctgtttctgtgagccgtctacgaagcccgggcttggcctgggcgacgctgagcggctttaaccggcggcgtccagccggctccgccagcgctgccgccgccctcgaggctccctctgactgaaggcgcgctgagcatcgcggcattaggggctcctggtccctcaaacatccagggaagccattttcagggactaggtactgacccccgcgagccgccacagccacagcccgcgctccgggccgaacgcccgagctcaagagctcccgagcttccgtcgggcggcggcctcacagctgggggccctgaggcggaaggcgcagccgctcagctgcggaccgggggcgtggcgagggcgcacaggttctgtttttcgccggcccggggccgctttcggtttcgtttcccgccggcgtctccaccctgcgagagccgcccgccagccagcgtccgccgccgtccgcgtcgcgccacccgcggtccgacgggagcaggcccagcggccatggcccaggccggcgtcgtcggtgaggtcacccaggtgctgtgcgcggccgggggcgccctggagttgcccgagctgcggcgccgcttgcggatgggcttgagcgccgacgcgctggagcggctgctgcggcagcgtgggcgcttcgtggtggcggtgcgggcgggcggcgcagccgcggccccggagcgcgtggtgctggccgcctcgccgctgcgcctgtgtcgcgcgcaccagggctccaagccgggctgcgtggggctctgcgcgcagctccacctctgcaggttcatggtctacggcgcctgcaagttcctgagagccgggtaaggcgccgcgccgggagcgacggcgggcggaggtccygcgcgcccycacgcacttccagcccgcttgggggtcctacttgaagtttgagcagacaattcggtggctctgccctgacctcgcaccgtcattcactaaagcgagcgtttaatgagcacctgcggagtacctggcacagtgcgagggactcagggtcgagtggggtcctctagacgcctggggggagagagtgatttacatagagcatggtagtgccgggtggaacacccgggtgtggccgtgtggggtggggagggagggaggcggcggcttaggggaactccacgacgccgcgggtcgccccttgccagctttgaggccagacaatgaaggttttctctgcccagcagctggtagagatctttaaacccagttcaaccctattaatctgcttacaaactggaaaatgcagactccctgccatcgcccacaaggtcctggggcactggtccctgcccacccaggacccttctgtgactggaacacccccccccccccgggcatttctgggagcctgggcatttctgggagtctttgctctgcctggaatgcccttcttgctcttggttggccctatttgttaatccttcaggcctcaacctaaagatcacatcccatttgaggatttttcctccccttactcttggtcacagggaactgtttattttcctcatggcacccagctgccagtagaatagaaactccctgagggcagaggctccagctgtctccccagcacttagcgtccatgttctgtgcatagcatgtggccagtgggatgtgtggaagggattgctgaggtttatgctaaagaatttrggcctcaccctggaggtgatggggcgggtaaaatggcaggagagagcaaccatcaggtttgcgttttaggaagtctaaggtagtggtgtgggtgccaatttaagggaggatgttgtgggggaaccactgggaagctagtcatcaaggagaattccttcctcccctgctccctcctttcttgcttgctccctgttttgtgtgtgtgtgtgtatgtttgtcttaatagagtagatatttcttgctcatgtcaggcccagtagtgagcatggggtgggggccttgatccatacagtcattcagggatgcaggctgactgacctccgctctgtgcccctcagcacatggctcttgaggccagcctaggttatcaagttcgagggggctgatcgaaaagagggatgcatgggaggtttttgtgggccaggtctagaagtggtggatttcctttcacccacatcccmttgaccagaagctgtctcgtgaccctgtctagatgcagggtgactgggaaatgcctctaggaagcagctgtctggaagtatctagattagagctttccaagggctatgtgtgtgagaaatttgggatagctggtgacggtgtgatgagaggatatgtgagaggtgacgactcttcagtctctgttcctgcggtggcctgggtgttgttcactgagagagcaagagagggttttagtttggaagcatgcccaggaggcagctgttcaggtcagaagcttgggaggaaggccagggccccaatgcgctgggctggtttgggagatattgggcggtgtatgttgtagttgcagccccaggagtggatcagatctgaggtagcgtctgaggcctgaaaagaggctgagggtggaactctggggaaatcagccttcagggatgaggcagtccagggrasagcagggaacaacagcccacgaggaggaaggcacacagcaaatggtggctggatagagccactcatgggggtaactggtagatctgtttcatgttcatatttggtaaaataaagatggcagccctgttcttaagctagttcccaaaatgtggggtcaggtctgacttgtctcggaaatctgtagtgtgatatttactggctcagatgaccttgagttttcttctttcttcagttttctcttttccttgtggtttacacaggtgagtttcttgaaccttccatttctgactcactttagggagagtgggtgtggttggctgcacttttctgcttcccctgtgactctgcttgtcttcctgaaccgcagggtcagttcttttagaaatagctcatcagtcctgctgcagagctggtacggagtcctgggtgcctgactcttagtcctctactcaggaggcattgagcctggtggtctagggcacagtcccaagatccagcccaccttgtttcaacctgggctctgctccttgctagctgrtggcttcrggcaagtgactttacctccaggtctcagttccctcatctgcaaagtggagttaatgatattactaccctcacaggctggttgaggactgaatgattaactcataaaacattttggcaatccccgatatttggcagttgctcaataaattttagtagtcattatcattgttaccatcagtcatcgttacacttattagatatatttggctctggcagcaccaaattatttgcccctcttctggaatgttcttcctttctcttgctgtctcctcctcaccctttaagtattccactcaggctttatgccatccagcatgctcccctgatttcttccccagttctctcccagccctgactggctcaggtgcccttccgctctgcgctgacagattctgacaacagctgacgttgcactttccactccgtatcagagtctcctctatgtctgtcacctccgctagatgagggaaagagagcaggcaaggatggcttcagggtttttggtctgtgcagtgggagagggaagttgccttttactgagctgggggattctgtaaaaggtgcaggtttggggtggatcagggtttggcattctcctgagatgtggcataggaggcatggcagtgccagagtcaaacaaatgctgttggcctgactcttctgggtcctggtgactcaggcagtcatttaaaggtttatctttgggttctcagggcatggtgccaatgtctggctcaccctggtgcttatcagacgcttgtggatggaaagaatggaggaagagagcaaaaaaaaaaaaaagagctaggttcagggctctgtgtgtgtgtgtgtgtgtgtgtgtatacacgcctgcacgcatgcacatatgtaacctataatgataagatgccatgctcattgattcagcctgtggctaactgcttaccgactgactgctgtgcagcaactcctctttgtcattctcatcaaatgcttgttcagaggcgctgtcctgggccttagaccttgcaaggccccatctcctccttggtaaatacacattggattttttgttgttgtcatgtagacatgctggtttttctttttttctttcttttttttttttttgagacagagtctcgctcctgttgcccaggctggagtgcaatggcgcaatcttggctcaccacggcctccacctcctgggttcaagcgattgtcctgcctcagcctcctgagtagctgggattacaggcatgcaccacctcgcccggctaattttgtatttttagtagatacaggttttcttcatgttggccaggctagtctcgaactcccgacctcaagtgatccatccaccctggcctcctagagtcctgggattataggcgtgagccaccatacccagsctacatgctggtttttctctggtgcttgtaaatactgtcaggaagtgtttctgaaaaattgtcatgaagactgattttatcagctttcagtttgccagcgctgccataacaaagtaccatagactaggaggcttaaacracagaaatcgattttgtcacagttctggaggctagaagtctgagatcaaggtggcagggttgatttcttctgaggcccctctccttggcttgtagatggccaccttctcaccatgtcctcgcatggtcttccctctgtgtgtgtctgtgccccaatctcttcttttttttttttttgagactgagtctcactctgttgcccaggctggagtgcagtggctcactgcaagctccgcctctcgggttcatgccattcttctgcctcagcctccagagtagctgggactacatgcgctcaccaccacgccccgctaattttttatatttttagtagagacggrgtttcactgtgttagccaggatggtctcaatctcctgacctcgtgatcctcctgcctcggcctcccaaagtgctgggattacrggcatgagccaccgtgcttagccaaatctcttcttataaggacagtagtcttgtgggtttggggcccaccctrtggacctctttttaacttaattacctctttagagaccttctttccaaatagagccatatcctgaggtcstgggagttaggactccaacatagaaattttgaggagactcaattcgacatataacaccagctctgcttctttgcaggaagaactgtaggaatagtcacagcttgacaaccgaacacaacctgagtgtgctgagaactcatggcgttgaccacctgagctataatgagctatgccaactcttgtttcagaacgacccctkgcttttgccagaagtgagtgccaggggaagtctgggttccacagctccctggggacattcctgtgtcttgggaaatgtaatgactgggagtggaatgggtgggcccttggtgatctctggtctggtttccacctgcagaaatttggaatgtggagcagaaggagcagtgaagttcaagggccagctttgccaacaacccagttccacaaacatcacacagatgccatggatagctgkgcgactagggctgattctttaacttctctgagcctctcagtgtgctccattgagaaatgaaagggtggtatttggccttctctaagatgctttaagccctcagagcctctttgactttgaattgtagaaaagagagctcagagaaaactggggcttggggaagggagagttgatgagtcagtgtgggaagagtataggtagattgtagaggtccttaggatgtagccatttgatttgcattgtctcatgtgaaaggagcagctctagtcactttgaagttcttggattttcccagtggaggggctgattctgtgcagtctcctttccatttcgttcccmttttagccaagggcatttgttagcagccgtcatctagagtgagggatgtaatagctgtgttctgtgtggatgatggaatcacagcttgtgaagcccctttctcaccagtggactggccactggggaggtggtgtcgtgtgagaccttcctgaactggtggttttttccctctctgtcaacagatttgccaacattacaacaaaggagatggaccccacggctcttgtgcctttcaaaagcagtgcatcaagctccatatctgccagtattttttacagggggaatgcaagtttggcactagctgtaagagatcccatgatttctctaattctgagaatctggaaaaattggagaagttgggtatgagctcagacctggtgagcaggctgcctaccatttatagaaatgcacatgacatcaagaataagagctctgcccccagcagagtgcctcctctttttgtcccacaggggacttctggtaaggctggtggggagtggtaaggctggtggggagcacgggaggtcctgggctgggggttcccggattccagctagccattacatggaatgtgtgactttgggcaagtctggtgctgcttttagtaaaatggagttgatgatgctttcctaacaaggcagggagtgcgggggtgaggataagttgaaatcatagacatgatcaagcatgccatcctagacaaatgtgaattggtattgatggtgagtgaattctggatgggcctagtctgcactgaaatgggagacttggctcctccccctgtgcagtcacccctatcttcacccccacgagagcatgctcttcagggaggaacccaaagttaggaatgctgtgctgcacagctctggggagcattccttgtgttgtattctgattttacaaaatgagtgaaagaagcataccttaattatggcattggctgtattcctgacatcartaagtagagtttttgagccattgtaaatttgctttgttccctgctcatctccagcacctagacagtgcctggcccacagtaggtactctgacatttgttgaatgaatgagtgtgctaggatacttattttttaaaaaagacygtcaggtttagtgacaggcagattttgaacagagatttttatttaataagcatttcttgagtacctcttgtggggcagatgaataatgtggtctgtcagggagatgatgatacactggcattcattggatttcacagtatcagccattggctggccattctgttacccactctttcattcagcacctttgtgtgcttgccacatgctgggcgctgtcttgggtgctggttattccttggcgaagctgagacatgcctcccctcagagcagaatcaaaccctctcagctgtagtggtggctacaattttaatagagcacttcctagaatgtcagttgcatgccaggactacctgcaaacaaaagcaccactctaattgtacctgacttttatatttaaaagttgtcttttgaatttgttttttctttacattgtcttcaattatgttttgttgatttctttcagttgtaggaatcctagaagtagacaggttttgtattaaatagatctttaggagtatcttacagccttgaatacagttggattatagccttgtcagaaagggaggagggatccactgccagtgatgtcagctgcaagagcagtcaccatcgtcgggagagagggagatgaccttcggggtcccatagacctagattttgagtgaagtatctcaggggcttataaaaagaaaagggaagatgaataacgacaggtgacactaaatagggatkgcaaattaattttatgtgctcattggggttagctgggtgagggtaaatgtcataggtaaagactcattggcatggtgctagtaaaggtaaaatagaaaggatttatgtgccctttttatattaagatcctgataattaacctaaaattaattaaaggggcttcattttgaaatgtggactttctttttattactcttgtcttggtattagtacccaattctgatagttcattaatgaatgtttgctatatagcttcaaatctagtttataaaattagccctctgtttgccctcaggggtcatcacaaccttaggcatagaaggaattgtaagatgcctcaacatgtaagacaatggttctccccttattacaaaagtgtcccaagtcccacccctggaggttctgattcagtcagtctggagtgaagtcagtctagggcagaatcaggcacttgtgtttttaaatgggtctcctagtgaattgartggacagcgagagttgagaaaggagtccccttcatggagtcctggatctggcaagcagccatgtggcgtcaggctgccagcctgtcactaaaaagtagwggatccacctgtgtaggagcactttcaccccaaacacgatagggctttgtgagcttgcgttgcccacttttgtgcagagaactgaatgaatcctctttaactctcttttataccccatatcagaagctgacatatctttgtggtgtttctttgcagaaagaaaagacagttcaggttctgtgtccccaaacactcttagccaggaggagggtgatcagatctgtttgtaccatatccggaaaagttgtagctttcaaggtaagttggargaggctccttcattccacttgtgggaggggtaactgcttgtcattcccagagctgtgctctgaagtcaccccctaccaaacctctaccccatccggagaggatcagggcttggcactttggccaaaccaattctgaaggtattttgttggggagttgaagatggtagcaattctttgagttttcagaaattaaatgtggatcatttttgggaacataactggttcatgcaccaaatgagtgtcaagtattgagccttggtcagcttagcatgaggtcacagacctgcacaggacagggaactgctcagcctggtgggaacaaagataagggtgatgataggctgagagctcccttagaaactggaaaggacctcactgcgaaggaaacacttgtgttagctcttggaggatgagtagttgtttaaattggggttttttttctgtattgatccagtgaacaatccagtgatctcttttttatcagaagcagcaattctggtgtgcatgtgcgtgtctgtattttcactaaacctttgttttcttcttaaatgctgtcctgggctttgactgaagaaaggtttgttctcaaatttggtgactccccttgacaaccaccaaacttcttgtttcattttcagtttttaaaaattacccaagcaattaatgaatactttcactctgtaaaacagttcagtaatacagagtgaagcatgaagtcctccatcgtctttgcccaaaggtaaacacttcccgtgtggttgtgatatttgttttatatgtttttaaacagataggagcatgtgataatgttattattcaatctgcatcttaacattgtatcttggrgattttttttccatgtcagtatgtgaaagtccacctcattttaaaaacaagtgtgtagtagttgattataatgatgttccattgagcattgaagtacatatatgtgagtatttccatagatagattctggggaatggaatgataggtcaaggaatatgagctatatatatatayacacacatatatatgtgtattctgaaagcaatattactgagctatagtttacacaagctaaagtgtaccattttaaatgtatactgagttttgataagtatatatgctcatgtaaccatctctaccatcaagatatggaaccccctccaaaaacattgttttatgctcctttataattaatcctcaccccctagtttgtcacgcccaggaaacccctgatctactttttgtcactatagattagatttgccttttctagaatttcacatacatggaatcatacagtgtattatcttgtgcctggcttctctcatcagcatgtttttgagattcagtcatgctggcatatcgatcatttgtttctttttattgcacagtagtattccattgcatgattgactgcaatttgtttatccattcatatgttgatgaacatttgggttgttgccagtttttggcttttacaaatacaacttctataaatatttatgtataagttttcatgtggatatatgtttccatttctcttgggtaaaagacttagacatagttactgggttatgtcatgtgattgactttgtaagaaactgccaaactgtcttccaaaatagataataatattttatgttcccaccagcaacgtgtgagagtttcagttattgtatattcttgctaacacttggcattgtcttttaagttttagccattctaatcagtgagtgatgatgtctcgtggttttaatttgcatttccctgatgattaatgatgtttaacttttatttacatgtacttttggggcatctgtatattttctgtgaagtatctactcaaatcttttgcctattttttatawaacagctttacacacacacacacacacacacacacacacacacacacacaaaaggggtcttcagaaagtttgtggaaaatgcatattatgaaaaaattatgcatggagttcaaaagttttgcaccaaaataaattcatactaacttgtaataacatatctgaagaggatctagtttgaggcactaagaaggataagacatcaatttggaaagagcccctatcaaagcaacatgaattttgctgcagttgaagcaagaacaaatatcaaattaatggtgactcttgggtggcagaatgacaaaatcattgatgctttacaaaaaagtttatgaggacaatgtcccaaagaaatcagtttataaatgagtaagtcattttaagaagggatgagagaatgttaaagatggagctatgcacatcaatttgtgagaaaaaaaattaatgttgtttgttccttaattgaagaccagtgattaacagcacaaacagtaactgacaccagacatcttgattagttcagtttatacagtctgccagaaaaattaaaaattaaatttgagcaaactttccactctatgagtgccaaaaccattctgcctggatcagctgcagacaagagcagaactttgaatggaaattttaaacaagtggtatcaagatcctgaagcatttctctgaagagttgtaacaggagatggaacatggctttaccagtaggatcctggagacaaagcaatggctcctaaaagggggaagtggcccagtcacagcagaagtgatcaggagcagaagtcacagcaacagttttttgagatgctgaagacattttacttgttggctttctagagggccaaagagcaataacatctgcttatgatgagagtgtcttgagaaagccaaaactttagcaaaaaaatgcccagaaagcttcaccagagggtccttctccaccaccacaaggctgctgctcattcctcatcaatcaagggcaattttgcaagagtttcaatgggaaatctgtaggcattcactttacagtcctgatttggctctttctgacttctttttgttttctaatcttaaaaatctttaggtcggtcatggtggctcatgcctgtaatctcagcactttgagaggccgaggcaggtggatcacttgaggtcaggagtttgagacccgcctggccaacatggtgaaaccctgtctctactaaaaatacaaaaattagcygggtgtggtggcacatacctgtaatcacagctacttgggaggatgaggcaggaaagtcacttgaacccgggaggtggaggttgcggtgagccgagaccgtgccactgcactccagcctgggcgacagagtgaaactctgtctaaaaaaaaaaaagaaaaaaaatctttaaagggcacccatttttcttcagttaataatgtagaaaaaagactggattgacatggttaaattcctaggacccttggttctttatgggtggactaaatggctggtatcgtcttttacaaaagtgtcctgaacttgatggagcttatattgagaaataaagtttatattttttatcttttaattccgttttccatgaactttttgaagtccacttacatatgtaatattaacacagaattgggcagccatcatcataggcaatatgaaaacattttcaacacccccaaagtaaccccgtcttcattagcagtcttccctccccccagctcctgatgactacagatgaaggttccatctctatagatttgcttgaatatttcatataaatggaatcatacagtattggtctttagtgacagttatacccatttttattgggttatttgatctcttawtgagttgtgttttgtatatgatttatactgaagatatatccttccagtctttcatgtttatttcctttatagtgtacaggtattttaatagtggtgtccagataatattttttttcttttatggtttgtgttttttgtatcctaaaaatatttgcctattctaagcctacagaatgttttctcttatggtgttttcctagaagtttcaggggctaggcttttaggttgaagtctagctgtgaatacttgttctcttaactctgatcattctgtccttaggtatcgctgtttctgtgtgagttgctgcctctctttgaattgttttccttcatgtgttgagcgactcttggttgtctgtcacgttggtgcttgagaatcccgtatacctgttggttgatttccatggggctgatttggattccaggccctcattctagtgatggtggggaagaggcagaaggtcctgcttggtgaggtgggaggctggcatgtagcctaggactgggacgggggctttggtggccgtctcatttgcttttctcttgctctaacccttatattcacacttagtttaactaggaagtgcacagcaagcttccttcacacaagcaagttaggggaagggagtgcctctgccaggggctcccattgttctcattgggattggcctgggtatcgttcttgctcctggcttcatctgactctgaatctgtgatgaccccagatcttttctacttctgtggtatgttctgcacattttgtctgcatttttctctcttctttttatatctatttgattctcattgctccatagttttagcaattcttgaataattctggtcttttgatggtattttttattgttttccagtgcttttggatttattattctctctggcctgttatttcaaggactatagggaggaagggctggggtggatgtggtgttttgtctgccaaattgatttgatttctatgactcacgtcctagaaagcccctggaatgccaacgtgaggtagggaacattagaaggcgggaaaagaagttgagaaaggggacaggaagaccaggacaagggaaaggaccttatgtctctaccgctgtgctgggactaggctctcaccagctgctgtggctgcagtggcttacctggtgcctcctgtcctgggcaccttccagctgtgaacagtgtggtctatagctcagctttgtttcagaacggaagcctcaggcctgctgtttgattatagtgcattcccctggcccccatgtccttcctgaggaagcatcagcctggagggccctaaggagtgcaccttccccaggatgtgcctgtttgcagggagatcctgtctcaggctgtccatagtacacctgtgcytggggtttgtaggtatagcatttgactactgggatgccctggggtggccttctgctctcatccctgatcatttcctctaatgcctttcagggagggaacaggaactggttggttgtgaccttggaccatagctatttgtctttcctggcccagccctttaattatctgttgtgtacacacctgcttgagagagttcaagaggttcctgacctagtgagctgtccatgttcaaactggacaagttaggagatcttcagtccctggtgtggctgttttcagccttgttgaacttagaggagtttccttgcttgggtgtccccaccttgttccctcagtcctctcagcctggcactctcttctgccctgtctgctcggccccatacctgatcacacaatcccaggcaccctcccaccctcctccatgggacttcccccaccaggtgcttttgcagagcctgggaaagaagtggcattgagatgtgcctgaaagaatgcacacaattttagaaaattttaatttttttcaagtatcaaattagctagtttcattattattttgaaatacaaattaaaaatgtacaaaggacactcagtaagaaataagtcsccctcacaccagttttctccagaactcaagtcccctccaagaaacagccataattatccattctttgaatatcctttcatcgagactgtatacgtgtacaagggtatgtgtctgttcagtttccttacacaggcacgctagcatggctttctacctttttcacttaattagatgtataatttttggaatatattatatcttcttgtggttcaaagttcaaaacatgccaaaatgacagaagtctttgcttataactttgtctccagttaccaggttccctctgcaagaaataatatgtgcatgtgtgtgtgtttagttagaatatgtctaaacttacttttttttctattttttacccaaatagaggcattctgcaccttgttctctatcttcctgccttagagcaaatatctcagaggtagctagctgcatgtcacagtgcaaagagcttctcattctttttctctcctttctccctgtcctctcatgacacttctctgtgtggatatagcagaacctcacataggctgttgacaggtagggagagggtgtgggtggcgttcccggtggtggcaggcaccagcaaagacagggcaggcagcgtgtgcttggagtgatgagagaagtgaggatctggctgcccaggaggaacatggggttggtgaggggagcagctcaccggaacccataggtctgggccattgtgtggatgttggtgggagagtgtcagggaaggagtgagcatgttgttagccagaagagatgcaaggagcctgtaaccatgctgctgacctgccttcagttggacgtgttgggttgggatggatttctggtagggatgaatctggctccatctttgctgtgatctctgcccgtccacctgccacacagagagtgatattgaggagtcagactgccccctgcagtgatgagacctttgaccttcgcataatcagcttcttactctcattaaataaagttcatagatgatataaaccatcaacatacatatttctaaaaaattgccaggtgtggtggctcacacttgtaatcccagcactttgggaggccaagatgggtggatcacttgaggccagaagttcgagactagcctggccaacatggtgaaaccttgtctctacaaaaaatacaaaaattagctgtgtggtggtgcacacctgtaatcccagctactgaggaggctgagatgggaggatcacctgagcctgggaggttgaggctgcagtgagccgtgattgtgccactataccccagcctgggtgacagtgagaccctgtctcaaaaaaaaaagtaaggtcctgttaaaaagtgagacataaagaaggaagatgtatgtcttagtccattttgttgcttataacagagtacctgaaactggataatttataaagaaaaggaatttatgtcttacctatatggaggctgagaagtccaggttgtcaagggcctgcatctgatgagggccttcttgctggtggggactgcagagtcctgaggtgctgcagggcatcacatggcaagggggctgaccatgctagctcaggtctcgcttcctcttataaagccaccagttccactctcatgataacccatacacccattaatccatttatctatgacccagtcacctcttaaaggccttaccgctcaatactatcacattggcgattaagttgtaacaagagttttagaagggacagacatttaaatcatagcaatgtatataataaaatgcaaaaagtgtttctgtatctaaatgctcaggcatgccggcactgaaaaaacagactccaccacacatttcagaatgttcccaggtcagtgggcagcaccacacctgttgacaaccacaaggctagggcatgctgtgtattgcccagctatcttactcctttatgtttttatttcagataagtgccatagarttcatttccatttgccgtatcgatggcaattcttggatagaggcaaatgggaggatttggacaacatggaacttattgaagaggcatattgcaatcccaaaatagaaaggtaggaaatatgtcccttgtctctgctttgtgcctgggcttctgtgtgtgacacacacacacacacacacacacacacacacactgtgagcagcctagtctggaggtgcctgggcttctgtgtgtgacacacacacacacacacacacacacacacacacactgtgagccacctagtctggaggtagaaggtgggctggaatcgaaagtcagcgttcatactggcagtttggtggctttgttctcccacctccctctcctttcagacaggagcaatggggaaaggagaagatggtaccaagaccaagtattaagttctcaattgtttggtgctgggattgatcatgtacatctatactcattattacagaaaagcgagaggtgataatttctatttgtgaaattttggcctttggcctatacagccataccgctgaactgctgtttatggtttaacctttaactttttttttccccaagcatgtcctagtattttcccttagttagttcagagtaaataggggattcccggatagccttcttttcagatacttaacatatttttcattgaacttgctgaaatatgttgccaagaagagaatttgagcctgctttttgagtgtgtaaaataaatttgcacttagagtacaattacgtgcaaattgctattggtaaagtatgtgaaaccaattactcctgttaggaggattaaatggttcacataccaccccaatctttctttttgaggcaaaatttacacacagcgaagagcctagatattaagcatacagttcagtgagttttgacaaatacatacacttgtgtagccagcattctgattgagatacggatcattttcctcaccccatctccttccagtcagtgcctactccyatcgttcaccaccgttctgacctctgtcaccatagatctctgtcttgcctgttcttgaacctcatataaatagaaccgtgtggtatgtactgttgtgtctggcctctttcactcaaattcttcaccctccaaatgggcaaactacaaggtcagacacttcccggcagaggaagcacaggtggccaataacgtggatctggatttatttctgccactcattataattgtcactgtgacccactttttgtatatttcttttctctttttgatcttcttgtagatttttttcctcacttggttttttccctttactagtttggacgttatatactgaatttttattttttcagtggctgctctggaaatctaaacagactctttatcttaacagacttttagctgagcttaagccaatcagtgccttttgtcattctgtcaaacaatgaaagaaccttggacacttgaattctgactagtttcattcaaacttatttactaattatataaatttggccagattacttaatctcattttacctcagctttactatatgttaggtagacaaaataatagtttctacgtcacaaggttattttgagaattaaatgagttaatatgcataaaacactcagatcactgccaggcacataagatgtgggtcgagcgcagcagctcatacctgttatcccagtgctttgggaggctgaagtgggaggattgctagaggctgggaatacacaactagcctgggcaacataaagagaccttgtctctacaaaaatttttaaaaaaattagctgagcatggtggcgcgtgcctgtagtcccagctactcaggaagctgcagagggagcaccatttgagcccaggagtttgatgctgcagtgagctatgattgtgtcactacactccagtctgggtgacagagctagatcttgtctctattaaaaaaaaaaaaaagaaaaagatgcactgtatgtattgctgmtataatatttttaatcctagaggttagaaattcgtattgttttaggcagtcagtatttgtttaagcttacacaattaccattttgtttcttactcaccattcctttgctcacacttctccttgtttatcattttctttctttaagttcctctgttggaggttgctttaatgagagtctggaggtaattgtgtattttgttagtctgaaagggtttttattcccttctcattcttgaaagatagttttactgggtattttccctcagttcttcaaagactatttcattgttgtctggattccattgcttctacttagaagttagctatcagcctaaatcgaggtggtattagttcacttcttagggctgctgtaacaaattaccatgaacttgatggcttcaaacaacagaaatttattttctcggttctggaggctagaagtccaaactgaaggtgttagcagggccttgctctgtctgaaggctttacaggaggatcctttcttgcctcctccaggattctgatgcttagaaatccttggcatgccttggcttgtagacgcgtcactccaatctcagcctccattgtcacaggcatttccccatgtgtctgtgttcaaatttccctcgtcttaaaaggacatcagttttggattagggcccacccgaatccaatatgacctcatcttaacttgattatatctgcaaagaccctatttccaaataagatcgcattcatgggtaccagggattagaccttcagcatatcttcttggggacacaattcaatccagtataatagatagtctgtttttttctctctggctgtttttaatatcttgtcattctttggtgctgtgcagtttcactaaaatctgtgtgtggatttaaaaaaatttatgctactcatattttgctgtgctttctgatttcctcagccatgatctccttaagtattccttctctggaattctcattagatatatggtgaagtcttctcactttatcttttatgtcttctaacttctcttttattctctttctaaactctgccacatttcttcctctcaggctctcagttcattagttcagactcttctgagatgcagtgtgtcccatcgaagtatgatttttaaatttcagttaatttaattatgtttaaaagttctaaggtcgggagcagtggctcacgcgtgtaatcccagcactttgggaggctgaggagggcggatggcttgaggccaggagttcaagaccagcctggccaacatggtgaaactctgtctgcacaaaaaaatacaaaaattagctgggcgtggtggtgcatgcctgtaatcccagctactcctcgggagggtgagacaggagaatcgcttgaatccgggaggcggagatcacgatgagctgagatgatgccactgcactccagcctgggtgacagggtgagactctgtctcaaaaaataaaaaattaaaaaaaagtagtaaaaaaggaaaagaaaaaaagttttggagggagtggaggagaaagaaaagaataatgaatagtaaaagttctgtttttttccttaaatttacccagtcagtttttatagtctcttgattcttactcatacttttgatgctcaattcctttttaaaaaacatatcacgtatatctgcatctgagaatactaatgtttatagttcagggtggtctgattttgtttttgttaacttttgctcatagtgtctttgtttccacattttgtgatcgattttgagctcatgtttgatttgatggaaatttctttggaaattctttttttttgagatggagtctcactctgtcgcccaagttggagcgcagtggtgcggtctcagctcactgcaagctccgcctcctgggttcatgccattctcctgcctcagcctcctgagtagctgggactacaggtgcccgccaccactcccggctagtttttgtatttttagtagagacggggtttcactgtgttagccaggatggtctcgatctcctgacctcatgatccacctgccttggcctcccaaagtgctgggattacaggcgtgagccaccatgcccggccaagaaattcttttgaggcctgagttgaaggtgaatttctccagaggggatgtgtgtttgcttctctgagaactgctaccctgggtggtctttgcagctaattctcccaaaatgtgaatcagtctaaaacttctgtgaggcttgagtggtttatgagttctcagaggaattttttcctcctttatccagaaccaacattaatacaggcaggtttccttgccagatgtctttgcaaggcaagtcccctctccagtccccctttactaaggtgggtcatcttttagggtcctggttttacgcagaggtatctcttttgagattcagcctcctgccgtactcagaccctacatttgtttcctgcttcccttttgcggccaaagcccaggctctctgtcgttactcatcgatactgccctgggatagctgctggctctcgccctcctctccgctctccagtttcgtaccttcctttggtctttaggcagtactgcgtttagaaagggagcgtgtcctggtggctcaggtgcaggctgtgcagcccacctgcccacctgaaagcccagctcgcccgctgactagctgtttgaccttgaacaggtttcttcaccttcctgagcttctgttttcccgtctgtgaagtggagataatagtctcaacctcatagggttgtgaaaatgtcatcgcctaatacatataaagtgcttaatgcagggtctggctcacacagtaaacactcagtatatgttaactattgttatttttggcttctgaggacttccctttcttgccagctcagcagtgaattttaaaaaagaatgatttcaccagcatcttcggcattttgtactgagaggaattttcgtcataactagtctcccacattatcttgattttgatatttttatacctcaaaactgatctgaaaaagcagtttcctctacctctgggaactttttctaaaatgtgcatgccacatttactattcgcatctcccagctatatgttctcaagctgagggacctgtgtctgcttggctggtgggattttcagtctgctgctgtttttcttctgtaggatcctgtgctctgagtcagccagtacctttcactctcattgtctgaactttaacgccatgacttacggtgctacccaggctcgccgcctctccacggcctcctctgtcaccaaacctccacacttcatcctcaccactgactggatttggtactggagtgatgagtttggttcttggcaggaatatggaagacaggtaagtgtgatggaaagagggtgaatgttttgtcctgaggatctgtaagagaggagccaaataagagcccccatattgttgccaggggcatccttgagagagctgaggatccccaggtgccagtgtggctcacttgctttgggagaattatggcaaaactagataagttggaatttatttgtatgagctttcatctttgaagagcttccatctgttggctcatgagaactgaatgacaaatttgtagtgagatcaagtttcttcattggttttattaaatgggatagaaagatgtttctcttgttgaacaggtaacttaaccccacagctggtgcctatgtgtgcaagtgtgtttgtgtagctgtgatatagaggtaaaggcttttcaaactggttgtctgccatttctgcaactttacagaaggtaggcaaatataagaaaattgatttatatcatgtataggtttggaatccaagccaaataacaaaaaatagttgctgtcaattcttcgcaggtgtttgtggatgggtcagattaaagggagtcccctggtcacttatagaaatacaagtttaggccgggcgtggtggctcatgcctacaatcccagcactttgggaggccgaggtgggcagatcagttgaggtcaggagttcaagaccagcctggccaacatggtgaaaccccatctctactaaaaatacaaaaattggccaggtgtggtggcgtatgcctgtggtcccagctactcgggagactgaggtatgaatgagaatcacttgaacccgggaggcagaggttgcagtgagcagagatcacaccactgtactccagcctgggcgaaagagcgagattccgtctcaagtacaagtttagggaaggcaccattgataaagaactcaccctccaaaatgaaaatcgataggtattttgtactcttctgggtttcaagaggctatattgaagctttagtttcttattcttaactgcactcagaatgccctttaactctggtgatgctctaatgtaagctccatgagggcagggacttttgtcttttcttttgccccatcgtatcccgtgtgtggaatgatgcatagccagtcctcaggaaatagacattggctgatggaaggaggagggtgttactgacagtgtctgttggtcagctggagatggtcactctcagcgatggccttgctgccttgcactacttcctttcccctctcctcccctgctcccctcttgccagcaccagcctctccttgcttgctgctctgccctgcctgcctttcccacctgtctccctcccgtcgtgggcgacctgggactctctctgacctgccctgtgggactcatccagataagctctctgggtttggtcaggagcgtgaggggaagaggctggcgtgacatggaggagggggagaggatgactgcccaatcatgctccgggaatcccggctctcctggagatggagggacagatggcaggcgcaacacacttagcagatgtgaccatcacgttcattctgtttggggatctgtccggcttctcggaggagaccgctggttgctgaatgagatgacacagggctctgggcaacccatgcaaaagtagggttccccggtggtgtctcatcacagctctggttgttggggccggtctcctccagtcagccaacacctggagcgtgcccctttctttcctgtgctcctcttcctctgtggcagtgcagaaactcatggcgagcagtttgagaatgtctggggatgaaccgcgtgtggatgttattgatatgccacgtgctagtgggggcgtagaaacacatgtaggcttggtggcttcaggctggacagcctaggatgatctggtttgtcttgtcctccctttcctacacgtttctggtataaccccacatttaggtttcttttttagttttctgttaattgccacttcaaaacagttttctcttgattcccagaaaagctaagttttttctgtctgagctcaagaagtactccaacatttcatgtcaaaatcagacacctgctggtcctgccacaggacatgtgggaatctgtcattccttccacatctcacttggtgcctccaggtgctaaaccgagacctttctcagcttaacacataatatggctgccattgttggtttctccttccaaacctcccactgagggcaaaaaaactctttgctttttgctttctgctcatccacctgcatcttccctccctctgtgaccatccatctgcagggattttgactggaggcctgggtcggggcaggacgcctgcatctgactgctgcttctcctctctgtttccctgactcagagcttcatttcctcaggcccaaaggggagggattgttttcttttcctttcctcttgttgtcagaaagggatttttatgccacatcctcttcctcccggactctagtctaatggcttggttttgaaggaagacagacttcagagagagaaacttaggcgccgctatgagaccgtaaactaggaggctgctttacaaaccattatacctcttacacccgccccttatggtcctcatggggccaactcatgtcatccctcgggcttgggccttggctcaggcatctttttcttccaagaaacctttgctgggtctcacccttccttggtcattcttagttacccatctcagcgtctagagcacccgtgagacctgtgtgggaccttgtgcttgaggctttgaaatatctgggtacttttttttccccttctccattgctggactcagttgcgcagaggcatgggtgactcttgtcttgtctcacttttgttctgttagtaacacctaaagcttgtgacccaggagaactaggatggtagcagtagggggagcaggaaaattgacagggacagagggagttagttggttataggttgaataactttaattttagttgtcagtgtaatctcaaatttaataagaacggtgatgataatagtaacatttattgagtatgttttgttctgggcactgtactaagtgctccacatgccttatttaaatgatytctccagccctgtgaggacaatatagtcctgttgtataaagggatgaatatggcctaagtactattattcatattataagcttgagataacggaggctcagggaggttaagataacttgccaaagttatagagccagcaggtttgggagccagaattcaaactcactccagctgaagctacgagatttcctgtaggtaattgtggaaggatagggattgaaatggataatttaaaaaatagatgaatgctcctagggaccagaaaaagaaaaccgcaaggaagaggaccgagctctgattaaaggatggttgcaacgtgaatagacgggtaagaccagcctggcttgggctgcccagtcaagcagcactccagaagtcgctgttgctgttctgccggcatttgaatggctgccgtgtcctctgtcctaggtgacttgagtgccctcctctccgttgctcccatccctgtcttcctgctcagcaggacccatatttactgcattgtgtttgctagggcagcttcaggagacagtcatgttgcctccattctgtgcctctctctcctgccataccatgctccctggcctccatcttccccaccacaggactgtccaccaggagcacctctgaaatgtggcgtgggtgccaccagcgtttttcctcatcacgcagtttcttgccttcataaagtgtctggctttccatcgcagggcacggtgcaccctgtgaccactgtcagcagtagcgacgtggagaaggcctacctggcctactgtacaccggggtctgacggccaggcagccaccttgaagttccaggccggaaagcacaactacgagttagatttcaaaggtatcctgtgccctgccctcgcccagcagagcctgcctgtgttggctctgtccctacaccttaaccctggaggagccgtgtgcacatactgagrgcctgggtgggtacaggaaagaaaagcaaggtaccaggtccaaggtagacctggagacagatgacactggccctgtrcagtggaggaagaactgcatcaaggatgtgaggagaatggaccccaggaggggcaggagccccaagtgtggaggacaagcagggtcagcatgcatgtagcatggttgtcctgctgtatccgaggactaacctgagtccctgacaggtgtccgagcagctccgtcgtgcagtgtctgcctttcactccctgctgcagcagtgctgctgtcatcttttttttgagacggagtctcgctctgtcacccaggctggagtgcaatggcgtgatcttggctcactgcaacctccgcctcccgggttcaagtgattctcgtgcttcagcctcccaagtagctggaattacagtcatgagccgtcacacctggctaattttttgtatttttcatagagacggggtttcatcatgttggccagactggtcttgaattcctgtcctcaagcgttctacccaccttggcctcccagtttgctgggatttcaggcatgagccaccgcgcctggcctgctgctatcttttctgtaggcgactttggagttgatgggtttaacggatggtaggacacagagtaattgaaagtccctgagaagcagattttcgtgcactcatggtgtcctgaggctggggctgaaatgtttcatcctggttgccttacagagagaaataggccaccctttggccagttcctccaagtggctgatgtgtgagaatttttttttttttaagttttaattttgtgtagtttctcttaagccatttcctcatgagtgtatcggtccagctttattcagttccgttttgcctgtatttcacattttaaactctgagtccttctgaatgttcagcattttataagggagtaagtgggccttcctttaaacacagtttatggttttctttatttttgcagacgtttattctatgtggagtatagtgaagtgtctggtgaattatcctaaaaccactttggctgtctgtttctggccttggttttgcttgtggtttcgtggcacttgtggttttgcttagggtagatcactacccccttgacatgccctttacggtgaagtttttctcctctagagtgcgaactgcctctgctggagagcgccagccacgtgtggtctggtttgctttccacggcctgacacacaccagtgcatgagaggggaccagtgagagcatagacgttaatcaaatcaggactgccctgaaggtcaggactgtgtggcaagcatacatctgactgctgctgacagcaatctggaatatttcttttaaatatctggaaaatatcaaaacagatagaaatgtcagatactaccttgatcattcccaacctaggccacaccctggggacataacagaacctcataatagggatggggaagagcacacacgtgcagtttatgattcctgcagactgaccgaagcccatttgagtgggcacaattcttctccttctcctccttctcctccttctcctccttctcctccttctcctccttctcctccttctcctccttctcctccttctcctccttctcctcctcctcctcctcctcctcctcctcgtcctcctcctcctcctcgtcctcctcctcctcctcctcctccttgtcctcctccttgtcctcctcctcgtcctcctcctcttcctcttcctcctcctcttcctcttccccctcctcctcctcttcctcctcctycttttggtagataccagtatccataaaagaagcttgagatgaattggcttcttcccccacaacttcacttctaagtataaagcaagtctcaaagcaaactgccacacatatttattagctgtttattaggaagcaagtacatttaaaacacacaaaagagcccaaatgagttgttctgaaggtttagggatgattcagttctgcccttttagggactcttgtcataaatgattcactcaaggcaaatgccaggattccagaggcagaattctagcatcctgttaggtggtgtctgacggggcagaattccccaaagacaggctgtagcctagggtatcctctggaagggtaaattagggaaaagacctcactttactgtgtccatagaagggtagggaatgtgtctgacacacatttagccagtccacgtatcttagctcacttttaatttcaccagtgaaagccatttaagattcatcacagatggccagtaggccagtaacacccatttaaatatgccagtgagaatggtcttgatgggcggctgagtagtgggtaacagaaggggtcatggttgctgcatctggatcatgggctctgaatgagaatgtggatggacctccaggaatagtgaccatctcagctgcaacctaagagacacacacttggataaccatccagtttatgctcaactgcaataaggctaattctggacacctataatttttaatattaaaatgttttgtaaatgaaaacaaaattagttgggcatggtgtcacaaacctgtagtcccagctacttgggaggctgaggtgggaggattacttgagctggtgagttcaaggtccacttgagcaacaaagcaaaagaccccatctcttaaaaaaaatgtaagacttgagagggttttcctggcaggcaaggacagaacaaacactkctaggtatttgtcatttttcaacttgaggggccagttcccccaaccccaaatcctcaggatgagtatgggattcttgagggtggggaagcaagaaatttgtttattaaagatattattggtttagaaaggttgatgaatactgccatagtttaactaaaacaaagtcataaaacttacattaactctgaatcccactaactcaagacatggtagtttgatctcaggctgggctgaggcttttttatatccaagctgggaaaaattgccaagcaaaataatggtttaaacaagattggaaggaacaatttaaaagcactcatgtrtaattgatatgtcaattactaatcattcctctattcattaaacccagtctcctaaggatacctrttttctttatgaatatttgaaatgtgtaaaatggccctatttttaacagactgattctgggttttacacatttggataagctttcaaatctatctaatttgtgtttataaaacattgccatcctgtgtgtatgtatatgtatatgtatattttttcactggttatgttttttttcagccttcgttcagaaaaacctggtctatggcacaactaaaaaggtttgccgcagacccaaatacrtgtctccccaggatgtgacgaccatgcaaacctggtaggttgcagtggggggcttggtacttaggatgtaatcagctggggtgtgctctgcagtggtgacagaaaacctgcctcagacagcacccgggcaccgttggcttgtacaacgaagtgctcccacactctgttatcgtttgtcttctactagttggaccagagtgggaattaccctgtgggtagaagcttcgtgatgcataattagaaggctgcctgttgtgatctgcgatgattctctggagaagacagactctgaaggcgagtctagacttgaagccaacccatccgtttgtcttttctgtggaatcattgagtcatagacttgaattttttaaatgttgaaataatgaaataatgatggaattacaccaataaaaactcatgtattttagtatttgaatatcacggaataccaaaactctaaaaacagatattgcagtcactaatgggcgagcttcgtcagggtgagtttctttcagtcccaagatggctgccaggagccaccaggttagcctgtggcctgtgagcccctagaagggaggagagaaacctcctatagcagatgaggggaaattcttgtgctttgtactgatcagaccctatctcaacctctggtgttattttaggcttggggaggtgggatgggattggaactgagaggaaggggtcagtgttctccaaaccacacagccacatattgggggaaggtggcctgcatggtggagagggaccacagtgcccatacagtttgggcttgccagagccagtgctgggactttaggcagtgttactggtagctggctgcaccttctgttcgcctgagaggtctggcttgtgtctattttatggagaaccaacaatgtctcttttggttcttttgttttgtgaagcatgcaaaggtcgtttttaaatgagtttggtacaagatagaggagaaaggtattatcagtccacgaaactgccttgtgagtcagacctagcaaagtaatttcctgggaatgtgccttactttttcctttttaaattaaaatttatttttgcgctgggtgcagtgactcacacctgtaatcccaacagttcaagaggccgaggcgggtagattgcttgagcccaggagttcgagaccagcctgtgcgcctgtagtcccagctactcaggagactgaggtgggagagacacctgagcccagggaggtcaaggccgtagtgagccaagatcacaccactgcactccagcctgggtgacagagtgagacccgtctcaaaaataataattattattattattgtttttgactatgtgtaaaaccttcacgtgattaaaagtcaaacctatataaaatggtatcctctgtagactgtaacttcctccctgttatctctaccctgttcccactgtgggtaacattagtttccggtttctcttttttatgtttctctttgcaaaaataagcatttgcatacatacatataaaagtattttcttcttgcacaaaagggaacatgctatctatactgttctatacccttttttgttttcacttaaaaatagatcatgataatcactttgtttcaattcattaacttcctcaatccgtttcttctttcctggttctctgtaatatgtatgtaccatagtttacttaatatgtccccttttcatggatgtttgtgttgttttcagtcttttgctattaaaaagtataatgtcgtgatgaaccatttgatgtatgtgctgtttcaaattttggaggtatggccaggtgcggtggtgcacacctataatcccagcactttgggaggccaagatggaaggatcgcttgagcccaggagtttgagaccaacctgggcaacatagcgagaccctgtctctttttttttttaattaaaaaaaacaaattttggaggtcgactgttaggtcagagtcgtaggaagtaaaccaaattcctttccatgggcttgaatcattatgcacacccactaggacgcatgagatgccacagagtgagttgtcaggctcttgggcttttgcatttctcaggggtaaagatgggtcagtggacttcagtttgctctctcttaggagtgaggttgaatattatttctaacatgtaagtgccatttttgcttctttttctgtggactgttggtctttttatccatttttctatcaactttctggtatttttcttaaatatcaagagccttttatctattagggaggttggccctcgttttgttatataaatggcaaatattttctcttagtttgttgtttgccttttgactttgcctgtgaagtattttaccataaatatatatytcttattattttagttaaatgtatcagtgtcttactgattctggatttagagttttggttgattatgaccctcctatttctggaagtcattttttattcttttcctatacaaagcctaccctagacaaggtttggaaaagtctctctgctttctgagagtagatctctcttattctaatttagtttttagggggccacaagaagatgccaaatgtccaaactaaaagtgattcagactaagatatgggtgatttggggtctcctgtaagcggagtgtcacacactgttcacacagatgaagtgttcagttcttctctctgacccatgtgccagcagctggttgtcattaactccagtaagcaagtctgcctgggcctgcatggccaattgggaatctgagggtagatcactttcagaaacaacttttctgtttacacaattaatgaggtcataaaatgtaatgtccatattcagaagtcataatacaggagtgtcatgtaaaatttatttatgtatttatttatttatttatttatgagacagggtctcactctgtcacccaggatggaatgcagtgacctgatcacggcttattgcaccttccacctcccgggctcaagcaatcctcccacctcagcatcccaagtagttgggaccacaggcatgcgccaccatgcccagctaatttttttatttgttgtggagacagggtctcaccatgttgcccatcctctatgaaaatgtttcattcatgtgattgggtcttattttttcttttcttaccttcttttgtgtatatgtatattttaaaggctatggtagaaactacatgttcttcacttaagtacaagtaaatcaatatctttgccctcctatcttttcttccatttgccttcctctcaactttttttaaacctcaagaggcaccattattttatactctgaaagtttcattaaatttactcacatttttaccactttgtcctttcagattaccttagatcaggggtgtccaatcttttggctttcccaggccacattagaggaaaaagaattggtccacacataaaatacactaacactaacgatagctgaactaaaagaataaaaaccacaagaaaatctcataatgttttaagaaagtttacagatttgtgttgggtcacattcaaagctgtcctgggttacatgcagcctgcgggctgcagsttggacaaggctgccttcgatgaagatttgttggaaaactgtttttggtttgtctgaatatgtatgtacgtatgtatgtatgcatgtatgtatgtatgtattttgagatggagtcgcactgtcgcccaggccagagtgcagtggcatgatcttggctcactgcaacctccgcctcttgagttcaagcgattctcctgtctcagcctcctgagtagcttggactactggcgtgcgccaccatgcccggctaatttttgtatttttggtggagatggggtttcattatgttggtcaggctggtcttgaactcctgatctcaagtgatctgcccacctcggcctcccaaagtgctgggattacaggcgtgggccactgcgcctggccaacatgtatttattttgccatcaatcttgaaggaaattttcactgggtatagaattttgggttgtagggattttctcttggatcattgtgatgatcactccactgtattctggcttccactgttgcttttgagaaattgcctgttggtctaacaggtgcttctttgacagtaatcactcttttttcctttggctacttttaagagcttctgtttgtcttggaggtaggcatcctcactaaagtgtatctaagtatgtgcttttatttatcatggttgagattctttgggsttcttaagctgcggataggtgcatctcatcagttctctttgaaaatcgcctccactgtcttgtctctcctctcctagagcttcacttaggttctgatcatattcaagttctcactgttctccatgtctcaacttctttcctgcattttccatttccttgttgctgtgggccacattctggacaatttcatttcacatatgtttcagctcactgattcttcctccagctggtctaatctgctattaagcctgtccactacacttttattattaaagattgtacttaattctgtaagttctatttggttcttttttagatcttccaggtctttttatagtttcctgttccttgcatatgtttttaaagtttgtctttttttttcctttaaacataggaagaataattgttttgtaatctctctgataatttcagcatcttaagtctttgtgggtctgtttttggctgattcttgctggtaggaccttgcttagttattttcgaactgtgccattttcccaggaaagttatttgtgggagttctttgaggcttaggatgaaggtatatgtttcatgccagcagaaacagaaggtagatctatttagaaagaacagtgtattctgaaacttaataggaatgatttgtaattatagtttcacagtccttgttcctgaacccttgatccatatgtcttttgaactgcttttatttaatttttagaaagataatgtgatgcttgtatcacgtgacactctgtattttagcacattaatatttctgcagtaaacaatatgcatagtcagtttaagaaggatagatacagatcacagtggcctcttactaacttcagtcaaatttctactgccaaatgacttttgatgtcacttttatgtttttcaaaaaatgttttatttcatattttctcctgcttttcctgagctgtataaaaagttttaaaatgtcaattatacctcatcgaggccttaaaaaaatgtctttagagctcttagaatttcagaattgtggataaaggtttatggctgtgtgtgtgctcctttaaccatgtactccatcccttttatcccttttgtgtggtagttgggacacaggcragaaatagatctctcaggactgtttggagtttggctacataggcaaagataaaagtgctctcatgttgtgaatatygtgctaacattcttccttgccttctacctgctcttgaaatatgatgtgctgagackcaagactggtgatattggctagcagagaccacctatggtatatttgctttgtgtaagaataaaatgtctacgtgtttttgtttacatttttgtagcaataccaagtttccaggcccgaagagcatcccagactattgggactcctctgccctgccagacccaggctttcaggtaggggacgcatgcgcctggggctggacaggaaggtgttctgtagaagtgggtgtgtgtgaacagactgtgccattcctcaacactgaagaagctgtaaggctggggctaattggggcaggagggcagtgacagatgtgggctttatttttgtttttgttttttgcagagggttttgttttttcaccacccaggagttggctgtggctctgaggggaggggttgtcttgtggagggaggaggatgagcgtgaaatttgctagaaagggcagaaatgagtttatgggctgggcttaaccaataaataccaattttattaagcgagaaaaggagaagcagcctggggaggacctgagtccgatggacrtttggaatggggttactgtcaggagggaaggcattcacgactagcagacaggagaatggacagtcaatttggcagcttgttgaggggctctgaccagtgggagctgtgctgagtgcaggagagtacgcagactaacatctgaggctgcccgtctgcacctgggctgatgtctgccagctggccggctgccgagcactgtctaactcagctttaaaacgtgacggtccctgtcctgggaggacttattgagcttgtataaggcacatgcagatgccaacagtgcaggcaagaagtgctaaggacctaaaggggttcaacatgtttgtctagacgactctgtggtccttggaccatgtagtccaacctgtgtctttgrcctgtgtgggacaagaaaaaaaaaaggcagggacatccaggggataccctcgatggtggcttaagcatcacgtgtctgtcctttagattggtttcacagtgatgaggagcaaagtgactacaatttgcaaacatagtaaatcctcaacatcatcagtaggttcttggaaactgacttaaagtggcacaacatactgtctaacgaaaccaatttcccatatgctaactgacataaacaagaggtttgttgttttacttaaaattgcagtttccaagaacctatcaatgacatttcatgaggaccgattgtctcctgtgcctggagaaaccacaggagaatgtkgtcactgctctctgggcttttgtgcttctgcggttctagtgtttacaagaagctttgggaagggactgatttatattctgcacgttgatggtaatgcattaaaaacatttgccccttgcagaagatcacccttagttcttcctcggaagagtatcagaaggtctggaacctctttaaccgcacgctgcctttytactttgttcagaagattgagcgagtacagaacctggccctctgggaagtctaccagtggtgcgttggggctcgctcttggtgggctggtgrctctgtcccttcacaccactggctggttgccacatgtggcccgggtttccaggaaaagcagagcggcagttagggctgccatgtgctgggagctgtgtgtctgctctccttcgtccgctcccccagggcagtgtggtagcacatcccattgtagagatgagggcaccgaggcttcctggagcataccacctggtcccgttcatgagtggtggcaaagctagcactctcacttgtccattctgccttcctggagaccagtgggatgggtcagtacagcccaccacaccattagccccaggaacataaggctgtggctagacagcaggggtctcaggttcatacatgaggactggcttgtccttgagcacccactcacctgtctatgtggggaggaatcctacaataggtcaccatggcaggctgggtcttgctgacctgtccccagatggggttggggtagtgtaatgtgtactctgtgcacagtgatgaagtctgggaatgggagaggggagaaggatgggcacccactgaccagcagcctgaaaattcctacagcatcccagggctcagctccaygcaggagcaaggtgggggtggggttgggggaaatggtacccattttccaagggctgctctgcttttggagtccagggaaccgctgctgtctggagctgtggagggagggttttcacccagctcccacgatcccccttcttttccacaccctggcttgtggctggagccttacaggcctagtcagggtagcctgtgacctgcgtctcttggtcccaggacacttttggaattttggaaaaatgtgttgttttgcatcargcyggctgtatttggtggccggcacactctgcccccagcacacattcttctgtgattctaggcaaaaaggacagatgcagaagcagaacggagggaaggccgtggacgagcggcagctgttccacggcaccagcgccatttttgtggacgccatctgccagcagaactttgactggcgggtctgtggtgttcatggcacttcctacggcaagggtaaggcatgactggcctccaccagcaaaacccatgttgctttgcccctgcataggaacagactgctagagggcatgaggggaccagcctgagctgatgagcaggttcagactccatgtgtggtggtacctgggcacagctaccagtcacatccttgctcttgctcctctgggcatggtcaggagcttggccccaggtgtgggcagggtggcctgcctaggctggggtgttgcttccctgtggagcagaggccctgggagatggtgacagagacgggagaggagaggggataccttcccagccctgatgaagtccctgactgtgcctttactattgatttccttagaatagaaaccagaaaccctcagagatactcatgtaaacatgtattctagctatcacgtgagttatctgagtgttttcttgtctgttatttttaaacttgccaaagaaaattttaaaatactatttctttggaaatcgaaattcaagaaaattggaataataataattaaaaaaaacctctttgggtaaattttacctgcgttcattggttttaacatgctgccacttctctctttctctctccctctctctttctgcaccattttcaggtaggtggcatatattgtctcctttcaccctttaacacatcccaagaacaggacattatcttctgtaaccacaatatgcttaccaagttgagaacattttctgcccagcagtccatgttccgggtccatcagttctttgttagtcagtttccgtctgaggcagcgatggcaaggggtcaagatggacagcagccagtggtagacttgtggatttaaatgtacaggtgacagcttctaactcagatttccatttgacaaggctcataattctatacattgggctgccagagtctacagactgcttccgtatatgggatctcattcattttccatgccaaccctgtaaggttgggctgaacagccccattttatgcctgaggaatctgaggtttgggggattaagtagtgacgtgtccacaggcctttaggtttcgtggggcagatccggaacttgaaaggaatttgctatctcagtttggtaactcctcagatgctgccactcagaagggtgttggtatcactgatgcatgtgacttcatgagggagagtggagacatggcacagagggagggagggagatgcggggtggaagagtagaggccctggcgttgcacatcaccaggacgctattcgcagtgtgstgacccttcctggctgcaggcccctccaccagctgagccctcgtgtgtcatttcagggagctactttgcccgagatgctgcatattcccaccactacagcaaatccgacacgcagacccacacgatgttcctggyccgggtgctggtgggcgagttcgtcaggggcaatgcctcctttgtccgtccvccggccaaggagggctggagcaacgccttctatgatagctgcgtgaacagtgtgtccgacccctccatctttgtgatctttgagaaacaccaggtctacccagagtatgtcatccagtacaccacctcctccaagccctcggtcacaccctccatcctgctggccttgggctccctgttcagcagccgacagtgagygcacaggagtgttccaggcctttcacctgctctgccttgaaatggctatttgggcctttccttttctttttaaacagaaacttytaatgaactgttctcttaacattgayctctcaatgaagttatgttcttaatctcttgctaataatgatttttacttttaagtcacttttgggttcactagtggaytaaccagaagtgattgtagttgagtccagttttgctttttaataatgygttgaagttttagtttttactctttgttgactttgctgcttattggcaccagggacagagtttctagatacaattttatggattggttttaatttttatgagtttgtctctgcagtgattcggtttctcagagtctcatggcatcatagtttttccagaatgacacagtagccaccggtggatgacagcccacgggcggcacagtcacttctgcctgttgctctgacaccaacccaggcagctctgctgtggcttctcctgggctctggcattagttggtctgtgtcacattgtcagaacaggtggctgctgtgtggtgccatcgagtccctgctggttccccttgtcctgggagggtcacccattgcccaaggaagtrcatccmcctggcaggtgacctggaggagtagcttccccgaggacccccaggcttggcctgtgattgcgcaaacccacatttcctaagcacactggamacccttcgagtgtgggttttaacatccctgtgagattgaatacttgtgycacacatgtcacaaaagagtatggaaataaaagaaaatttatccgaagtggatgaagactgaagctcatttttctgcgtctattgattgagcacctactgagtgccaggcgtttttctgagagtcagggattgcctttgttcatttggacttctgtaacaaaacaccattgactggacggctcatcaacagcagatgtttatttaccgggtttggagtctataaagtgcaacctcctgcttcctcatagattcagtcttctcactgtaaccctacgcggtggaagggcctcttttataaaggcactgaatctcattcatgagggctccgccctggtggtctaatcacctctactttaaatactatcacctcaggggtgaggatttcaacattggaattttgggggtcgtaacattcagaccgttatcagggctgtgacagagctgatgacacggcttggtgagctacgtatggatttattaagaagacagtgaagctgaaggttcagggcccctcacttgctggagcccctccccaggccctaggagggaccctagcaatatggtcacatggtcataggttttgataaaatttgcaaatgttacactttttttttctctttcctccaattcgtagataagtttcaggccccgtaagacccaggttcaccactgagcaatgtgctgtgcatgtggagagagtgttgtgtgtgtccctcacacgtggcagtttacaggagcctcccttctgggctttggctggttctggccctgttggcagaggggctggcggggccactggtgtcaccaggctgtcagccctccctactcggtcctcactacatgctttttgcccagcctccaccttcctgaggacgtgtgtctgctggcgacttgctgcttgggcttcagttggcttgcctgtatttctcaggtccaaggtgaatatgaacccatttttccatctttggagtgatctgaaaccttaacacaggcaagtgcagtcaagctggaggagagccaaggtaaatgaccagaggaacagcaagaacaacacagcttcacccagcagctgggtcagccacatggttgcccatggtatgattttcagaaccccctccaaatttcctcacagcctgactgatcctgccatttcactcattgctttttcattaagtcattggtcctgctatggtgtagttgggcaggggcaaagaggtgtcagagaaaaccattaaatcagatgcatgtctgttgctaaggtcttgcatgtaagtgaactgattctatgcttctgaatcatctgggagctggggagatttggggagcagaactggttcactgggggtgtagatggggagggcggccagagggatccggtgggagatgctcagttgctccggaaaagtccactgagctgtgaagactctggcagccatggctgggtgacctggaagaaagcaggttaggaagagcaactccttggaccagcaatgctagggagggtgggagccacatggccagattgcttgatgacggggagggagccgttcctgccggtgcagaaagggtgggcattgtgatgggaaggggtggaaatgactgtgactctcaagatgtttggtgccaagaggtggtagggtctgggacatgggtgtatgtgtgtgggattggccagaatctttgtgaggactcagttgggaatctagcaagagggttttttggaggaccaggcggtgcggttccctgccctgtgatacctggtgttggatgtgaacagtgggatttaagcagaggtggggttggtggcctcacacagtagaaggactggagtccagtgaccccagcacatgaggaagcctctaccactgtgtctgaaggtggtgaccaactgagctgggaaggcgagggaagctggatggagctgacaggccggggggcggggccggaggtcccaagggaggactcaggttgtggggctgtgctccaagcagggagctgagtgcgccattgggcctgtctgcaggctgaggttctatggtggcggcagccgtggggaggtcagggattgtgggacaggcagggaggccgacaggttcccaggggtggatggttttctccagtgagtctgagtcccaggctgggcattgcagaggggccaggtgatggagaagggcaggtggtggcaacaagggtgtggggagggccacaggacagccctacaccttgaggcagcagtcactcacaggcctggcccagtgctgggcagctggggtgtcctcttcctgcctggagggccagagaataagagaaggggccccccaagggggattttgagggatacagtgggtgctcctggctgaaggggatgggggaccaccaaacagtggaagcagcagtcccagcagtgaatatgtggaaactcattctgccaactctcccaaaatggcctgaagtttctaaaggtgggtcgtcagcatctgggtgtcacataaggggcttacagatttctacaagatcgttctctatacaacattcaacctcttaaagctgctcaggtgtcaactagaggacaagtggtcttttgatcgaggccagcctccttattttacagaagaggtctctgaggcacagggaggtgatacggctcttcaccagcagccatgaatgcgcagctgctggtggctgatcgtgagactgaccttgcaagtgcttggttgaatgtgaactgcttagcaacacaatacttatttttacaaaaaaaatcacctctatattttgattctttgatcaaaattaatatacagtgttttttgttttgtttttgttttttttgagatggagtctcactctgtcacccaggctggcgtgcagtggcgcgatcttggctcactgcaacctccacctcgctggttcaagcaattcccctgcctcagcctcccaagtacctgggattgcaggtgcccgccaccacagcctggctaatttttttgtatttttaatagatatggggtttcaccatgttggccagactggtcttgaactcctgacctcaggcaatccacctgcctcagcctcccaaagtgctgggattacaggtgtgagccaccgtgcccggccgatacagtgttctttaaaagaaaaagtatatcatttttcagactctcatttttctgtcgattgaaacttgactgtaaagttggtactaccctacctaggaaaatcaaagcataataaagctttggaaccactgctgaggttgaactttcgataaatgtcattctctacaactccacaatgcacgagaagctgaaagagccacgagctagtgccatcaggacaggcttacctgggggtcctcatgtgccctgcaccatggattcctttcagcacaagcctgggacttcctttaaaaccccacattctcagttgttttgtcaaaactacattttcacttatttatcagcaattcttcatttagagagagcactggttcaaaccccattggcaatgtcaaaaccaagtgcaacaaacgtttattaagcatttaggaaatgttatgtaaagaacctcttatccttgcatgccaggcactctttcaatcacttcagtgacatttttccaaaattctgaacatccacacttagggttttctttgaatttgggggtgccctccccccacccggcagccttctgtgtcagcgggatacgatcttgatatagacaccattttttggacctagggcagatttggattctagctgcagcggtacctaaaatagagaaaattaaaatatttgtcaaagagatagtagcatctcactgtacaaatgaagacttggaggttcaagaaggccaagtccgttgtccaaggtcacacaagaagaaagcagagagcaaagccccaaacctatctttcagtgactccagccgtccctgctgatcctccccatctcactctccagttctggccagtaactgagcaatgccctctggcccaggggctctggggaaagcagcttcatgctgttcctgctcatgtgtgctgtggtctggcctcactgacatccagaaagctttcctatgtccagcttaaaaggcagagccagtggtggactggggactttgaagaaaaaccaaagaattactcgaggagttgggtttcctctggagctgagtaaaatgatgagccagtggctaatgtgacagcaaagagtcaccagggtcttagtgcttggggctgtacgtgtctcctgtgggagccatagccctcaaaggcatctgaaaaagctgcaggccccagcacttgtctgagcagacaaggaagaacggggagcccttgactcctggctggttcttaagccggggagtgccaggcataagcagcgttttgggagactggtctggctgctgtactgtatgttgagatcgtggggaagtgagacaagccccgcacacgtggaagccccgatgcagtggggctgctcctccgtctgccccttgacctcacttggtttggctctgctctgccgatctgcccctccctgtctccagcccagagtatgtggatgcgttcactttcagtatctcagactctatgtcccccatccaagctcattattcctccaggaccagcagctggtcccaggttctctgtcagaggcactgcctgtctcaatctagaattgttgctatctgtcaactgtgtccttatgccttcctatgcctgcctgtccaggtctgcagctgaacagtgggttccgggtggcaggacaagcatgaggataggtgcaggggacagcagtggtcaggataggcagggaatagctaacgctgtgcagagacgtagccagatgtcaggaaggagggagagcttgggagtgggcaggatctgggtgaggacccccgtttctctcatctctggctgcttatccatttgctcattaatgtttgttgaatgaatgagtgagcacctgtcatgcgcctggcattaagctagatgctggaaagtccaacaatgaatatgacagactgggtccctgccatcacgaagcctgcagtcctgctgtgtggccttaggcaagttatttaacctctctgagctttgattcctcatctaaagaatgggaatagtcactcctactctgcagggttgctgtgagtgtgaaagcaggggatataagctccctgacctgttgaggaattggtctgctggttctggagtgtgtgatgtgggggggagatagggctggaaaagtgggtgaggccccatttcaggagagctcagctctctgggtgaggacagggtctgtgcaccagtctaggacctcaggaatgaaggcatatgttgttgggaagaggctgtgtcaccacctgtgagagggaccaggctgtggccatggggacacgtgagtgtctgcacaaggggggaaggcaaagctgggggtacccttcaaggagctgaaacccttcagcttcccctccaagcagacagcaccttgctctgtcaggaggagccagaggaagtgtccccaccttctgtaggacaagccatgcaccccccaccccgcaaaggcaggcacatgtcacaactgcaaatgccattgtctgtgtgccctttgtggaagtgggaagagctacagcaaggtgaggtccagccctggtgtgcagagaacaatactaataacaatggttaacacgtgctcgggttggcttgccagggcttacctgagcgctgtgtgaactcactggatcctcacaggatgttgagaggtagagggtgttattattatcacccccactttacgaatcaagaaactgaggccgagagaggttaaggagcttgcccaagctcacggaggcagagcctgatgttgcccccaggctggcctgctctcacgcagagaactggggtggccctcccacccctgcccctgcccctgcctctgagcaggggggcctcacctgggtctcagggcaggcttggaaccggaacttgtgcagcacgtggagcagtgtcaacttgacctcaagcagccctagacgcac

SEQ ID NO: 5727 - DNA, 216929 bp, Homo sapiens
  misc_feature (1)...(216929): n = A,T,C or G, or insertion/deletion polymorphism (see Tables 1-2)
gggaggggctaagaaagggcatgcgatttgcaatctaagaagccactggcaacctcagagcaaagagtcagtcctaactgccctctgccgtgacagtcaagcccctccaggggttgccagataggagcaagctctttcatgtcagtgggaggaaaccttacaattgaaacttcacactgtacagaaatgcacaggtccactgattcatggctgaggtaggcttaacaggacctgcaggcttttaaaagagctctcctcagtctacctttatttctgcctccaccccaagcttctttctgcaccatttctacctagtctgtccaagttcagcctggactgcaggtcaggaaaaccaagctattacctacctcccataatcacagaaatttctctgcagggttgggttgcttctctgaactgcttctcatgtgcaaatccatcctaatctgccattcccgcaacctccaacaaaatcgccctaccttctgtgcatctacattacagcttcttttcattcataggctgattgcattttttttttttttgccatatttcctttctgctcaatgctcttatggcatcgctttgcttttcctgcacccctgttcaggtgtctgatcatttttcttctaggagcaaaagcagaaaaatgaatgatgtttccctattcccctgattttgccagtgtaatttctccaagactgccatttccacaatcagattcccttcaccctgccaagcctcgctctcccctttgcccttaaagccacagctctattgttcctcatttgaatgaaatgtctactcttttaaattctctgtgagtgtaatgtcttgttactgaagctttcagttaaagagttttgttattaaatactactctgttacaaactgtatcattgaaaccgatcaaaggtttaaagcagaaagacaaggtaatttcttaagaataatccaaacaaaaataggtctctattatgacttgttaagaaacagaattaaaataaagggagaggaagaagaaataaagaatgtgtggaaaagatagaaagatacagagaaaaagaaaattagacacacagtcagaaagagaggaaaatagagatacagcaagagaccaaaagagaggtgtgatatcaaaagacagaacttgagatagtgacctacctccctcaggcacatcctccagagataaaccacaggcacaggctcacacatggaaaataaagagctgtcaggaaaataagagcaacacacaccaagtgagaataagatacaagccacacagacatcatgctaagaataccctgagagtaagagagacatacacacctaaatgcatacaccaaaaagagggttatctctatcctgtggccttgaagatattgtgatgttgtgcagtttcacaactataggcatacatgaaaaaaaaaagaccctttgttccatgtcctgtaagcaaaatgaacttgaaatgaggtcaaagctcccccatgttcactctaccaactcctgagaaagatatgacttgcaccattttgtagaaaggcaaattaaggagaggtaactggtataaatggttactaaatcctttccagttttcttgcctttattattgttcttcaatgcaccctgaagttaaatggtattttggcaacctagagttccatgtactgttaaaaaaaaaaaaaagtgatttttttaaatgattgattaaactccttagaacactgactgctaatgtgcttattaaataaataaaatacaatgcacactatctctagccaaatgggacagctcccagacccctctcattgtctcaggcccatgactggtaaggccctctctgcttggagcaatctctggtgctcttttctggtacctccttagccctccccatccttctactatctccacccataaaacaggacacatattcaggtagaatttaagaaacctgtatttccctccaaactagtttcaccaaagtcactaatgcaactcttgttgctaaatccaattgatgcctttctgcctttttttttttttttttttttttgagatggaatttagctcttgttgcctaggctagagtgcaatggcactagaactcggctcactgcaacctctgcctcctgggttcaagcgattatcctatctcagcctcccaagtagctgggattacaggtgcccaccgccacgtctggctaattttttttgtgtttttagtagagatggagtttcatcatgttggccaggctggtctcaaactcttgacctcaggtgatctgcctgcctcagcctcccaaagtgctgggattacaggcgtgagccacagcacccagctgcttttctgctttcatctgacgtgggcctctcaatagcatgcagcactgttgaccttgctgggatgttgaggaatcccccgtcctggctgtcctccaacttctctgccctcttgtccatggggagctctttttcctcttcccatgtctcaaatactggtactccccaggttctgtcacagatcctctctcctcccagctcccatgctctccttcagtgacatttcactgttaggtttataccttgctgccacttgactgcagtcaccggaaggaaaggagacaattagtatactcagtctgccaattcatgaaggaaaatctaagctcatttcaagaatatttttccgttatatcatacgaacttcgctagctcaattgaatgcatgttttgcatctcatggatacagcttcagtcatggtggtctgaagagaaggtggacctctgtctgtatggctccatcttgttccccttccatgggactctatttccttgcccaagattgttcccttcttatggggaggagactacctgtaaaatgttttcggttgacacaagtgatattcattttaagactgcctagaatcactcactgctagacagcagctgggatggacttagaggcagttactgaacactggtcagtgctgaattcaggggcagtcctataaagcagggccttgctccaagacgctgccaatccagttatgaacacagggtacctacacagaagacaagagtcagccatctagggtgcgggtatgctgtggacaacagagtgtgagcaacaggcaggaaatgttctgtgagcctaaggaaagatgagacaaaagtcagtggggctggtcagagggaggagttagaataataataacttttattgaacccctactatgtgtctgccctctatataaaactctctctctaatctaacccagcctcagaggctgtgatgaggactatatgaaatgccttttatcgagtttgtagtgttgtgctggacacaagggagcatgcaacaaattgcagctatcatccattcaacaaatatgtgtgcagtactcaccatgcgttaggcaatgcagttattggacatacaatccaaaacaagaaaaacatggtttctgtccttactgagcttacagtctagagacaccttgtccaaaatggtagccactaaccacccatggttattaaaattaaaaattcagttcctcagtcatactagccacatttcatgtgctccacagacataagtagctacactgccattatggcagcaagttctaatggccagcactagaaaggggcagagagacatgcatgtagggtatgtattaacagggagttacatacctgtgtggtgaaggctatgatagagatttacagatgcaaaaggagaacattactattgttctccttctcataatcaaaatacagacactgaggctcagagaggttaagcattttgaccaagatcacatagttaagtggaagagctaggatttgaacctaggtctgacttactcccacgctatctcgggctgttttgtggaggaggtgagccaggcacaggtagaatctgcttaaagagagaagatggagaaggtacccctctgggaaagtgggtgggaaagtgaccgcttgggcaaaggcacagtgacagagatgggtgaagctggcactgggctacaagtaaaccagtttggctagagaagcagtgacttgctgaactcatgtccttagaaagctaagtcaggactcgcctgccttgatgaaaagccaaggcactcagccccacctgcagaggttgagtccttagaggatgttagccaggagcgtggcatggccagaaccacgtattatgaagatggcaatatttaggatgacctgggccaagactaaagttaaagattgcagggaggatagaagggaaggagataaatgaccggtgtggagcaaaaaacactagagtgggagccacgagacctattcctaagcttcaatactgtgtgacattgggcaacagattttacttctctggactccatttcttcaactctaaaagggcagggctggcccagatgacctctgaggtccttttagcaacagtagtctaggattctgcaaacgtgaatggcattaggttaagagaagggataggaagtgtagcattgattatgggggcaaggaagaccgcagagtacaagatcacacagaggaaggtgtcgtgatgtaccactaaaaaagtgtgaaagagcttgccttttttgggaaggactgaaggatgggaacggaggatggagaccggaaaggataagaagtagtgagaaaatcacgaggttgtttttaagaaagttatacagtgttagagatcattattttacacagatagcttttcaacttttttaaacccacgattcacagacggaaataaaattgacatcatggtccagtacacttgtccagtacctataatcgaaacaaaaggtttatgaaacaatagttgcccttactaagggcaatggactctaatattttctattggattccatttcgttctttttgaaagctggttgccttccgctgcatttattttatgatctattactgtgtcacgacccacagttttaaaaacagtgcctaagaggagactcaacaagtcttcctaagttggaggggatggcagggcatcctatccaagcatccgggaggcagctggagaagcaaacctggagaggctcccggctggggagagtctggagagtgtttagcggaagccctgataggagagagcgctgagaaaagcgaggacccagagagttgtgagctcccattcaagtgatggagtggcggccctcgggacagtgtagacgcgaggaggagaagatcagggtggcgtggaagccagactccggcaggaacccagcgaccaccccgggggctgcatttccgcggcgtgcacggcagggcttcggtgcctctgacctcgtgtggctttccgaagctcctccactcacccgccctcctccggagcacggcgcgcgcccactccttcattcattcattccactcctacctccgcgagcgccaaccggctgtgagatgggcgagccactttgccagcgtggggctctctttcgggtcggttccctccccgccagcacacgcgcgcaccctcgcacctgggcacacacgcgcgcgcgtgcacacacacacacaaagttctgggggcccctctgcagaccggctcggctgcgctggactcggagccgtgcgcccgccgggtccaggccggccctctcacccactacccggggcccgccctgcgcccagtccccccgcgctgcgcggcagcccctcccagcgcggtcccctcgggccgccggcgcggctctgcccttcggttcggccttccccgcctcgcatccgtgccatcggcgctcgattgcgcgcggactccctgtggctctcccggccccgcgccccgcccccgcccccgcccgccgcccccctccgccagcaacttttgcggagcccccgcgcccagccatgctgagctgagccccgccggccctggccgcgcgctgcccccggctcccgcccctccgcggatccgctcgggggccgcggccgctcggcgcctcggcctcggccgctccgcccgcccggccgccccgagccccgagccccgagccccccgcgccgggcccgggcggcagcggcggcggcggcggcggcggcgcgcccggccccctcccccggcgccggccacgggaggcggtgatgcgggcgcgggcggcctcggctgcgccgagagcggagacacaggctcaagatggcagattccgactgaggctgggggggccgagctcgcgcgccgctttcccgtccccgttgccatgaaccgcggacaccccggccccgatggcccccgtgtacgaaggtaaggggcgcccggccccgccgaccccgcgcccgccgccctccgcggcccccgcagctttgttctgcccgcggccccgcgcccgcagcccccggcgcctgccccagcccccacccggggcccgagggggccgcgaccccctccctcgcccggaagatgaccgggacccggcgccggcagggtcttgcttccagggcggggagaggggccgggggcgcaggaggggagggggcgtgtgcgagggtgggcggctgcccggggagggcagggacgccggggaaggcggaccggtgactgtgctttttatttatttgcgataaatgaaggtgatgcggcttagcttccaccgcccccccacattacctttcggagcacctcctttccacttcgctctccgccccgcgccccttcccatttctttccgcgcccaccccacgctcctttattctccgcgagcctccgattttgggggggctgtggaatcggaatgcacggggctaggtggggagagaggagagagatgaaaagtccatgtcagagccaggcagaacaatgaaataggcgaaaatctcccctcattagcgtgtggaaggggacgtggactttgggttttccagccgggggagcggcggagacgtttttctggctcggtctgggtcgatctgtgttgtgcaccttcacctggcatcggggtatttttccccatttgactgcctttagcaagaaagaaaagaacgcaaggcagaaaagcagtaggtctgcctcgcacactgtctttcgtttctcttcagtccgttctgtcagcttccagccagaaagcaacccagaatcaactaagtttttacacttcgatgtgtttttgtgtgcttgtagtaggagaaattttaaacccaagtgtgtctgatttttcagtcgtttcatcgtgtaaatgtttgtctcatgaaatcattgaaatcgcagccttcacatacttttagcgtgggtcccccggctttctttcggttttgttcagatattctgtggatgaaatcgcaaatgagaggggacagggtttgtgtggcacagaggagggcacgaggggggaatgtaatcctcctgtaaatccggagaacagttgtggccagtgagacagggaaggcattaatagttttatctctgttataagaggctgattaaaaaaaaaaaaacttaaaagaaaatctgttattagtttcagggctccaaatgaattaggtttctggccggaataaagttaccagtcaggccctggataacgaggctgtaaataacctatagactgtaaatatttttttttcagactctcttagaaacaaaggggctgtttagaaggcaacagagagatgttattccaggggctttcctctttgattctgaagaacacaaggtccatttaaccattcgacaaaacaaaacgaaatttctgatcactccaccacgcagaatagaacatgccggtggacatgtgaacatgcgggagaacccatgtcgggcgttcattgttcatctgcgtctacaggagggggctacagtcaatgctcccactgtctagagtgttaaaatgaaacaattttctctttattaagtacctccttgagactccctctgctggacactcccggtgagttgagagaaggaacttggcattgaattcagaactatagtaaacggctggtttccctgttactagggaccgggtatgtgagttggggtgtattttgtcaactttgtggaaagccatcttgggaactgcactgttctcctcctgctcctttcattttaaatccatatggaaggtaggccatgcccccgaggctgagacttggctctccccgttcctgctacattgttcttccagttccttacgccagataaagaactgcaggtgtgtagggtgttacggtttaagaataatcatggatctcaaaagtctcatgaactgtttttatttgccagccttccttccctgtctcaggtgacctccgcggtggcctctttcagccctcagtttccctccatcttgtccgtgtgccctcttcattgttcctgcgctgtgcacccttttattccggatgtttatctgtgcacctttataattatttttctaatcttcctccccatcccacctcaactggcccacatcagtctgccaaaagcccagatctgggtgtttttgaaagagattgttggacatgctctaaaacagacaggtgacttctagaatcaaggattaggttgctaggacccgcattcactcactgtgatgagtgtgccaagactctgatgacctcctttctcctgccgtggtgacatcctctgggttcaggaaacctgatttttcccctgtctcaatcagagcacatggactccctgtgtgcatgctaaacgagcagagcttttcctgtagatttctataagaagagggattccttgtgggttttgagctcctaaagagtgtgcatgattcttctcaggaaaagtataacgacacgagagggaattgtttcaatggggtgctgctgcaccaagttggaataccaggtgaaggcccagatacattaatggagcgttctgaaccgccagagatttagacagaaatgctgtttttgaaacaaggggtatttgataataccaattaatgggtggcaaagagaatcagtcttccagggcttgcttgaaggataggtttataaatagcatgttagtttttggtggtttggaactgaacttcttataaaaaggtttattttctttagaaggttaaacatttgccttgtgattgtatttcctccatcaacttgctttgcgaggctttttcaatatctagtgcaaaggccaaccaccaaggtctctattatgggttctgaatgagaggagcctaaattccaagttatttatgttttcctctccctgagatatgctgtgttgattactattggcttatgtaaaggaacacttcacagacttccaaaaactgtctgctgcaattcatcatcagatggacctgaagatgcctatctaccaagctgtctaccaagaaatgagattctgaatcatcttgggttagcagagtttgatgacacatgccctaaaatatctgttcctgtgtttaggttttatattttaaaaatgagtaagtataaatgttgcttttcttctcgccacatttgagtagtgagtaaggtgccttaattttatccttgatttcagacaatgtgctatgatacttgaatcagagaaacctgagtttgaatctagtgatacgactttgggctttattggactgtgcaggaactccattagaaactagtgcacgtaaagtccctggctgtagtaggcatcttctcagagtgtgttaaatccctctatcttctgagatgcttacagacatgatgactccagggaaagaataacccacaaatagtttcgaaaaccaataatagcaacatttcaattattaatctcctgcgattccctttccagtttgggcaccagcaacaataaaccccctatagccatagaagaaagaaccttctttttactccctctgtgacctttccagattctttatttgcattgagcttctgctggtttcaggtagagaatttctcttctatagtggcactttctgtgctacttgaaaaatgtggaaataaactgctggggcagagtttcaggggctgcagctgtgcctcttggaaagtatccccaagtatgaaagataacctttgccgttaaccaagatccattcctaaacaaggcagcaggctgggcaagggagcacccagaggtggttcaccaagagcctcctccaaggggagkctcctcgcccaccacaagccagggtctgcctcaccatgcattaaacatcattttcctacaaaagacaatttggtgctttctgtaagttacaggggctcagattctttgtattttatgttttatatttcttcatctctctctctctcccttcctcccatagagaccagtcttggggaaccacctttgaggtttgtgtggagcaaagtagtgatgatcaagagggtgtgatatgtgagcatttcttattgttctctgaacgtgtaattcgcctgtgctttctggtagtcttattgatgacaattcaaggactttgggttggtgtcaaagacgggcttcagaataatggcagtagactttatataaccaccgatgggatgtgaacttgaaaggcccaaactcgcaagagttccatttcatatagctattctcttttgggggaaaaaagaaaagaaaaacctacagtataggcagatstttatttttcctataaaagaaacccagatgcttgagggtcacggtgatcactgtgacttaggccatattgactttgtgctgtgcaccgccctgcgcccttcacccacatgaactcaaatgttccacctcttgacagacgagggcccatctttaacgcattcattcagcaaacatttatgcaggacctgctgtgtgtcaggccctgtggcaggttctgggtttgtcgaaatgacaaaatcttaatccctgtccctgactttacagggtgggggaagtgaaagaagcatagactcactagaccatgggtctgattcaagatggaattttttcttctcctttttttttttagtggcagttcatacttctaacatgcctatgctttcttcagctagaatgggaagacttgggtaggcacagtggctcacacctgtaatcccagcactttggaaggctgaggcgggtggatcaggagttcgagaccaacctggctaacatggcgaaaccccatctctactaaaaatacaaaaaaaaaaaaaaatagctgggcgtggtggtggtgcctgtaatcccagctacttgggaggctgaggcaggagaattgcttgaacccaggaggcggaggttgcagtcagctgagattgtgccattgcactccagcctgggcaatggagcgagagtctttctcaataaataaataaagagtgggaagaccccattttcctatctctcttgaagtgttttctttacgtagactcaaaaaagtgtttctgagtgtagaaaatactcattacaagctttcttagaaatgtccataaatattactgtctgtaacttgcagaagatcctgtcttcttctatttgttacttaaattttatatccttgccaatgcaaatacgtttcttatttgcacaagttctcagagactttcgtttctgatatttggtgtgtcgtaggctttgttgcgagtggactcttgcatcatatgtggctgttggagaattgattcccagccttttcgcctggctgagaccttgtattccaggtagttgtgtggcacttggtggtggggatatagatcgggctgtcactccgaagcattcagtggctacttacccagagcagatcattcagggaattgtggaaaaagaaaagcctgacctagcttcaggggcatagagccccagagcagaagaccttgacacagatatagttcacccccgtcttcaggaaggtgaatgtctgtgacttgaaattgtcagttcattatttatttaattattttttccaggaaagggcagttggaactccctgagtgaccaattccagtattctattaacctgattgtcaagaaattcctgggcctggctgaaatctcgcctgctgtcattcaaacttgttttcttttactcaattcctttctctaaaacctttcatatacttaaagataataactgggtctctttagctttttcctcacagagccggttttgtgtcactgaaagcatctcctttctctcttctgaactctctctagtttctccctatttaaaaaaatggtggcagttaaaactgaatacagctctttaataatgttctcattagtaccgcatataagagaaaaacgacttcagggttcttgcatcatcgtgaacccctggagggcaggaaccatgtctgattcatctttgtcccctacaatagccgtgcagttccttaaacctagtaggcgcttcataaatatttctggaattgactgttccttttaatgcatctaagttataacttacgcagccctggattggtgactcatctgtagctcgcattcatttcggccgtctttatttttcttgtacttgtatctggcatccctcaccccaacaaagccaccttctgcttgactccactgatcactttgcatttcacccctcaacttccaactctttagaatcttgcttaattatctcccgtagatctgacaaacagaatgcagaggccataagtataaaaacttgaactacacttgaaagaagagcaagcacacagaagaatcttgatgattcagagcagtgtcaggtcatcctcatttagaagggaccgtttgtcaaattcgttatagattctgagtcagctaaagccatacctgttttactaggttctccaaggtgagtgagctaggtgtttatgagagtggttacaagtcagactttcagagggtagtcctccctctctttggtttaaagccaatggaaaaggcaaaagatgtaatgaacgacatcactgcaggttgtgttttttctgacagatatctttgcccttagaaagcaagctagtaaaatcattgccaaaaaagaaaaggcagaaaacctttgaaactccaaaatatctttgtggttttatagctacttatttctgaatacagcattgaacaaatttgtaatgtttttgacagtagtctgttttaacaattcttgcctaagtacttttgccttagtaggttctgatcaattaaatgccactgtgtttaagcagaattaagattgatcaattcttctgcatgtgttaatgctgtcgactctataaaaacctttgtcacaaaaagaatgcagcctaatatgtgagtggacaagggtatttttcctccaggtggttctgtccatccgcagtgagagatcaccatagaaccttccatgacattgactacgaaagcacttctggcttcacacagtcacagatttgcatcttgaagaacaaagggtttgtttgtgtatttttaccattttccttcacactaatatttccctgttgattcaacctatggaatcgttattcccaagtaaaatcattcgtccaagggcttatgataagaagccagctctatacaatatagaacttatagtttcatagcattaaggaagcaaattttaatggtgtttgtgcctggatttctgttaaaagtcacagggttataatgccgaggttgtgagtattaaattaaaaaattttaaaaagtcacagggcagggagatttggaaaactccagcttattgccgattgtggaaatgtgttcttttaaaatttgtttattttgtatctaatgaaagatttatagggctctgacaaaaaccagcatgtacgtttttgaaactgtacagaaagacagcaagttacaccttcctgaattctgtgtcacggcatctactcaccagaatctgagcggatagcagggacttctggaggatagtaagtgtcaggggaactcgtgacagggagaaggagcaccaagagagaatgcacacgtgctttyggccttttcccctgaaccactcacctctgcagctccagcacagtgtcattactattattcattaagtgtgacctgtaccatcaggaaaagattcatcagtttcattatgttctgttaactgagcctgggaggttctctaatgtattacagaaatgcttccactagtcagtggttaaagaaattctttcatttgcttgttacagtgatgtactccaaagaggatttaaggctgcttaaatggttaagtttctggtagagagggaaattaatttatgtagatcaattttgtggatagcttctttccaaggatgtcggataaatgaggtattcctatagaaagagacaacagcaataggcaaagctctggtgttggcttaacaaggtgaataagcagagtgcataatggaattcatttgcaaagtaatttttgcttggctggagtggtaagcacaaaatagactagcagatgagaatggtaagtgtttgggatcagttgttaaaaggtttaaaaggggttctaattcaagtgacattttgtggtgtggagaaggggaccgatattatcagaatgatacttgaacaaggtaatttttactggcctgggtataatagaaggaaccagacagccaggggtgggccatgctggtaggccttgtggtgcggtggaaggcactgcggccgtggagatggaggtgggccatgctgggaggccttgtggtgcggtggaaggcactgcggccgtggagttggggcagggctgctgttggggtggtgcaggagaacacgcatcgagcacttgtcggcttgcctggtccagaggttcaataaatgttggtttctttttgctttcctccccacaccttatggcagtgatctaggatcaggaaaacttgctgggattggcaataccatgatgttctgtttttctaaagaatctctttttgtaggctcactcgcatttcacagaatctgactgggtcatagtataaccctggtggggtcttcatgcgttattattcagtctttgacacatgagaatctgaggccagagcaatgaagaggctgttccaatgttatgtgtgctgggggagcagagctagggctcttcctctcccttcccctgtagcagtgtgcacagaagccccagaacactccagaatgccgagtggagctttgctaggctgcactgccaggtggggctccaggtatagtggttcctaccaggctgtcagagccacttcctttttccccagaggcatacggaagctcctgagttctggttctcgtggtccccttgcagcccacagtgctrcactgagcccctcctgcagggagtgtttccctctgtcccaaggaaagcaaggccacagtgccctcagtggttccttgtgtttccctgagaaagttcacagcttgtcaccatgagctacttaataacaacaacaacaaaaatcacaggagagaagtcagtacgatcatgatgagtttcacagaacctcaaagcacttttaagtcattaagcagctttaaaaaaaaaactgatttcccaaggtacagtttaaagtcattttatctctttgacatcaccaaaacttgagccctgcctcttgtctccaggcatgacagtctgacctcagatagggtcctgttgtagtctctgtctggggctactccccacctgcctgggaagcatttcagtccagatgagcagcatttgaaattagttgaacactcagactttcacggttataagacacaaactagggagtgagcttgccctgacatttgtgggtcttgggtcaagagtgtgaagcgaggcccccagtctgccatccacccaattctctctctctactcctggtctgtgtgtccaagctgcgaccactcccacctccgcttggaactggggtgcctcttgcccaccttccaggtctacatgtacacccacaggccctgggaaagggcctggaagcaggcatgaagccttttgggcagggaatctcatggccccagggacccagagcctggtcttgaagaagagggtgggtgctcagcctatgaatgggcacagcccatgttgggaggggtgagcttgggccttgacccaatgaggttcagggcttgagcccttgttgccctgtcctaaaggcagtactgataaggggacaccttgcttcaaaaactgaagcaacaaaggcaacttgaaatgtttcctgtttatatggctggtggttgcatttctgcatcctctgctctccttttcctcctcaaccttggtctcatacatatgattgcttcctaaagcaaagctgatgaaactgacccatttcctgttgcttgccaaagtagttcagtaaccagtatgttccttctgctggtgaaacctgacagagaacctggtaattctgacagctgttatgttttgtgggtttcagccactgacttccatggcctctcctaccatccttctttgatggcgtctctgctctctgcttccacctatttattttttcccacttgtctacccacagagccaggctcccttacctacctgtttattctttgactgtgtgttccttgagcgtgtatttgccttgttttacttgtaggtgtgaaggtctaagtggatgtacacacagaaccttctttggggtgtatttgtgtaagggactgtctggaagaagtggttcttcaacctttttgcccttcagttctctggagggcttgttacaacagattgctgggtttcacccccagagtctctaattcagtaggtctgtggtaggcttgagcatttgcatttccagttgaggaccattgttttggaagagtacattcagaacaaaaagtcagaaatatttagaatcagatggtggttgttttggtgaaagcttttcttggatgtgagagagtcagggacctggccttagcattcttcgcaattctactgccttttgtggctgtgacttccagaagccataggcacatgcagatccagcctccgacttcctctcctctcacctgccttcacatcttctcagggaaggtcacaaagtgcaggagccactttctcttgttcattcagagccagctggtctgtgtagttcatccagtttggtcttggggccccagaataaaatgggccaaatatcatcctcacaatagtaatacactattattaactaatatttaagagctctatgattttctccatttacagaagaggaaattgaggcttagagatatgaaataatgtatgcaaggactcataacaagtaattggtagagccagagtttgaacctcagtccacttgtcgccagcgcatgcccttatcttcactggcaggccaccctgcttcttgcaggtaagttagagtgatccatgccatgtgcaagactgactccggtaagaaggatctgggatcctccttggaaaagaggcaatcaagctggagaccgaaggtgctaacacagatttctgtgacactcttgttccatttgtcctgttcatcaaacagggtcaagtgaggtggtgaatgtacagcacttggacctgtggctggcatgtaggaatgtggtagagggcagccaagccatgagtcccctttgagagcaaaacatatcaaatattcaggaatactcttactgagacctctaaggaaaaacatgttatgggaagatgatcataacagctaataccgcacacttgctattgccagttctgcactaagattttacatgtgtgaattcattgaatccctgtagtaacactcaaaagaggttccacttccacagtgttacacagaggcacaggcaggtgaggcagctcctgagtgcagagatgggatcgactccaggcagtctgagtccagagctgactcctgaccaccagctgcacagtagagactcttcctcatccctcctagatgagagagggcaacttgtaaatacattggttcttctccaagtatcaatggtctttgttttcatcaaaatctggataagtattttaaaacttgagagaccaatttctgttgcttttcttgaaagataaggtggtaggacataggttaggcatggaccataagagtggtgaaggggttagctctatccagtgtcaaaccataatgcttcaaatctgggacaaaatttgacagacccatccatggggcagaaggggggaggcagatttcaggttccatagtctgtgagcatttaacagaagatggaggaggtgctgtgaggccatggggaaaggaaggctgattacctgaatgggaatgggactatatgagagcaatctgaaaaatctcagtgggtatcatcacctcacatcattacaccaatgtaaattctgcctgattaaaatgtgaggtttgacaaaaatatgttcaaaatacattcagtgttctggggactctcctaggtgccaagtgtacagcattgagcaaaacagataaaattcctgccctgaagcagcttgcgttttagcagataaagacaaayrttccacttttttacaaagctttttacaaaagcttgaaggaaatggaagtggatatttattaaacctctggaggagttgaaatttctaagattagaagctgtagatgaactcacagaggaaaatattattagtcttgtcagcataaacattccccaaatgttaaggttatttactatcatgagttattcctcagtgtaattctatgtaacattgaggtttgtctagatgttaggataggtcctccaaagtagatatactaggtcaagggatttgaacatctgttgggttctagatacatcaccaggttaatttccttgccaaagtttaattttttttttttttgagacagagtctcgctctgtcatctagactggagtgtagtggcatgatctcagctcactgcaacctctgcctcctgggttcaagagattctcctgcctcaacttcctgattagctgggattacaagcacccgccaccatgcccggctaatttttgtatttttagtagagacagcctttcaccatgttggccaggctggtctcaaattcctgacttcaggtgatccacctgcctcagcctcccaaagtgctgggattacaggcgtgagccaccacaccaagcctaaagtataatacttttatattaaacaaatcaaaccaccaagatgaaaaattgagttaacccacctgtttgtctgggtgctgctctcaggcctgggccctgctgtcattctacccctctcgccaggtgacatatcattcccaggttttcaatgctccctctatctgttagggactcctaaagttgtatctttacctagacttcttttttcagctccagagtcataaagccatcaagctactggacctctctctttggatatctcatccttaacacatycaaaggaaacatcttggtcaaccccctgaaatatactgctgttctggaattctttatttccataaatggcaccttctgtcacccagtagttcacatcagaaacccagagtcatccttgactttgttttacttaacatttaacccatcaccaaattgtattgatttttgcctcccaggtgtagccattctcatcattcgccatagctgtgttctctaaagtcgccaggaacactgaattagtgaatactgaatcattactcctaagggagatacagagttaggttcctgtgagcctctggtcatatttccattgactgatcaatacgtagtatcagtttcgttggtgtaataatgttgtatgttggtagatgttgtacgttggtatagcattacatatgttggtgtgatgatgttttatgtgtgtttctgtttaaacatatatcttagcatatagttttgattaacatcaaactcatgcccaacagcactataactcatgcctgaacgagcttwtctaacacatgcgtttctcataaggcacatcacagtcttcttgtgcttaggagcactaagcagcactttagcactgtgcttggggaccatttaaacagcaaaatcaccaacaaaacacaccaaaatgcaaaaaaaatgtggcactatatagacagttgaaagggtacttgtttatagtataagagctgaaacaggaaggcagagtgtcaccattgtggagctcagctgggaatgtgtgtgttgaccagcgcaacttttttgctgctctgcgcatgcgcaggcatgaccaaaagtgcyctgagtattgactttggggttacaaacaccttttagtgagtaggtgaatttgcaaatgtggaatccaggaataatgacgacagactgtttatcgtgaagccatccatttctgtctccactgccatcccttgtctgggggttggcaaactttttctgtaaaggtccacgtggtgcatatttgaggctttgcaggccatctggtctctgccgccgttactgaagttgtagagtgaaagctgcacagacaatacatacacgagtcacgtggtgggaggggcgtgkgggggggggggcgtgttcyggcaaaatcttactcctaaaagcagacttgggtttgaatttggtgtccagtctgtagtttggatccctgtagctagcctaagccaccataatgtctcatctggactggcttcctgacttgtccctccatgcctgttcttgaccttccccagccagtttcccatagtgatattaagtgcacattagattctgtcactgccgtacttcagatgtccaactgctttccatcacacttggaagaaaatcctgaatcctgaacagcatggatcacagcacagtcccggcttgcttctctgatctccctggacaccagtcttcccctctgtttgccccatcctggcctctttcagttctgtgactgttcccagctgtttcctgcttcagcaccctttcccacacaacagtcttcccttcctggaatgttctcctgcctggcagcctggttaattcatgctcactctgtggtcacacctcaaatgtcacttcctccaggaggctttccctgatcctccagtgtaaatcatattcccctcttctcatctcagagcaccctcttcttttccttcatgacacttaacaattttcatgaacccacttatttgggcatatttgttttccacctgccttccccattaggctgcaagctccatgaagatagaaacccatctgtggttgtctctgtgttctctaccccgttaccatcacgcacattatagacacttctgaaaacttggcaaatcagtgaatgattgtacaacatgcttttgttcatacagatttttgtatgaaactgcaatcgaggaaattgccacccttttagagtgtatagtatatcttcaaaaattgacagtgatgattaaaagcaaaagacatcttgataggtgagtttgtaaatgggtgtgcacgtgtatccgtattgtcaaagggtgattctgagacagacactctgcgaacaggtatatctggtgtgaagttttctccctgggacttgagtgctgcattcaatcctgctggtmtcacttttcccctagagctttggaactttgctggtaacattttcacatgaggaagtggaggtaaagtttgcttgaggaggcatttcagcacccctcttaaaaattgactttgctcttgtttcttctctcaaaccatcacctcatctctcttagactttgtcggtgctagttgttgttctttctacagtgttgccaccatctggggaagaaatctttgatttgtcagagaatcatctaagcaatgaagttccaacttgggggttgttcccaagtcattccaggaatcctccatgccactgatggacaggccacttagcatattttagaaaggtaacagatcatttctaagatgaccttctgtagattactagtgaaacctaaagccttatgtaactgcttttttatgtatttagtacagaaataacattttctaattaaaggaaattagaaaataaaggcaagcaaaacactccacatacacacagttagtctctctctctctctctctctgtctctgtccagaaatgaccactgttacatctcttaggtctttttgtatgcatagatgtgtgcacatttttttaaccaaaatgatgtattactgttttattatctgatttttttggatgacastctccaactttgtatttcaataaagttcatctcgtttaataccttgtttctattccgatttccataactggccctcaaatacccttcaaggctggtttgtcgaaatcaccatctaatcgagtatcgtgccctatgtctggttgtaacttccttttagtctcttaatccagcacagtctcttattgaagcagcagaccagttgctggtcttgcctccagaacctctgacctgctagagtgtgaggttgcttctttatggttaggcttatttctccatcctctgatttcctgtatggaaaagcttgcaggattcaagttgtttttgactagatctcaccagagctaattcagtgtgcttcactcactgttactaaaaaggcccactactggggatgctgagattgacccctggtctagggctgtgacagcctgaacccaccatcgtccagttacactttccccctagagaccagcaagtgacttgtgtggtataactttgcatacaaatcgtttacttaatggttttgtacccagtggtcattcttgcctgaaccataccttccttgggttttgggaaatgtttctgtaattctttcatttcttctataaagtagagctttcctgtactgcctggggccgtctggttaccctgacacatggttcccactggaaaggcaggatctgtgctaatgctttccctttccccattaactttcacagtaaggagtttaataaccacttcacgtagtaacacgtggtttttttctgtctttctaacattatacattcatggatttttattgatctggtgtgttctaatcattactcttttgttacaacttttaggcagtgagaccccttcagctaggtcctgtgaccttttgacagaacttctataatcttgaaaatctgtgttcattcatggcacaaatgccccaagctcatcttgtacttttcagtggtatgggacaatggtattagagagtacaatcagggtattgggggtggttattggtgcagaggtgacttgtttctagagaacttcagtggacaaagctggaaaatatatactgttaaaatttaagagttcaggtggacatgtccagtttagttttaaaatccttatgctttcactttccttagtaattattttaactccctttttctggtatggamaaatctttattttttctttaacctataaatgtaaagaatgtagtttcgaaataccaatatttatattattaccaatatggaactacagaggaaagtttaatacttctttgtaatttttgttttgttcttaaaatgcattccactaagggtatgtattaaaaatactgtgttctaaaattcctaaaaataaattcttcctcagagagcatgtcacccagtttgatgtatggttaggctcatatcattcagtttcttttcagtttaggacattttgaatggagcttttttaagatgggtaatgcattacgtggctgaagggtcaaaactatgtagatgtgggccgggtgcggtggctcacgcctgtaatcccagcactttgggaggccgaggtgggcggatgatgaggtcaggagattgagaccatcctggctaacatggtgaaacaccgtctctactaaaaaatacaaaaaaattagctgggcgtggtggcgggtgcctgtagtcccagctactcgggaggctgaggcaggagaatggcgtgaacctgggaggtggagcttgcagtgagtcaagatcacgccactgcactccagcctgggcgacagagcaagactctgtctcagaaaaaaaaaaaaacaactaggtagatgtttaatctagatgatgggtatgtgaaaaattgttaaatcattctctctacatttcttttgatattggaaagttaaaataattaaacaatatagagaagtatacacaatgaagtcttaacctgtgaactttgttttttttcttttttattatttctgttttgcagatgagccctatgcactttgttccctcgtagataaccatttttcttagtatctcgcttaacccttgcgtctttcatttttagaggttctagtgtgtgtatgggtgtgttcttattcccttacacaaaggataacataacacatacagtctgttgttctacgtcttaacttttttctcttaataatacattctggaactctgcatatttgtacatagagattatcttcagtcttttttataaccttagagtactccattttgttgatgtgtgatgatggcacaacaacataatcttggattgtgtctaatcctctgtcttttcaaatcacctgtaatagataaccttgtagacatgtcatttaatacttttgtaggtgcatctgtgaaatgaaatcctagaaatgggattatatagtcaagggacagatacatctgtcatttttaaaagttaytgacaaattcttcctgtagggtttataccgtattctactcatgcaagcagtatgtgaaagtgcctgtttccctagaacatcacccatggaatctgttgtcaaacttttggatttttgctggtaggtgagaaatggtattttgttatagctttaatttatatttctgttattataagtaaggttgatcatattttcatgtatttaaatgtcattttgtgtttatttttatgtggagtgtgttttgaatttcagacattttcccactatgttgttggtctttttcttctttattctgaaagctctttatgtatagtctttgctatgagttgcattttttttccagttgatcatgcatgttttggtttacttagtggtggtggtttgccctttggaagtctctttcattttatgtagtcaaatttattttttttatggcttctgtatttttagtcaaagttggagaggctttgcctgtctcatatttttcagttcctttgggtacttttgtaattttacttttttctgtttacatcttggtacgtttggtgtttcttctagagcagcagttcctagcctttttggccccagggactggttttgtggaagacaatttttccatggactgggggtgggggtggtttcaggatgaaaccattccacctcagatcatcaggcattagttagattctcataatgagcgcacaatctggatccctcgcatgcgcagttcacagtagggttcatgcttctgtgagaatctgatgccactgctgatctgacaggaggcggagctcagccggtaatgctcactcacctgccactcacctcctgctgtgtggcctggttcctaacaggccagaactggtactagtctgcggccgggccagggcggggtggggagtggttggggacccctgttttagagtatgttctgaggcttggatgcaactttatattttttcaatactcaattgtcccaacattatttgtttaaaagtttatatttttcccatagtatcataacccctactttatcatttactaagttcctataggtctgggagtctatttctggactctatgtttttccatgggttgatctgttgttaatgtttgaaatttatatcatcttttcatatctgaaaagactagttctccctcgttgctcttccccttcagccttgtcctggctattctccatgtttgttattccatatgaactttagacccaacattcttgattccagaaaaaaagcctgttggtatttccattgggatcacattaaatttataaatttcttaggaggaattaacatctttacaaggttgagtcttcccgtcaaagacaatgttttctatgtgttctttttttgtgtgtactttagtaatgtataaaagttttctgtatataggttgtatacatgtcttaagttaatccttgtaaataatatctttcattatctcctcttgtttgcatatgaggactatttatttccacatgtatttttgacagctttattgagatataattcatgtaatttacccattcaaagtgtatagttcagtggtttttaggatattcacaaattgtgcaaccatcactactatctaattttacaacatttttgtcaccccaaaaagaaactctgtacccattagcagtcattcccccttctcaacctcccccagcccctggaaaccactagtcaaatttctattcaagacgttttctataaatggaatcatgcaatacatggtcttttgcagctggcttctttcacttagcttgttatcaaggttcatccatgttgtcgcatgcctttttttaggatagccatccttgtgagtgtgaagggtaccactgtggctcagatttgctgatttctatatgtatttagttctcttttgtgagatttcatgagtgcaggaggctggctttcaattccagatccccagtgcctcccaaagtgtctagcaaatatttggtactcaataaatgcttattgaatgaatgcttggatttaatatacttctaggccacctctacattttaaagttaaaatgtagtttggcatatataaattaatttttatcttttcctaggtgaaacataattacagggtgagtttttcctccgggaaagcctggtaaaagcagttttgactgatatgtggtttgtgctggtcaatattcctttttcttacattaaaacgaatgattgagagttgctggtacatatgtctaagtgtctgtgtctcatcttttcaggaggatgatttttagctctagattctaattgttattgaaaactacttagtaatatgtataagatagaggtgagaaattaggtaaagttctgggcctgggaaaagggagttttgaatgagatggatcagttcatatgtattttacaagttctaggtttaccaagggctgtgttccagaacctcttttgtaagctagttgtgtggacacatcacagttaacaataaagtgctatcagctaagatttgggtctcaagcttgccttaaaggagatatgggagagtatagttgatgcatgcgtgagagcaggcggtgtgtatgggaactccctgtaccttccactcaattttgttgtgagactaaaactgctctacaaaaataaagtctgactggatgcggtggctcatgcttgtaatcccagcaccttgggaggctgaggcaggtggatcacctgaagtcaggagtttgagaccagcctgaccaatatggtgaaaccccatctctactaaaagtacaaaaattagccaggcatggtggcatgcgcctgtagtcccagctgcttggaaggctgagacaggagagttgcttgaacccgggaggcagaggttgcagtgagccaagattgcaccactgcactccagcctgggtgacagagcgagactccgtctcaaaaaaacaaacaaacaaacaaacaaaaactaaataaagtctagtaatttttaaaaagagtgagagagaacacagctgaaatacatatactttttaggaaaagggaaataattaaatatcagaaaaataatattgaagaagaaatatttctctttaatgtcagtgtttgaagaaaggtattttaattaaatcagatcgtgtgtgtttgcaggagacttttggacactatccaaggattttgagattgacaatattggatttttatattgccccaattttctttcaaaatatgtgactgttaagattattattacccttatattattagacgtgtttgggttggggataggaaaaagacagagggagattgattggttgactgattcattcgttcattggttaaatgggacagactgatttctctaactgtctgagcctgagagatggggaaggtagaacatggctcagaagaatatgcatttcctgtaagaaaacatttgtctgaaaggaattataataattgagaattaagctgtatgatacagaagcagtatctgaagggcagatggataatagaaggtagctgtggtgcaactcgaatcaatggctggaaagccacaggaggcagattcccaccaggccctaaggaaggacaccgtaccgaagccctccacatgtggacatccatggggcctgcgatttctctggtactggaggtattccagatgagtgccttgtgaagggactgccggagactggcatccaacagaacatggatgtgggaccagagcatctttaaggcttcttctcagagaggctggtagttctgagcgtgtttacagttccattgagggagaraaaaggaagaagcagggaaaaagagttaggtggggattttccccgtcagctcaggagaccttgtttctcttcagagagagtaggatggtagaaaacaaattgttttttgtttcatggtctgtttattagtagattattggttaagatgcttttagcttcaagggacagaaaccaacacaaagtgtataaacaaaagggaaaactgactgactggttaacaagaagttctgaggtcatcagctccagggttggttgtaaaaaactgatgttctttctgtatttctgccccatggtttgtggtatgtcggtctgatggctgccacagttctaggcatcacatccaactcaacagtgtccatgggaaaaagagcatctctttaaagcaagaaaaccttttccagaagcttcctgcagacctcccttcacacctcgttgaccaggctgatggtgtgtgccagtgcctaagtcaagtcattgacaacaggaagaagatgagccctggctgagttaaactgacsaggatgtgcwtcccccccatgcyggaagtgaggccgtcttccctgagagtcagtatccgaacagaaagatcacccaatgcatgttgtttttaaagtacttatggagatctctgtgccgtggtggtatcatccgtatgaaccatccaggctgtagtcagagaatcagagactcgctgtgtgatctccaagaagccgtatcacctgtgtcctccatagcaagagaacgtattggaagcccctcctagctttcgaattccatcatcgtctctccttctctccccttcagctcccctcccactgcccacggaggctgctgtgtgacagaggaagtttcttatcaagtcctcagtgatctatgtaaagaagagatggtgttttctcaggctcttagcactttgttctgttggtttcacaaactaattattgttcagaatttaatttttagaaaattttaatgacttttgtaagaggtttagttaacatactgcacacacacactctctgtctctctcacacacttagcttttctatgtgtatatacatgtacatgtatctatattctaacctggctttggtggaaccagctttcttgctctgtgcacagacatcttcctgctgctcgtttcagccctgatgtggtggaatgtgtctgaagcatgcgtttctaggtcttttccttatggcctccacaaagtggtcttgatggccctcagttctgttcagcagtaatgcaaagtgaagatgtttctctgactcaaaagtgagatgacattaattgagcgcctaccatttgtgctccttctatcggagacttagatacgatatttatgcttaaaatggctctgaaattaaagggcaaggcctgaggtgcagtatctcctctttctagccctcccattcaggcctgtttagctactttctccccacttccaaagggtgtctcttggaaagaagcaggactgtcccctaaattggagcagatagcagcctggggcctcgagcccccgcttccctttgtgttgtgcactggctccagcgtggcgcccgtctttgaagtcaggtggaagccccacaggcagggctgctgccctcctgctctctggccattcagcacaacctttagtctaggaaaagtgccagtcttcatttccaagtatcatatctccctaaatggggcaatctgctttaaatgccttctccactggcgccttccccatctcacaattggcataattaaagggaaaggctcacctcctttgctgcctatgtgtactgggtcagggcgttggctgggggccgctggtgtgtatgcacgcctgccctcgcagagacgctcccttggccctccagcccttgagtgatcattttcagaagtgttcagagccactctgcaagcatacactttacctttgcattttccctactgtgctcaactcaataacaggcaagctggttactatgatccatgaagctttttgtatcttgctggaaaaaaatgcactctgagctgaaagataatctccctcgatggttccaagtcagaatttgctttatgactcatgacatttggtgtctttctccatgaagatttcccccttctcctcgtccactcccagcttcagatgtgtgcgatggtgtggttcatccttagagagtcactgctggtcccaaggaatggtgtgacatgtaggaaggctcccgtggttgctggtcccctctgatctccagttcagctgccacgccagcaccctcgattaagctcctttggaacctgggtttttattacctgccactcagcttaaagcagaggcctctcagagggcatgcctggtaatgcagctgccctctgttctgcggaggcagcctcagtctccatcacctccctctcagaagtcagtctctcagcagcactggggggcccactgtgtgcaaagccctgtgcccactggttcagccaagaatggaatagaaaacaaccatgcccatctgactactgtaaagagggacaggagaaccttgggacagaggcatacctgtgcttgcccaagcctacctagaccaccctcttgtgggatgtgcactgggaattgatttcccagtggtggggacaaacttgtgctcatttctgcctcgtttgtcacctagattctctttacgatgacatctaatgtgcagaagtccagcccgtagcagcagcatttgactaatgtgggaagttcaggaattttgagcctggaaagtcctgggaaggaaaatccctcatgcttcagcagggctgtgtggccggttctccatgtgcttcagcagagttttctttctctttttcttttttttttttttttcagctgtgaaaaaagcagtgccagctgtttggtaaaatatgggtcagtgagaaataggatttgctttatagaagttaactttggagaatcgtgtcctcaaaaagaaaagaagtctaaagataggaggactgagrgaatcctgggtgtggtgatcctaaccccataagttagcttggggtgctttcaggaagattttggtttccagcagttcagaagggaggtgggcatgatttggtgcagaagggggagaggtgagggagaaaatcacatgcagacacgttgagtagtgataaaccacgagacagactctgcacggccggacagagggcatcttattagagtggaaaagaatagtattttattttgctgtgaacaagatagtttggggagtggagaagagctcccagggtgggcgatgacaggtgtctgggggacactggagccagtggatgcagcaaacagcttggacttcagtcccttttctagcaaaggagctgcccctgtggggtggggggctgaggaggttggagaccatttgaaatagcttctgagcatgtgtgtgcacacaggcacatgcatggctggtgtctcttagagaaaaggtatttagagaaaagcaaggttgtgagtggcctgagagcagttacaattgattttgaatatggaagcaattctacctaatccagagaatatacaaagtatactttggaaaggggcagtaaacttttctggttggcctgccttcctccctccttttcttcttccctttctctcttcttcccttcctcccatccttccttccttctgtgatctttgtgggagagcaagagctatttgtatgtagtgattataaatttggtacttacatagaatttctcaacatgtttctcagagattaacatgatccctgggagaatctggaaggtctatctttggggtgtcttctgaagaagattgtgattcttatggcatctgccttctcaagcccttagtcattaattatttactctcatatctctcaatgcatgcagtttagtgcctagcactaagtgatggtttgtgtgcatggttggcccagcagaaatatgtttgtccatccatccatccatccatccatccatccatccatccatctatccatccaaccatccawccatccatccctccctccctccctccctccctccctccaaatcattcatcaaataagggaaccttccccaaaggtcccagctgttctctctccccttcttataggctataactgggtaacatgcctagcccagatcattcactcccaggcacagcaaacaattagcttagactagccaggattggttcttgagtcacacaaaggggaggtggaaggtggttggaggtggtggtggggagagtgacatctaaactaaatcctgtctctccagaagagaaagagggaatggctattaggaaggcaacttacagtgtctgcttcaacatgttcatttttttttaaatgtttcactctgattgtwgtgttttttaactatactattctctaaatttggctgtgtttactatggtaattattttaattaagttctatttgattatttgtaattcaccttgttttacaacttttgattgattttatagtataaatacgtatactgcaataaaccatatgatacataaaagaatttaggacaggatcaggataaatacaaataaatatagaagttcaaagttaggaagaaaaagaattacagatatgcagacaataagtcccttacattgctacttagctgagcttcataacatcaaagagaaaaggcaaatgtggtcgctgcggtcattcttgctgtcagagaaggaaggtgcaccaggtcctcaagaggagcaaagatttttttagttcttttcaactaaattttgcatgtggacttttatctaggaagcactgagaggtatcatgaacagggtgtttggcatccccacaacagatgaaaaactgggttcttacagctcttctcacagcagtcctcattggaagctcaaggcctaacatgaaaatgcaactcagcaaatgttattccctggaaggccaaaataacaggtctgagtacttcttcttatccttctactggtttgatgsaacacaaagacccaaaacactcagcagaactgccagtctacgtgcctatcagacaaccttcaagactattacttttttttaactggcgtgttcacgcatgtgtgtgcctatgtgtgtaaatatatctgtatatttatgaatagatgtatacatccaaaatactatatatataggaagagatcatttgagggtagattccattgcccaccatgctgtattctagctcatcaattgaggctttaggaatcgacctggtaaggttgacatctgtggaaattaaggcctctatttaaaatgctcacagaggagagttctatttttgtaaataggataattgggtggaaaactgtgctaatgtctgtctttatttaaccactccaagggacaaagcctaactgctaaaaccatgaggccataaccaagacaccaccatttacccagggacaccgtcatctttatactgcaattttaaaagagtatggaggtcagaagccagacagttggtttctgtattaatgtctccaggggatgaacagagggtgagaaggagcagatagacagaggcaggtctggacgggaggttggagagcggtcagcgatgttctcccagctgtcaggaatgttatgtgggaagaggttagggaagagagttaggggaaatatcaaatgagggaatgactgtgtcctggcagaggtgttatttcctctaaaccacttttgatgatcttctgtccttgtgaagatgttgggagtggacagtgccaggacagtatgaactgttgtgcggcgtggcggataccagaggagggtgcagggaacaagcatttatagagcctgccactatttcacctgctgacctcctttgagaggcagtattaggaaatggttagagtgcagctgtgtaatcagaggctctaagcccgagtcttctcccagcaaacgaggataatagcggcgtcttacctcagacctgttgggagctgccgtgaacacgtcatccacgcccagtaaatgctagttaacacagtgatggccatccagagagctttcttagcctgatgtgaagtagatctcaggctctgcattttccagcagggtaaactgaggcatagagagacaaattcacttgtgcaagatcttttatctattaagtgtcaaagctaggattcaagccaggttttctagcactaaagcttattggttttttctgttccatgctgcctgaattcataggtaattcacctgtgtcttataacccagacacgtgatgtgggccatgaaccacagcacctttctgggtccactgtgctggtggatagctttctgttcatgacaatcacgtctgatgagcttggcagtgatttgtatgatgacagtgaccgtccagcagtatgytaaggagtctgggtcaggagggactttcttcatttgtttttgccacatcacccagagaacatccctgtaaaagaaggcggtttgatgaacttggaggaactccccagcactctacttgtgaccatgacaattgtgacagtttttccttcacactgtattcaaggtcaggtttttgttcttggaccttgttaaatcgaggatagtgggcttgaatgacttggtgtatcatggaaatagcctcatgtggtgttagcttctgcctggggtcaccagctgctcccacaaagctgagtagccagtaatttcttacaaatcttttcatattaatagaaaaatggaaggcagatggtgggccaggaggagtgctttttctttgaggctttgagggcctgtcaggggatgaattttgtgtccccctccccactcacatgttgaagtcctaacccccagtacttcagcatgtgaccttatttggaaatagggtcattgcagatgtggctagttaagatgaggtcccactaaagtagggtgggcccctagtctagtatgactagtgtcctcataggaaggggaaattcagacacagacacgcccacagggaccatggctcatgagcacgaaagcagagactgggttaataggcatagaagccaaggaacagcaaagattgccagcgcccaccggaaactaggagagaggcatggaacacaccgtccctcacagcctcggagggagccggccctgtcgacaccgtgatcttgaacttctggcctccagaactgtgagataataaattgtgttgattatgccccccagcttgtggtgctgtgttatactaggccaaataaagtaacgtagggcccatggaaaaacagtgacttacaaattccagaagaaaagctagagcccctcctatgctttggttaaagtttccatcggagcgtgggagtctggatgtagggctgagggttccaaaagtgtcatagaaagcagagaagcggctcagatgggcagaccagcttccgaagaacacgggtgttctgtgaaggtcattgcgtggaggtgaccttttccctcactgagttttttagagaaagcaattttgtcctttcaggttggaaaaatattttcttcaagaccacaaagtgacagttaaaaaaaaaaattggccacctgcaagtttaaatgtcaccatctagaacagctctgcctgatagagctttccgtactgatgtctctctcggtccaccctctctcccacagtagctacttgccacgtgaccagtaagcacttgaaatgtggccagtggggccgaggaactcaatgttttattttaattaatttaaatttaaatagccacttgtgcccgctagctaattctatgtgttggtcagtatggctccagatcaccagaatagtggtgggatgggacccaagggaaaaaccgggggtgcctggatatccagtggaggccacaggagggctggggctgatgggtcaccctggcttggctagtgcccttgtgtgtggtcttgtcctcagccacaggggcctaggtgggagtaaaagtgaagtaacacaggcagaattttctggatgctttactaaagagatgcktaatgtgaggctttgtctgccgttccttctctgatcccaaagtatcttcgactggtttagtgctcgatagagatggggtagattaagatacttgaagaaaagccaggaagctgggtctctggatatgggcagaccgagatgtttctttgcaggtttcaagtgccggcccttgatgtacccagaggggccgctagtcccaacgctaggaaggtgggaacgtccagatgcagaccaccttctccgaagctaggagggtttcccctgagtctgtcatactagacttattgattgcagatgcctgtcaaaagctactgaggctcagccacctctgcgttcttcacagttgccaccctgcctccagcccctgaattgatggctgctgcagggagtgtgaccagaggatgccgtttggagagtagtcacatgggacatctcagaatctgagatggaaccccaactgggcagtatttggtgcagtttcacaccgaaaaggggtccctgtgactgatttggccagccctggacaaatgagtgttgtcattgtatcaccagcggctttggctcartgcgtggtataatttaaaaattgcctctttttctagctctacttagttatcattctgatttcagaaagaaacaaatggttcaccaagtcttataatatctctaaccccgagacaagcgaggggtgtgaggcagagacacrctatgtcaggctacagcctgcctctcccctggcccacgtcaccttggccgactggactctgaacagtgaagggatagcctagaaggaaggagctgagccacctgactgagtggtgaggttggtggatgtgcagatggaattcctggcattgaattggagggcaggagttttagtttgagtagaggttaggaagataaaagaggtgcgagaaacctgttgtcaacctccagcagatttggtagcttgtgccacatgtgcagcatcatgcttggggactcaggggacatcaataagtagtcagtagctgatgcttatattggtagtgcctacagtgtgccaagcccagttctgagcttaatactttacatacattagccacttcagcacagtcgctgtcttttccaagcactcttaaactcattgcaggcaagattaaaccaagcaacaaaagacatcaagcgatgcagggtaatacgtgatgagcactgttaggcccaaagagaaaaccctgaggtccccagtgacaagggatgcatcatttgatctggggtttgaaggatggtcttgatttggaaaggtggctagggagcaagctcgaggttgccccacacaggggtgcacaaggcccggctgggggacagtgggtgtctcacttgggctgactggaacaagttccaggtcacaggtttttttatttgaatgtaattatttgactgtagtagccatcagcagatggagagttcagagggactgcactgaaataatgaataatttgcagatgcagttggtagccctggtgtcttggtgtgcctttctgttccagcaggatgcgtgcaaagagtggctcacagccccatctgctctgctcctcctggctcgagctttgctttaataacctctctgtcacctatttacacgaggtcatccagctcctctttttctccttttctgtgttgaaataatcgtggctgctacttgctgtgaaagacttaactagtagtgggtaggattgacctctcaattcagtaaacatttactgagtccccaggacaatgcttgcagtgagcatgcagaggaggaggtgattccagccggcaagtggaggcagagctcgagccagcaggcctggccactgcctggaagttggggggtgaggggggtgtggaaggtgagccagggtgcttagcctcagccactggggaatgcgaatgatagtcctgggggaaagagaaaacaagaggaggaacagatttgtgggatggagaacagtggggtaatgagctccatttgggacattttaagtttgagacaggacattccctggagacattaagcaggcaataaaaagacccccaacttagagtcctcgaggccctgcggttgcagtgtgaaataatccggcttcagcttccttccctttccttctcaagtggttccccatggagtcactttagactcggggggaggatagttgcttcctcagtctccctagcctttatcctcacacttgaatgctaaatccagaactcctcattcctgctaagtagttcaaaagctccaagggatccttggaacagtcgcaccctggtgggacttttcagagcactcctagggttagaagagaaatttcagggtaaccgcagaataatgtgagctataactggcccgagtgatcttctagctgggacctggatgtgaggctggcatgtttgaaggttggtgaatgcctgttgacctgcatgccccaaccgggtgaactccttctaccttttgattcctaactaattgcagtgaacaatacgccagcttgtcttctgtaaaatgagagggtgactgtgcccaccagccttgctgctttggttggacaggtcagtacagtgccttgaaactctacttattcatctgtgaaatgaagggatttggcgagatgccgcttaacgtgacttccagcactagcattttatgtaggtcagtgatcctttgtccagggagtgatcttttttccagaggaaccgttctgcagttgctggttagcttatcatcttggcagggagcagcgtggtgaagcgagcagaacgtggcctccggagtcagcaaacctagttaaaatccacttgccgtaagtccgtcacgtggcttcgcagcgggcctcttggcaattagctgcttttcaccagtcctcaagtttcctcatctgtaaaatgggatgatgatatgtatttcaggtccggtgggtgagaatatgtatcaggcatctacttttgtgactatttttaaaatggctttattgagatataactcacataccggaaagttcacttttttgaagtgtacagctcatcagcttttagcctgttcactaagttgtacatcaggcaccactgtccaattccagaacattccatcatcccaaaaggaaatcccattcctgttaactcactccctattcgcttctccttctagcccctggcaaccactaatctattttctgtctctatgggtttgcctgtcctggacatttcattgaaatggaatcagacaatgtgtgatcttttgtgtctggcttcttttgcttagcatgatgtttttgaggttcatccatgttgtagcaggtatcggttcttcattgctttgtattgccaaatagtgtttcacggtaggaatataccacattttgcttatctgttaatcacttgatggacatgcaggtggtttccactttttggctgttatgaataatcctcctgtgaacattagtggacatggttttgtgtagacatatgttttcagttttcttggtatcccattgtgtttttgatttgcatttccctaataattaataatgatcatcctgtgcatattgaccatttgtatgtcttctctggctaaatgtatattcagttcttcattcatttaaaaaattaggttgtgtttttattattgagttgtaagagttctttatatactctggatgttgtacctggcttttaaataggcatacaatcaatgttagttcctcattccaggtctctcgcagaaccctgtagtcttttaggtgacctctggaactaactgcccagacacttaatcctcagcatcctgagtcttaaaccatccccttatgtcttgttcagagctcttcttagcacaaagccctgagccattttgatcctggagccccagtctggaacttggaacagcagggggataggtggggtctagagatgggctctggctgaatccacagggcagtggctactaccaagtctcatttttttctagatggaggacttagggggtaactgcactgatttttggctgcatggagtcctctgtcctgtgctatggacacctgcatgttggggctggggcccacaaagagatatgtctaaggacactggcttctttccactgccactgccaagatgagcagcggattttccaagagtgatctggcagttgtaagttgtatataaaaatgtcccaaggaaaatcatgtgtctgttttaaagagaagggagttttctaggaaacctttgacctggacattcttctctattctgagaactgtaccctgtgcccccaagatgtgatctgtactttgttgcccctctgcttttgtgcccatcatcttcttcctctatttctcctccctgatgtgtgcagccctccctttcagccagtagggaaagggaaacctgcagggtccggcagggtcccctgttcctccccaacaaagcctcttaggttttctttggctggggtctcttcctgcacacctggggaagaggtgcctgcaaagcagtgaaggccttgggagtcccacctagactgtcctccagagagccatctccactagtttgtgaaactgccatgccacgtttctgtcctaaagacttggcctttccttagacatggatttgatgggtcctggacagacgttattgattgttcctcataagtcagtcaagacagtttatagtctctgttaatgcccgggaaatttgttttggaagacaaagccagcccaatggcatttggatgatgctgacttattttaaaggggagaagatacccctagatgtgcaagtcttttataggaacagctgtctatgatgagtcttcatgctccttttgcttctctgaacattctggcatgcccctacctagctgctattttcttgatttcatagaaaagcacattctaccctcagaaaatctgctgtccatttggaatgataagataaatcagaaaattacccattgttagagctaaaagattccttggggattatccaatccattatttttcaatctcctatcctgacaaaaaagagtaagtgttttgtatggagaaaaaaaaaagaagtttccctttggtaaataaatttgggcttcagagcatattgtatatccctcttggagatccacggtgtgcactgcgatattaaagcctctgagaagtcctgcaaaaaagaaaaccgctttatttgatttaacccagcatttcttaaactgttttgacctcatttttttcttcttttttcataataaatattagcacctcacaggacactcagcccagtttggtaagcatggcctccttcatggaagaagaaatctgtgttcagaaatattaagtgacttgctcaaaatcaacacaaagccagacttgaagccaaattttctaactcccactccattgttctttctacaatttataaccatgtcgtggctgagtaagggtttatgacttttaaagatgttgtcatttacattcctaatggaaaatgtaaaggcattagggtcatactgacatgtgtttgaattcaggtcctctgattttacgagctcatgaccttgggggagcgaatcctgccagtctctctggatctctttcttctgtaaggtgaggatgataataatgacctcccagggttgccgtgaggcttagatgagagagtgtatgtaaagatcaagttcacgttcttatctttgttttctctgacatttttcatcataccaggttctgtgccacttatctatgatttcaaaagacgaaccatattacaaacaacaaaacgtgaatggtggtgatcatactgagtatttattgaatagtgactgagaaaatgaatgcacaggagacaggaggagttacctgtgaaaattcagagctatactgaactgatcaacgttcacggaattggagaaataacaaaggtgggacaggctagagtgtggagattaatgggggctgagggaacaggctgtgcactggtaggacatattcaggatctcaagctacctgcctgccacttctgcatccccaccgcgtcaaactgtggttgagctttctttattaaatatgtagcagtttgcttttgaaatacaatatcttcaaaaacaaaaataatgccaggcctgccaacaaagtttgtcccgagggggcaaaggtgaaggacaagtgaaatgttgcaagaggacaggacgatacgaaggatggggtccagagtgaaagaagaggcctatgaggctcagcacagtgactctaagatgaaaccgagtgtctccccagggcgcacacatggatgaaaagtgaagggaatgaaagagagagccagccattccaggacttctgctcttctctgcagaaatcctcctttcctcaccaactcttcaccaacccccaagcttgcttaactagctttggaatttgtactttgtatttttgagatagagtctcacccaggctggagtgcagtggcgcgatctcagctcactgcagcctctgcctccagggttcaagcagttctcctgcctcagcctcctgagtagctgggacgacaggcacctgccaccatgtccggctaattttcgtatttttagtagaggtggggtttcaccatgttggccaggctggtcttgaactcctgacctcaagtgatccgcccatctcagcctctcaaagtgctgggattataggcatgagccaccgcgcctggccggaatttgtacttttgcctggtaatttagtccagtgcccaaacatgaagtgtgagtgtttgtttactgccagcttggaggggacacatgcctgatactgactcaccagttgcattggtggtggacttggctccttccctgggcttcagcccatgtgtgcaccagtctgatcccttgctctgaaatatattaggactaacaggtgtgcaggcctcgaaggacccgtctcttttgatatcttccttgtctagttgctctctgatttctcatggtcctcactccctccgggtcttctccctgccagtttctgagcaggcactttccggagcacagtgtgtggatgacagcaaataagtcctccgaggctttgaccaggagcacagacagctttgccctggtgagggacggtagagagagcaccagtttgcgtcctgctgcagctgcactttgcacagagcgcctcttcatctggcaagcaagcatgcattgtgccaaccctcgtctgccatgccaggtgctggctctttctccggggcgataccaggctaagcatgctgctggcactgagcgagtcacagcttctctaatttatttacctcaaatcaaacaaaccctgactcctgctttgaatttaggctggtattttaccgaaggacagaagggcagcatctctgcagaagggccttctgtgcgctttgcctgggacctctgggggactttgcatgactcctggggacttcaggaggccactttggaaaacaagtgtcaggtcctcaaaaggttaaacatagagtcgccacctgacctggcagttccactcccaggtatgtacccgagaggaataaaaacacgtgtccacatggttgcatcgcagcgaaaaggagaagcagcccaaatgtccataagctgacaagtggatacacaaagtgtgcagtaatagtccactgaatattatttggcaataaaagggaatggaatgttgatacatgctaccacatgagtaaaccttgaaaattttatgttaagcaaaagaagccagatggacatatacatattgtgtgataccatttatatgaaatgtctagaacaggcaagtccgcagagatagaaagtagagattcatggtttccaggggctgtgggaagggggaatggggagtgactgctaatgggtatggggtttctgataatcagagtgatgataatattttgaaattagatagcagtgatggtcacacaattgtgttcaaaaccactgaactataccttttttttttttttggagagggtctcactctgtcacccaggctggagtgcagcagtacaatcttggctcaccgcaacctccgcctccagggttcaagcaattctcctgcctcagcctcccgagtagctgggattacaggcatgtgccaccacaccctgctattttttgtatttttagtagagatgaggttttgtcatgttggccaggctggtcttgaactcctggcctcatgtgatctgcccacctcagcctcccaaaatgcgggattacaggcatgagccactgcacctggcctgaactgtacatttttaaaatgtgaactttatggtatgtgagttgttatgtccataaagctgttactttaaaaattgccctgctggggatggtggcatatacctgtggtcccagcaaatagagaggctaaggcaaggaggatcatttgatcccaggagtttgagcctggacaacatagtgaaaccctgtttcaaaaacaaaacttgcccgaaacttacctttgtagccaagtccttcatggacaggctagaggtcagatggaaagaagtcagaaaatttatcttgggcgagggcatttattctgccactgtgggagaagcactgtgccatgggtgtggaggagcagtgttcagagaggagtgtcctgtggcctccacaatattcattcaaaatttgccaatgtcttggacatcctgggttccattccctgcccggaaatgagttcctctttttgcctggtagatttcagtgattaataaataaatgttcatccttatacatttaaaaacattttatttggaaatagtttccaagttactaaaaaattgcaaaaataaaaatagtacaaagactacccctatacccagattcccctcccctataccccatatccagattttcctgttatcacttcaccccatttgttttgtcatgcccttgaatgtgctgtctctcactgttgctcttttggttgttgtgtgtgtgcctgtggtgtgtttgtatatacagacacacgaatgatcgttatatgactcgagggtaagttacaaatatcatggtgctttattccggcaccatccagaatggtagctactagccacaagtagctatttaaattaaaactaaacaaaactttacattcagttcctcagtcacaccagccacattttcaagggctgcatagacacatgtgtggctgcatcagacaatagagactacagaacctcttcagcagcacacagagctcctctggacagctccgcgttacccccgatgcttcagcgtgtgtttcccaagaatagggcgctctcatacatggtacagagatcaactgaagagaatgtaacactgatacaatatttttatctgagccactgtttacattccagttttgtcagttgacccggtggagttctcattccttttagaatggaggtcttgggtcttgtttgtgagcccagatctgctggtctgtactcagggaacatgtataaaacaggactgctaagtcttgaattgagcctgtgcctttcctatgccctttctttccataaactcgaatcctttctctaactcatgtgcagatggatcgggtctgggccctggagcccaggttgaatttccttagctcagaattgttttaatgcttttgtcactggttgaataactcaaggtgcagcttcctcctgtgctgacatttggtctgtgagcaggtgtggctctgctcttaaatcagcagaaaagatttcctgtgagtaaaaggaaattggccttcccagcaaccgcactgtttttcttttttctaatcactttccccaaattttagcttgcaactaagaaaaggctcattttgttctttgtttcttattttatggcttagtcgtgaccctgtagctctgaatcacttcatgcggcccaggaccaatggggcactggggagcttccggccccaaactcctggtgtagcagaggccggatgtgcagggcccttggcagctcattttcctgcagtccaggagaaaggtgggcttctagcgattttcagccatggtttgggtgaaaagctggggtaatgagcaaattgcagtgatttttattctttcactaactggtgttagagcttatcctccaggggatttctggtgacttaatgggatttcatggcatgagtaggtatggaaaacagattcctgggtcactgacttcacttccatagacattccccatcccttaataattcttaggattttgtgggtgtaaaagctgggaaacaagaaatcaacgggcttattattcttgtatcctttcctatatttcaagttgccccttagaatgtatcctcatacgtcctcccacctttttgtttggattcagcaagtcttagaagagaagaatctttagcaaggtaagacctcggtaggaatactatatgagccatgtagtttgagccaggatggaaaagggaaatgaattcatgcagagagagtggaaatggagctgatagcttcattttctgcttaactaaaacggaatgaaaagggcttggctggcaaggtcaggaccacaaggcgagctgctgagagccgtatggtgcaagatggcaacagagtttctaccccttgaccaccttttgagaactgacagggaagactcttagcgctgggcctgtgtggcttgtttggaggagtaaattgagtatacttgatgctagtgaaagaaccagagagcttccctgcatccagccgttggaaggaaaacatacattcggacattctctgttaatatcttatgcgtaacatgaggcaccctagttgggtaaatggctttgattggcctttgtggttccgcaagggttgctgtgttttgtaggattgtagttcctgttgtactccatagctccagcgtaggcattaagtttttatgttattcgatagcatcctcccagcttcaacaaagggtattggcccaggacagtaactcctaggagtgcctgagagctgattttgtttcaggtcagctctggccttggagatgccctccctgggaatcagggcagagcagagggcatctgtgccaggagggtgtgctctccgcgtcctgctgtgggagttccctcagggaagcaccttggccaccctgacactggtgtgtgcgagccccttctggaaacagagttgcagtgccctggtgaatgcttcttcagggcattggcccctctgtctaccaggtcatgccttcctctgccacttgaagtcagcaaggacgccaaaggggaccagccttcccttcattctcctgtcacctgatcctgtggcttccacattatcgtggttcctttcctacctgtcagtgccagggtctttgggtcatccctctagtttgttgtctgcaccttccctgcaggttcctatcgcctctcagatgcgccttcatggtgggtgccaagcccctggccacatgctttcatttcccactcagaagtggtaccattcctccctcccctctcagccacctcctgtgactcctcaacagaacaaaatcgaaactaggcaccaaagacctgccacgctgactccagcctttccagacccttttgtcactcactgcaatgcagagccctcaaccacaggcatggttttattcttcctgatgttcccttagatgggtttggtcctgttttatcttattttcatattgtgctttgtattgtatctgcacactatcccaggtcctgtaggcagtggatggcttatgaatcttaaataaaaatgggtctcatctgtccctggaacccagtgctcactggcctctgtgtttcagctcacccctggcttcgccttggggtgcactctcgtgtgtaaaggggtcgctgactctgagagcactccatccactctctgaagcctgcaccgttcaatgggcaacagttgcgacttccttctgtggtcagttatctcttctccccttggcccatctcgtcctgttgacctgaaaaacaggtagccctttctttcacaatgccagtggtcacctgccactcttggggtggtgcttggacatcgtaggtgctcagcagatattcctggatgctgctcactctgtcctctacagtcctcagcctagcagatttggaaatttgactccataaatttaaggattattgggttctaaaagactggttcatactaactaattctataaaaggctgatggatcaatctgaatcatttaaagagagataatcctagcatccagagaagctaggcctacatatcaaggtattttctccttggtcagaaggtcctctctggaatcccagtaagagatgagaaagttgcttatttagcacagaatttaagcaaaaggcttaagtcgtcatgtacttctaaatgtatttataaatcatgaaaacattctctgctcatgggatacttctcttaaagaacctgcatgggatatctagaatcaaatattcccttcccmcctcgacagtgaaaaacctatgacttacttctagacttcactaagattagtgtcaattatctttgtaacatcatctctctttatttaggtatgacatatcatagttataccaagttggtagatattctcattaattacattttacgtcattttggagtcacaaatcatacggcttgtcaaatcctggttttgtaatttttgagggttccttcatttaggatctgcagatctctatttataaattagtacagcataacactcctatgagggaaatgataaatgtgtgtgccttgattctagaaatcacaatctaaaacaccatacaagttaggagtccacagtagtgtgtatttggccattaatgaatcagtggtcccctgggtgtgtgagccatgctatttttaaaaccattgctgacttcagtgataaagagagtacagaatgtgccttcccaggcttgtgagcttaccatgaataatacccatggttatcatgatgtcagaacttaaatattctttaccaagagcacaaccgtggcgtcatggagcatgggaatgcatttagggggcagggtgtggaaagtccatttttcccagagaaaacatcagcccagggtaaaagctgattctcccatgggggcacttaggcctgtatgcagcagtgccagactcctgtagggcatcttccaattttagtcaccagagagtgatttgcgtcaaagtttgcaaaccaaaccagagcatttgtcactgaagatcccgtgccttccacttgttcagaaaagttattaggtgggggattagtacgtgcacacttgaaatcactaacactggtggtgatgagagtagtttcatcatttgacacattgatctcctgaagcattctcctggggaatggaagtgatgctaaaacatggaagaaagggactgaactatttcggaattttaacgttgtctttaaaaacgtgtgctctggttttgctaggtgagcatgctgtgcctcacaatagaattacactaaaccacgttaattgtgactcattagggatggcagcattaacgaatattccagcactggttaggatggcctaagttgtacagcagtaacaaacaacagaggtttgcttcacacttgcgccacatcttgggtcagctggggtctctgctctttgttaccctctttcactgaccaggcaaaggagctgctcctccccagaccatggttggttaccgtaatataagggaaagaggagtcacacactggccggaaaggcttttgcctgagaatgctacttcttgcgtacttcttattgtccaaggtggatcatttggccaagactaattctaagttacatggcttagcttacctgaattacagcacagcttttcaaagtaatgggtgcaagacaacgtattaggatacagaagaaaatttgaatatgtatattttatctcactttatcctttaaatttttctatatttgtgtttttggttaacaatactgtattggaaagtaaaacatagattatttttaattataaaaatcacatatatcaggagtgttctcttttcccctgattaagtgcttaatcaaaaaagttgagatcattgtttatacagtagatacaaatctgcaataagcatattgtacatagaaactgggtctcagttatgaccaaggatagtgcttttggttaaaatgttacatggaaaagagatgcagaagctttgaaagtaaattctattctgtgttagctaggcctctgggagctagctgaccaccctcccctcagttttcactaaacgcttgtttaggactgtattagtccattcttgcattgctataaagaaatacctgagtctgggtaatttataaagaaaagaggtttaattggcttctggttctgcaggctgtacaagaagcatgatgctagcatctgctcagtttctggggaggcctcaggaaacttacagtcatggtggaaggtgaaggaggagccagcctttcacatggccagagcaggagcaagagagagtgaggggggaggtgccacacacttttaagccaccagatctcacaagaaaactcactcccgttgcaaggacagtaccaagatgaatggtgctaaaccattcttgagaaaccacccgcatgatccagtcacctcccaccaggccccacctccaacactggggattacaatttaagatttgggtggggacactgatccaaaccatatcagggactcactattttatacacacacacacacacacacacacatatatatataatatgttatatatattatatgttatataatgtcatatataatatatgttatatatagttatatatatatatgttcatttactcctcacaaggaccctatgaaatatgattactgtctccactttagagatgaggggattgaggcagaaaggggttaagtaacttgctgagatcacagagctagaaagggcagcactggcatctgacctagttgttgagaatgcagaaacaatctgaaaattagctcttggaatacagacccctatgaagatagggatggcctacatcaccaaatgccatcctgtctgttttaaagcaagacataggagagctatcagacatcttagatgtacgtggggaaggcgccccgctacaagaaccagtattatctgagtgggcacctcctcccagcactgggtgtaagtggctccgtgccatggagttgttgggtaataacgccaggactggcttgatgacagtgactcacagtagaaaaatgtccttgcaacagaccaaagaacccactttaatttgcacagcttagaatgggccactggttgccctgccaagggatccctgtaccagctgattttcatatccacaaacacacacacaaaagcacctatttaaatattgcaaataataccacattgcatttttattatgctttatagtttacaaagcacattacaatgctactttattattcttagtgtgctccaatataatttcacttgccttctcttttctcacctttttctcatctttagtttctttttccttttcctctcagcatccgtgccaactttccccacactccagctttcttcctttcgtttcttcctgctcttccctctccctgcgagttgtggaggtggtacctttcccgaagtgatccctaattgagtttagtcaggtgtcagttaaaggcaactgaggggaatgaaacaattctccaaggaacaaaacagttgtaacatggagctcctgttgtaaatagcagttgctatttaaatcaagtaagaaggatggattattgtgctttaagaaggggatgaaatgaatcctgtatttaaagagagcctgggggaaagggttatctgcatctcacatccccggcatcactgtgtctgcaaaacatctttcacaaagttttctttgcagttagagaacagcctgtgagagaaatgctcaaagaaatacataaacatgagtacaaggggtgtgcaaacaggtgttgcactgagcgcagaacccatttggcggccctttgtcctggttcctttgtataactcagcaagaagttgaggtttagaaaaggcaggtttgaggaagtgccgtctgtggcctcttaactgtggacgtcactgatgagaacagatcgaactttagatgccttccttagaaattttgttgttttgaagtcaaacctcaatcacaatgaacaaatatatttgcataaggagaggaggtgtatagtgccctggcaggaattaagactaaaacgtgggagtaaagctgtagatgcttctgttgctttttaaccaagaggccacagacacaggccgggaggctgagagggcaacctgccatttggccagcgtcactttgcgattgttataaatactttatcatagcttgagtacagacatgccttttcaatgaaatacatcctgacttattttgcagagggtactagtttcatagggtgactgtaacaaattaacacaaactattaataggtggcctaaaacaacagaaatgtcttctctcacagttttggaggagttggcagggccacrttccctcgaagactccaggtaaatccccttcttgccttctctcggcttctgatggctcccaacaatgctgggcatcccttgggttacagctgcattgctccagtctctgcctctgtcgatgtgtggcccgcactctgtgtgtatgtctgtgtctcctcttacaaggacaccagtcatatgggattacggctcaccttaatgaatttattgtaacttgattacctctgaaaagaccccatttccaaaaaagatcacattcacaggtactgggggttaggacttaacatatcttttgggaggacacatagtaatagaatctacacagtttttagtttaaatgaaaattagggccaggtgcgatggctcatgcctataatcctagcactttgggaagccaaggcaggtggatcaccagaggtcaggagtttgagaccagcctggccaacatggtgaaaccccatctctactaaaaatacaaaaattagccgggcatgttggctcatgcctgtaatccccactactcgggaggctgaggcaggagaattgcttgaacctgggaggtggaggttgcagtgagccgagatctcaccactgcactccagcctgggcgacagagtgagactttgtctccaaaaaaaaaaaaagagagaaaaaattgcagtgacatggtaacaagaacaccaaaatgggaaagaatagagtagatttccagttctgattctgtgtgccacaaacatttctgaagtagaacctgaggtagctcaaaaaggcacctcagctgtggactgggccggaaatgggtgtttggctagtaaaacgcatcattttactttaccaacatagtaccagacatttaaggctaacaaattcactcttgctcagaagagaaaaagcctaccagatttttagtcttgatttagactttaccaaacatttctaaaggataggaaaagtccatctgaggcttaccttccgttgccaggcacacacctggcctcctcagtatctgctgcaggtctggtttacttgtctcttgaggtggtcagtgaggattttgaaccagtagtgaatggagggacattggtatgtcatgttaggaagtggctgaaaaattcagggaaggtgctttctttcgtaaaggtttgtgattcaaacacctgaaaactggtactgctgaaactttaaccgtccttatttagaacatttcagggacaaggtaagcagccttctagatctttgaaaaaatgtggatttaaatggaattcctctgggttgaaaccagaagtacagctgattttgttttcatagtttgtgggtgtttgcctttttcatcccaccacgtttatttaaaaggttgtcttcttgagatcctccattggaaagaaaatgcagtgttgaaaaacagaacaatgtggatggcaggtgagagagggcacacgaggaagaaccaagccggggctcctcctcgatgctgaggggcatgaagaggggtggcctgaacttggccgcccactgccagccaytcttgaggtggcttttggggcctacttaggttctgcctcagacacacacagaatcaaaactggaaacctagtttttgtgttattaataagccactcccaattctctctctctctctctctctctctctctctctctctctctctctctctctctctctctcagagacagggtctactctgtcacccaggctggaatgcagtgttgcaatcacagcttgctgcaacctctacctcccagcttcaagtgatcctcccacctcagcctcccgaatagctgggactatgggtgtgcaccaccacacctggctaattttttttgttttttgtagagacaggatttcaccatgttgcccaggttggtcttgaacttctgggctcaagcagtccacccatcgcggcctcccaaagcattggaattacaggtgtgagccactgaacctggctccaattctcttttataccaaagtgactacagttgctcctcagtagattgagagatacattcctatatggcctttttcagaagcgttgtaacatcaactcatgcagagcttaatttaaagtagatagtatgcttttacttgtttccagctatgatattagactaattgaaatgaacttataggtcctttaaggtaagatatagagaaagcacaaagtgaaatgtcttatctccaagaagggaaaaccgaagagacttcttttggaatatggtaattatttaacctgagaaaattatactttagtaaaatgcttttggtttccttaaaactattgttatgggttgaattgtgtttcccccctgccaaattcatatcttaaattcctaaccttccatatctcagaatgtgactttatttggaggtagggactttatagaaggaatcaggttaaagtgaggtcatcagggtgggccctaacccaatacaactgatgtccttattaaaagggaaatttggacacagatacacacagagggaagatgatgtgaagagacacacagagaagacagtcatcagtgagccaaggagggaggcctagaacagacccttcccttccagccctcagaaggaaccagccctgctgacaccttggtcttggactccagcttcttgaactgtgagacagcgtctgctgtttaggctgcccagtcagtggtgctttggtaccccaaccctggcagattcatatgctatgtttagaaagtggtgttttgtgtttttctaaataaggttcttaacccagccaggcacagtggctcacacctgtaatcccagcaccttgagagtgtgaggcaggaggatcgcttgagcccaggagttcgagaccagcctggacaacatagggagaccccgtctctataaaaaaataaaaataaattaggcaggcatgatggcgcacacctgtaatcccagctacttgggagactgaggtgggaggatctcttgagcccagaaagttgagcctacaatgagctatgattgcaccactctactccagcctgggtgacagtgagaccctgtctcatggaatttactaaccaaaacaattagccaatgccactcttgtttcaaaaaggattctttgaattgttttattttcttttcattgatcccatcagtttcctggagaaagaagctgaaaaagcgtttgtgtcttatcagtgtttgcttcagcactggattggattgggaattttcagattgcttatgagctcttgacaccatgtcctgtagataaacaattatgggttgtctgtactcacccactgcagggcaaggctggctcacccacagtggttgatggcttcattcaaagcagtatagcagagttaccaaaaggagttatttggggccaagttagcagcttgcagaaagagaattaagtctgaacatgtaactctgacaaataatgagtcaataagtagatagatgtgtggagaatttgcaaatgttaggaaaaggatgttttctcaatcaaagaaacacagcctatggtagcatttgcagattcaaggcagatgacataaaagattttgaacgttcttaagagaaccacatttcttggaagagcaggaggcgtgacatggtgcatttggttctcttcccaggagagcacccttctttccctgctcctgaccctgtgggaaaagagggctattggctcattcccagccaggctctgccactctttctctgttttcattctcctggatcaatcccttaattgtgtttatcatcatttcatccttgatgtttccctgtgactcatattgtcctcctcatactatttgacaatgtctctgcccccgaggattacttgatttgccatctgctctactttctacagcatttctcctgggaaacagctttacccacggggactccatttccaccgaggtgttgatgacagccttcaggtccacatctccacccatgaccttgcgcccattccctaacctggcttttttcttgttgcatatagaacatttcctctttgttgttactaatgcctaaaacaaaatctgccccaaaccaagcccttctagctggcctgtgctcttaccgtcagcagcaccattctcttagtccctttggggcatgaacctttgatttagatctttttcccatttgctatttctcattctggccttctggtcttttggctgtgtccctctgtctttggccttacccatgaactagttcagggtcaccttgctctcttccccttccagttaatcccatgcaggcccagcccatcctattgatttccattcccttttcaaagtgggtgatcgtcattcacaattcaacctagcaagtaggaactgggtgctggttaggaaagaccattagctcctgacacttcagtaaattaagcaatttcttgcctcagagtttcagtatgaatagctgaacactggacatttcaacgtagatatcccgttagtgctcataattcaacatgttgaaaacagattctattctcccctcccccaacacttcaactccacttcccatcttccttctcactcgtggagccccactccttctggcaccccaaatgtgttctagtcccctctttcctttgctctcacatctcatctgtcagcatgtctcaccttttctcctctgcagagttttatatttctgctgcttcctgttttctcaggcagttccttagtccgggtcccccttacccctctggaccagctttcccattggctgagcacttgcccaagctcccttagcccggctcttcttactcaaggccacttctctgcactgaccccctatgcatcagataagcagtggttacctctttaaataggtaaatgtattttattttaatcatttcttatggttatatttctcagatgtcataaccagaagacacagaaatgagagatgactcagggtcattgttgttgacatccactattttatcaggtgacgtatagtcaggtgcgtcctgtagtttcagtctgtcttccttcacttatcagccctcatttttcctttggctggtgtgggactcatctcgttgtttggtgattgtagtctgagaacctaaagaatgaagaagtttggctggtggcatggatttgggagtcaggcagacctcagttcaaatcccagccctgctagcagaggcgaagtgactttggacaaattatagctccatttactcatctctaaaacagggaaacactgtagttttgttgtatcgagcaaacacctggagtctgacatatagagagcaaaggcaatcaggacagtcacctaccacttgttgatgtgttagatggcagccagtgagagagaaggcgaaaggagaaattagatgagcagctctcatggttgggcttccccccagctctctgagtatttagaaattacttctagaagatagaagttatcagaagatgacaattctggataactaggtagttgtatacacagtgcatactggtggttatttattgctttagcatttgttattgtattgccactatgcaaacgcacctcagttgtctccaagcaaagcctgagctttctagtacagagaccgcagtgctggccgctcccgccatgagtctcactctcctgatggactgaagtacactctgtttgcaggatttggagcactagccttctgccccatctttctaattgcagcttgagtcttagttctgctgtgaaactttgcctgaccacaatgcatagtgactcctgcctctaaacttctagtgtttactttggcaagttgtttatgttgccttagaattaccagctgtcctttttaatttgcattgtacttggcaatccccatgagattctaagctcctttaggtcggtgacgatgtcttagatgtctttgtgtttcctgttgtgctcaaccctaatctttttttatgtagaggacccttaatacagacttgatgattgattttatttcatgttttttgtttttttcaaatgcccagtgctgcaatcagtagtattgttattgtcattattgacaaaagaattctgtatggctgcatagtattccatggtgtatatgtgccacattttcttaatccagtctatcattgttggacatttgggttggttccaagtctttgctattgtgaatagtgctgcaagatgaaattggaaatcatcattctcagtagactatcgcaaggacaaaaaaccaaacaccgcatgttctcactcatagatgggaattgaacagtgagaacacatggacacaggaaggggaacatcacactctggggactgttgtggggtggggggagggggtagggatagcattaggagatatacctaatgctaaatgacgagttaatgggtgcagcacaccagcatggcacatgtatacatatgtaactaacctgcacattgtgcacatgtaccctaaaacttaaagtataataataataaaaaaaaagaattctgtagagcttgtggttgatcctaagctgtgctctggtggaatatactatatatttaacattgcacaactagtgggtaaacagacattgattgaaaatggtataaaagccccagggacattcagtatacactgttttggaaatgtatcatttagaatgggctaacctgaaattatctgtgtactccttgtgaaatataaacttaataagcaggattattaaaactttatgaatattatttagtatgtcaatgaaggaaactttccaagtactttttgaccccctgaggtattagatcaccatgtcatccagggttctcaggggttatacagattaaccctttctaggtgtttaaaaatgtccatttagatgcatatttccaacattcatatatttttgacatattctataattttgttannnnnnnnnnnnnnnnnnnnatctattaagtactcattattcagccagagcttgtgtccagaagattttaggaagtaaggaagttagtacctcttaaaatcaggtgttcatgattccattctcttgaataatataactggattctgagcggtaatctgttttacatctgccaaacccaaattaaatattacataccgataaaattggtgccactattttagagatcacctccctgggaatcagggcttgagctttgctagaattcagtgaaattgaattcaatttatttttttttattgtagttgaaccctcactcatccttgtagtctgatcttccagtagataatttatttaggggtggtgaaatggaaaggaaatgttactcagatatgaagcaacttttcagttcatctaattgtgaaatataaagttatgaagaaactaagtaaatagtggggggaaaatatgctaaatgagccagtcccttaacaaatgtcattttttaaaaaactgtgtgagttggctgggtgcagtggctcacgcctgtaatcccagcactttgggaagccgaggcaggtggatcacctgaggtcaagagttcgagaccagcctggccaacatgctgaaaccccatctctactaaaaatacaaatattagctgggcgtggtggcgcacgtctataatcccagctacttgggaggctgaggcaggagattcgcttgaactcgagaggcagaggttgtggtgagccaagattgcagcattgcactccagcctgggtgacaagagtgaaactctgtctcaaaaaaaaaaaaaaaagaagaaagaaaaaaaccgtaactgtgtgagttaagacttcaagaaatcatgaagatttttagatattcttattattacattatttgtagccccagaccaatgaatttctcattaaaccattaagacaaagagaaaccaaaaggtgcatagaattacataggtttgaagccgggcatggtgttatgctcctatagtcctagctacttgggaagctgaggcaggagaatcatgtgagcccaggagttcgaggctgcaatgagctatgattgcaccactgcactccaacctgggcaacagagagtgagatcctgtcccaaaaaaaaaaaagaatttagatctaggtttgaacttctggggtcagggtctgatttttttcacttatcacagaagcttaaacccatcacatgacttcccagttttcaaagtaggacctttgtgagaatgaaagtagggagggtgctctgaataattgaannnnnnnnnnnnnnnnnnnnnntccataaaacatctgtcctggagcctgctgtgtacttagtactcaagattttaaaacctggagactcataagtgttttaagaatcctgaggaatagcagatgaagtcaagtctagcattttatagacataaatggcatctataattaaggctagaaggcagatgttttaaaaatagtattttgaaatgcagacttgcatacatgctttttataaatgcaaaatgagaatttcaataaagtaactaaaagaagggtcagaaccctcattgcctttagcatatcaaagtgcaccctaagtctgggtaacctggatttgtttcggcatgagagactttgtcagctttatggtaataaggaataatgtcttacaaatagtggactttaattcttctaactatagcatatattttaatgtcagttttataggtgctatttttcatttgtcatatgcaatgaagagtttattatatatagttgtgtaatagaagttgttttaaattttaataaatttgttcttcagtgctttttacttatcacttctgtagcaaccacatgaactcgtgtctgtgtaattaacaagcatgtaagaaccccatgcatatctgagattcagtgtttatgacttcagcctgtttatgagacagagtggtatggtaataggcatgctacttgttaaaagctttagttctaggttatggtgactccctgtcctttagtgaatgaaaatgtggccattttgacaggttttatcttgggaggccactaaggcttttgtggaaaagtctgggtcaggtcattcctgtaggagcaggtgtggttatggcagatttatcctaccgtgacctcctgggttcctcttactgctccccatgggctcgaaacttgccctcccaagtccagtagtccccctggtctstcacctagaaggagtaaaatccgccttctctttcaagagccaactaggaagtgcagagataacttaaaaagcasttgagattttgccattggatcaaactgacaatgtgcattaagcctctgtttttcctgaaaaggatattgacaaatgaggcgggaagtagccttgactagtccagaggtcaatacagaaagaaatgagaggagacatttagcttttactttcaagtggaaaaaaacattgagtccccctctgcacccccactttattgtccctcactttaggatctgaataaatagagaagtaatacgttgtgggctcaactctctgaaagctaaactaatagggaaggtttgttccagagaaatactctcaaggagaaatgtttggaaataagtgtgttgccataagattattttaagattaagctacaaaaccaccagcagtgtcttattccttatgaaggtatttcagggatttaaaaaagtattactgttaaagactttaactatatcttgttggagcattttgctgcctgaagcaaagtggcctctgctacagaacaaaggtaacacgtctgcactgagcgttgggtccagtcattggaatagcggctgttgacttcataaaggggcagcaggggccacaccaggccaggccggagtctgaggcagccggctgtggtgcagggtgtttccagccatgtaggcctcctgtctgatcctgggcatctgtcatcagaggcagccagtgatgatttccacaattttatgacccttggctgtcatcccaataacaaataagtcataagccaccctcttcccctctgtaaaattccacttctgcaccgtggacggcctttccaccaagatctttttgaaacagtgaaaacagagactagcacctcaccttctttatgtatgaacagcgtatttctgctgtcgctctctctgaccgcccccttccgggtacttaaagactgaaaaataagcagcaggcttgacacgaaaggatgaaggaaatggctgttttgctttgactcttcagtggctaagttactgaaagccaagtaattggtcatttctatattgtatacaacatctagaacaatatggatattcacttgatactgataaatagggaatagccatattctgtgttgttctagaataagggggatgttgacttagaataagggggatgttgacttgaacaaaaagaacagtgggaagaaacgggtgaagtacggattctgaataagcaagccagaatagtcttgtcaggcacgaggattcctacagacgtgcagtcacagtgcgtagrtggaggtcggagctcaggattgaagcaagaagggaacaccctccagcagatccatgggcccagggtggaggtggggctccaatcaggtgctggatgttagcagaactgcccctaggaagtcagagctgaagtcagatggtacatatggtaagtgctgtaggaacagtgagttgggaatgatcactgggttagagtggtctggaaagagaaggaatctaagctggctggtctttggataagttgagaaaagcagcaaaggcatgccaggtaaaggaatagtgtaagagtgtgaagrtaggaagtataagagacattctagaaacagcgaatagaccarcttcattcaagttaaggacccaggaaggttagtagagctggagctaacaaggtagttggaatcaacatgtaaatgtatcgagttctcagctttatctccttgacagtaaggagccagtggaagtttggagaggggagtggcatgctcagagatgttttaggaagattaatctggtagccaaatataggcaaattaaagggagacagagtgctcaggtagatgagatgtctagatttgctttagtccttctagaaagtgataaatacattcactgtggaagtggcagcaacagcagaaataaagaattggatgcaagagatgttttgaaggaaggagaaattaataaggcttagcaccttcttgtctatgaatgtaaagaagaaccatcatagttcatagttttggagccaagtgactagaacagtcatggagatgttaggatagagggtgagatggctagatttttaggaaaaaataaggggttcagctttggaagcgcatctttgacattgtagcaggaggctgcaatatatcactgtaacctctgagggagagcccagcctgtgataaacatgtgggggtcacctacacagaggtgacggcttaaactgcttgaatggatgatagctgccagagagaacagagtcaaaacggtggaaatgccaacatttgaaaggaggaagagggctgggtgcggtggctcacacctgtaataccagcactttgggaggctgaggggagtggatcacttgagatcaggagtttgaggccagcctggccaacatgaaaccccgtctctactaaaaatatgaaaattagctgggcgtggtggcgcacacctgtagtcccagctactcaggaggcggaggttgcagtgagccgagatagcaccactgcactccagtctgggcgacagagcaagactctgtctcaaaaaataataataataaaataaaggaggaagaggaaccacccgagcacacagtgtgcaatcagacacgggatggggagattacagattcactgaagtccagagaagagcatcaagaaggaagtcgtggtcagcagtatcagatgttgcagaggttaagaagaacgggctgaaacaaggccattggattaggcaattaggaagtcatttaccttcaagaacaggagcctatagtgcattaacgagttgggggagatggattaagatgtgggcattgaagaaaagggagcataaaccattgatcacaggtgagaggagggaaagaattaagaggggggaatgcggctgttactccttttgccttccatgttgggagtttgtgtgtgcacgcacatgaaggcagaagaaaaagatgaggtgaccgattcatttggacagccatattaagttcctactaaatacttggatccaattaagtacagggagaaatggaaagctacaagagaaagaacagtggtggaagcaggttcaagagaaaatgggacaaatatggatcatgagaatcgggaacttttttagtattggaaaagagcaacacctctttctctcagactggagagaaggaatgaaggatggaggatgatgtagattcaggaatgttctgaaatgaagaaggaaataaaggaggaaagtaaggctgacctcaggcttctggacaaagtggaagttgggtcatctactgagagagaaggtggactagggtgatggttgatggagtggaaaggattaccactctaggtaatgccaggggctcagagagacaggaacactaggttagccaacccccaacagggcttgcagaagctgcacttccttgtgcttctgtgagaaatgtttgttgatagtggcttagaagatgggcaatgtttgttactcttttaacctttaaggagttatccttcatcaccttattatttttgcttaatatattttctatgaatttttgtttcagtatcaccgtaatttgtacaagtgttccagaataacggtctcataggtttctaagtttatctaaattgtggatgagatgttggtatgaaataatagtacttctggccagacacggtggctcacgtctgtaatcccagcactttgggaggctgaggcgggtggatcacctgaggtcaggagtttgagaccaggctggccaacatggtgaaaccccatccctactaaaaattcaaaaattagtcgggcgtggtggcaggaacctataatcccagcctttggaggctgaggcaggagaatggcttgaaacctgggaggcagaggtggcagtgagccgagatcatgccattgcactccagcctgggtgacaagagcgagactcggtctcaaaacaaaaacaaacaaacaaacaaaaaaaaacaaaaagaaatagtactttctagagaaatgtattgatatatgaatttagcaggaagcgtgagtgaatggagccatgaattgtgctacccagtccccaccagtaaggctgataaaatgttttatgctgttgaaatgaaaaacgtcagaccaactgctgatccactaaaccctacagaatcgatgacaaagatgccagctggtaattagggttcatccaggatccagaagatcctgagtggcctggtgatggggcctgtgtgggaagatgttttctcaaaccagtaaacttgacagggtctgtggacaaggctgagctgatgatgtgggcaacgaagtacgtgacagcagagcctcctgagtttcagtagaaagcaacccagggagaactgaggaagaatccatttctgtcacaagtaatgtttacaaaaaaaaatgrtgacctatgtcctgatattggaattctgtttctgagtctcagctgtgttgctggcacctaatggtggcaagtggcaccctggaaccacttggttccacaaactcagtgaccagaatgtgcttctgggtggaagagattcactttttcaaccttgttttcaagtgggaggaatatattctgtatggcccaagccacagatgagaactgaaggggatctgttgagtttacttgtaccaaggtgactccgatacttacttttcgttttcctttccttgtaggtatggcctcacatgtgcaagttttctcccctcacacccttcaatcaagtgccttctgtagtgtgaagaaactgaaaatagagccgagttccaactgggacatgactgggtacggctcccacagcaaagtgtatagccagagcaagaacatccccctgtcgcagccagccaccacaaccgtcagcacctccttgccggtcccaaacccaagcctaccttacgagcagaccatcgtcttcccaggaagcaccgggcacatcgtggtcacctcagcaagcagcacttctgtcaccgggcaagtcctcggcggaccacacaacctaatgcgtcgaagcactgtgagcctccttgatacctaccaaaaatgtggactcaagcgtaagagcgaggagatcgagaacacaagcagcgtgcagatcatcgaggagcatccacccatgattcagaataatgcaagcggggccactgtcgccactgccaccacgtctactgccacctccaaaaacagcggctccaacagcgagggcgactatcagctggtgcagcatgaggtgctgtgctccatgaccaacacctacgaggtcttagagttcttgggccgagggacgtttgggcaagtggtcaagtgctggaaacggggcaccaatgagatcgtagccatcaagatcctgaagaaccacccatcctatgcccgacaaggtcagattgaagtgagcatcctggcccggttgagcacggagagtgccgatgactataacttcgtccgggcctacgaatgcttccagcacaagaaccacacgtgcttggtcttcgagatgttggagcagaacctctatgactttctgaagcaaaacaagtttagccccttgccyctcaaatacattcgcccagttctccagcaggtagccacagccctgatgaaactcaaaagcctaggtcttatccacgctgacctcaaaccagaaaacatcatgctggtggatccatctagacaaccatacagagtcaaggtcatcgactttggttcagccagccacgtstccaaggctgtgtgctccacctacttgcagtccagatattacaggtaagaccgtccacaaggagacaggagctgctgaatgcccagtggcactcacagagaatgtgccaccttagtcactgtggggagataaaattatatgtctacagttcctgccttcaagtgatcttaatgtacttacgaaattaggacatgtgcacattgcgatgtcaattagaagtcacattagaacggagccaggtaagatccgtggcacaggtgttcagcgttggaagggctccctgggacctggggtgcagagcagaagagttccgtcctccyggatgggtaggatccagacaggtggtggagagagagggatgtgccatccacagtccgcagtcacactagtgggaatttacaggagacaagaaggacacccgcctggccagaacagtttgtgagtggtgggagatgtgagtgaaagcctggttggaaccaggtcactgggggtcttaaatatcagatcaaggaattgcaactgtatcctcaaacccagagcaagccctggaaaccttgaacaacataaggtaacgggttgaaagggatgttccgagaaggttccttgtctatccacgtgcagaagggctggaggaagggagagactagtctggggccagctgggtggctcctgtggtaaggtgacttcaggctttgggtcaggatgagggaggaatgatagtgtccgtggcagggaagtgtgttcagtcatggactcacacatgcagtcattcaacaagctttgatttcacttctaatatgtgccagccgcagtgctaggtatagggatatagacagggcccttgccatcctggggtatctggaagcttttcagggacccctgtatgcagtcaggattggaaccgctgccgacatggagctgagatcggagtgctggctttggagtcaggaaaggccagagtgaacctggtccctcctctcctaatggcctgatttctccatgccttcatttcctaacccatgaagtgggagaaatcctctcaccagcctcgtgggcagctgggaggtaacatggctgtaacatggcttaggtgtgtcactccgtggctggccatggcgggtgcacagcggggaggcggcagggatggaaagcaagaccctgctctgtggaaccagcctgggggtgtgtttggggtggtgccgaacagtgcagtggagatagaggtcacaagaaacaaaactgaaactcccatgagaagatgggacggatgcacatttaagagcgtgccacgtaggcaggaagaccggggtccccggaggccatcctgcttgcaagcaagcacgctcgcttgcccgtgtgctttctccatgcgcctttcaaggccacagagagaaggctggaacatgccccagggccttgtcgacacagctgacctgtcacccattcctggggctgacctgggccagcttccccttcttgctccctgtccgggcccccatcctggctgcaggcagagctgttgcaagtctcctcccagcccctccctcagcctgctgggcaccaggccctccttccctgggagagcaacagcccctccgttcggatccccagatgccctcccaccttccaccccgtctcctttcatcctaatcctgactcacacaggaggtttcgaggcctcttcacccatgctgtttctgtctcttccctcttccctttaggaggcatttcctgagttagaacagctctctgcgagcctcttctctgccctgccctgaggattcctttcccgctcatttcctatgcgcagaaaggtctccacaggcctgtgctttcaccaccaggccccgtgcggacagacgggtctactgctgcccctccacttgctctccactccctcgtcctgaccaggccatccactctgtgccccgctggccccagagccaatggcagggagaagtaagcccagggcaggagcctccaaggaagacaagaagcctctccttgtctccagaggagaaggatgggcaatggttgagtgaatctggagggttgggtgcccggtaccgacagcacatattctctgtagagagtgcctgggcctctgaaagccagctctggtggccgtcccgggtaccagccccattgggggctagctggtgctgtgctggctctgggaggctgctgtgccacttcgtatttaggttggtaaattcagcatgccaaaggctggctctttctagttcttggcctgaattcagggtgaacagcccctgacttggctgctagggcttttatgtagttcatctgaattgctgcatcatgaacacgtaccagtgttattaacattcactgaaagctagcatggcgacttgtaaaaagacttcgacaaactctgtttaaaaggcagcacatccttagagcgaaacttggtgaatcgagtaagctgaattggggattcttaagacccccttgtcatcttgccttctggtgcccatgtgacgcttcctggagccctccctgcccatccccttggactctgcgagtttttctttgctttcctgcctggtgctggtgcccctagtgctgaggagacaggtcgcaaaatcggggatcctagctcaggaagcctgcggcagcagtaaaagtttgcctgtgagggttggggagggctgactccttcacctggactcacagcgatcctctcctgcccccctctgtgggtgagatcaggccttttggacgcctctggtgggtgtggtaggctggtttgctggcggttcctgggccctcaggagccctcttttccccacttcgtgacaggcacagtcacatctggcccctgtgtccccacatccctctgaaggaccctccgtttagttgtgatagtaccctcttttcacccctgaaatcaccattgcctaaaattctgagcaagaaggcctctttctcctttctgtggtcaccttcaggccctcatgtcagcctccctgtgcccagccctggttccaaaaatacggtcagcaggaaagacagcggctcttctgcctgaaatgaggcttcatttctaagttggtgcaatgttctgtttctccctcaggccttgtctgagccctgcagtggtttgccaccatatagatcgatccgatttttcgaggacagtctctagtgctctgtctcttttcgtcccagctgtgtgggacagccagctctaggccatgtttatcaagttgattttcctggtggctttgcctcttataggaaagaaagggggcaagaaaagctctttaattgtccatcgttaaggcccatgtcccagaaagaagacgctttcagatgctttcagctgcatctgcatcgtgagggaatggctgtgtgtttgagccgcctgggctggaggagtcattgcatgctgtgcatccagcctcccagcaggttggcctttgtcctgcaggtggtgggtggggactttctcccctcggccccctgtatctgagctgggcacattatcgtcccaggacatctgactttcaaaaggtagagtacttatgtgtccctctgtcattttgcatgggactgggctaagtgtctcatcccaccattgtccccacctagtgacacagaaacggtgtgagacaaggatatgttatcctcgccttggggacttggaaaaggaggtggtgtccccggagccaactgttttccccagctctcaggcatgtgcctggccacagtggctgttggtattctgtgaggcaagcccactggtgtgtttttcaggaaacaaaggctgctttttaagtttttttctcgagtctgaagcaggggtattcccttccaattcgaaggtcagttatgtcattaactgtcagctgcccaggttctcaggctttactgtgcacaggaatctcctggagaggttgctgggaacagagtctccctgggagtaccctgggagaaagtccacacccaccaccaacagagacttgcctcagagaactggaggtgagccaggcagggggtcttaggaccagtctttgagaaacactattctgaaggacagagggattttcttaatggtgtcacctttcaggtgttgacacccaaaagaacagagttgcaggtaatccttgcttgtattacttcaccttgggcgcccctgcccttttgttatttaattctacattgatgccagttcattttgtttgtttttagtttttttgttttttttttgagcaagcaataaattggtactggggtatttccattatcagcagaaccagtaaactacaaataagaccaaatgttaaactccactctcagaaaaaaacacaaacaaaaagacatgccattcaggcaaagggtaatcagtgattaaaatatatagattttttttggtttctactctggattattcaaaatattcttgtctagagttttttgaaacacgtaggactgttaccaggacccaaaaattgaacataaaaaattaggacatgaaaaatagcaaataatccactttttcagaataatctaaccttttttttttgagacggagtcttgctctgtctcccagactggagtgcagtggtgcgatctcgactcactgcaaactccgcctcccaggttcaccccattcttctgcttcagcctcctgagtagctgggactacaggcgcccatgaccacgcctggctaatttttttgtatttttagtagagatggggtttcactgtattagccaggatgatctcaatctcctgaccttgtgatccgcctgccttggcctcccaaagtgctgggattacaggcgtgagccaccacgcccagccttttttttttgtctgattctttggggtgcaaagactgtcttcaagttgatttcatggtggttttaggtgggggtgtgtattattccattcttgcattgccataaagagctacctatgactgggtaatttattaaaaaaaaaaaggtttaattgactcacagttctgcggggtgtataggaagcatggctgggaggcctcaggaaacttacaatcatggaggaaggtgaaggggaagcaggcacatcttatatggctggagaaggagaaagagagaggtggggtaggtgctacatgcttttaaacaaccaaatctcgtgagaactcacaatcacaagaacagcaagggggaagtgtgcccccatgactcagtcatctttcaccaggcccctcctccaacgttggagatcacaattcaacatgagatttgggtagggacacagatccaaaccatatcagggtggagattaattttcagttcaattcatcaaacattcattactgagtgtcccgtagtagatatgtgctccagagtgcagagggtaaggcatgatccctaatcttgcagagttcacagtctctttgaggagatggaaaacacaaaccaactgccaagactgtcattctgatgcttcaatattttaaatgtttggtcattcaacagagatttattgtgaacctaccttctgccagactctagggaaacaatgatgagcaaagccagttcaagaaattaaaagtcagtgaaagattttgccagatgggttaacagggaagttaacatgagatagggatggggaagtctaggggtcatggagactggaataaataagggaagatgggagaaatgatggtgactccttagacagtgacacctggcgggagtcgaaggcctgtactggaaaataataatccggtgagtgaagcctgacaatagagagttttgaatacaggcttgaggggcttgggttgagccaaagtgccagagctgggagccattgtaaattctggaacaaaggagaagtttaatgaaaattaatgatggtataaatcaattggaatggcaaagaaaaaaaaaagttgtggggatgttttgagagccagaggctaggagacaactgttgttactcaggaatgaagggatgaggccctagattataatggggggttctaccccccgatagtatgaatgtggacattgttagtgcatttaacttttccgatgctttgattgcagaattgacttagagggaatagctttttgtttattttgctttcttttgtttaatgaccttgctgtctctaaggctcagttctgaagctccagtctttcagagcctagtttcaaatcccaccactgctataaagaaataggctctgaaaggagaaaccagagaccttagcaccagtcctagccctgccccaagctgtgttccattgagtcacggtcagtagaatgtcagctgtgactgtccacactcctccatctggatcccattatgacctgggcctgtgtttatgaggcggttggccagaattggtggttcagtctgtggccagggagcagttttctctcctgtgggttgaccttggcctcattagctgaaactgggaaccctccatgatcccctgatcaacagagaacagagcatattctaaaatgccatgctctgggctggaaatatcaatcatttcaaaaaggggcatagctttataaagccataaatataagtcatttcaaaaattgcatagcttgtgcagattacagcatatagaaagtgagtgactagaagttaggtttgattgaaaagagggtctctgaaagcaagtgcatcgcaggcatgaacttttaaaattaatttgtcttttactaatagaaacaacaggagaaggttctagtttgcacttgaagatatgaagtgaactgttcaacccaccgacaacttcatttgcccagggagactgttataaatacgtacatgtatgcgtttcgggttgcagcttctcttttgaagagaagtaatcaataagttatgtaggctgttaggttatcttcaagtttcccttattcatctctgggaccttcagctgtatggtaaaatactttgcaattaaaatttctcttaataagtattattatttaattataagtatgaaataactgaactggaatgctctgtgtatactgccctggtactgcagtcccctcttcacacacacacaggtgcacacacacacatgcacacacacagactcaggcgacacagtttaagcccatgtgtgacatgcaggcacaggtgtgcttatgagaaccatggtgaccaagaagctgacactcagccctccatacagagctactgataatgcacacacgcccaccatgtggtgaaagacacaaggcacacgcagcaagcatgcttggacatgcaagggcacacgcacacacttaaagacatgaaaataccccagtgtccccagagacagagggcccaggtgcagacgcagtgttcacgccctggaaacttggcccagttttctgccttgccacagagctgccaaatacatgtctctaacctgagaacagtagggccagaactactcttgggctcaaggtagagaccagtcattttccaagtgggatctaaggaccctcctgccccatcatcacccagggtacttgccgaaacaaacctaatgagcaggccctctgggggtggggggccaggtgacatgcatttggacaagctctgcagctaattcttaaaaacacacacacagtttattgaggtatgatttacttacagaaagctgtacatacttaatatccatgacttgatgggttcggggctgagtatatacccatgaaaccaccacagcctatgccataggcatatccatcacctccgaaagtttcctcctgccctctttatttattttattattatcctttgagaattgttgcttagatggcatgggctccagagtgtcagcccaccagggtgtagtgtagaccctgtggaggtgagagggtgcggccggcatgacagcctggcattgagctgtccgtctgtctcccaagtggttgagagcccttctgcagggcccgtttgtcagattccttgtggtcagaccctttatgccccaggggtggcaacagaagagatccagaataattggggggtaccataggaggggtcatgtgggttggtgaactggcaagcagtgggtggttaggaggggaacgcctggactgggtgggaatagaaaggtgaacagcagaggagacatgaacgtgccttccttcctgcatgacttacgatggatagcgcactcactgccaaggagctgctgaactctccctgtagccacagctgggtttggagctgtaactctcatgtatgcatccaacaggtaattttttgaattccgaagatgtgccatacactgtgttgtgctgaggtttcaggacgtgagtaggagtgccctcggctctgcagtatctgtccccagtctgcgatggaagaggctgtccccgagtagacagccagcccccactgtcctggcccaccctggtctcccagcttgaacatctctcattaaactgaaaaggcagagtttgtcaccttgaatcattttgccagttcccctggcttttagggccactagcatgttctgagtcctcgatgccgccctgtgagagcaggtcgctgcgtcgcagcagtgcagacagggccacccttctctcgctcaccaatctcccctgcggggtcttacggagggtgattgaagccagcaaacccacggccagtgccggatggagcctcagggctttgcgggtattgggcttgtggcccttgttccgggacagattgagatggtgctgttacagaagcaactgtctcgaatttccccaagagcaagggcttgggtgcagatygcctgtttrggagatgatcacaggcctaagggaatcgggagagtgatgctgagaggagtaagccccatgattctgggctgctgtacactcagggctccgtcccacctctgaggagcctgcccgaggcctccaggagtgtgcctgggaagggccaaaggcggggctctggtcgcaggggttgagggctccccagggtgttaactcccctgtggctttgcttgggcagagcttgtgccaggactgagtgggcttgagcagggtcagaggtggctctgaagcagaaaagcaaagcgatgcaaggtgcacctgactgaggccacagtgtggccgaatcagagaaagtgtgacccacagtgtgctgggacgtcactctttgtccttcccaccaatcacatgtgtggcatttgtaaatggaaagagaataaaaggaaaatgcctttatagacaaatctgagaatgcaagctaagaattcacagttgagctctaaacgtttgcgaggagttggggatctctacctcccgtgtgagcaggcgggagccaggctgggctctgagatagaattccagagcaggggaggggctgaaagctgaaatacaagctccagaaacagtagaagcaggttgagctcagttactctgtcccatgttttctcccttaatgcttattaaatgttgcagacaccatttcctaaggctcatcagtggaatgagtgaatgaccgaatgcctgcatgcattaatgaatgatatgagcggcatcccatgccttgtagctcagctcatctcgtcacccaccggaaaccctcgcatgcccagtttcttgtcatctttcatgcaggaactttcactgctgcctaagtcctgggccacagcatctagcatctctgaaccctgaatcacaggggccgcccgcttccgcctcttggggaacgtacacatctcaccaaaaacacttattcccatctcgtctttccacctgtgtgaagtttatatttaaggcctgcagacagctgattcagcttcgaacagatcagttccctgaaatcagccaacatctgtcttgtcccattataccttcgcagaaaatgagaagcgacttccccagcataaagaaggggccaaatgcagcaagacctggctgagtcaccttgaggatagaaagacagcatcatccccggggcctcgtaacctccaacctgcttttctgtttttgaggctctgtggacatgctgctcacgttccttgtaactttgtcttcgtacgtaagagctgcatgaacaaagccttcctggagagagtaaggccaatcgtcagctgctcaacccgtgcctggcacatagtgagcactcaggaaatgttagctgctcttttttttttttttttttactaatcttttcatccttgttattatttgtattatcattactatcatctggcagacagagctggatttgaattccagatctgctactttacagctgtgtgactccaggcaggttcccaaacctttctgaggcttattgttcttttttcttaaaagagaaaacttcctcacacctgtaatcccagcactttgggaggccgaggcgggcggatcacgaggtcaggagatccagaccatcctggctaacatggtgaaacaccgtctctactaaaaataccaaaaaatcagctgggcgtgttggtgggtgcctgtagtcccagctactcaggaggctgaggcaggagaatggcatgaacccaggaggcggagcttgcagtgagccgagattgcgccactgcactccagcctgggcgacatagcgagactccgtctcaaaaaaaaaaaagggggaaactactagcagttggtagtagttttcccttttaagagaagatgaggttggtagggactgaatgagatagccgcatgcgtgtaactcgccctctgccatgcctggcacacagcagctctgtcacgaataagcaccatgctttccccagcctccccacccagatccatgcttctgtgacagcatgcattttccttggcctggtgtcatcattcatgatttgtaagctgggcatccccagtattcccaatcatttctttttcatcttacaggcgcctggaggcccagcatcgtatatcagactcactaggtcccaaaggaacaagggcctggatgttgggagtgtggttagttggtttcctctggcaccaggaagggacagggcccagcatttggggagagaggagacacctcttcctgagtccagagggaggaggcaggatcnnnnnnnnnnnnnnnnnnnnnnnnnnnnnnnnnnnnnnnnnnnnnnnnnnnnnnnnnnnnnnnnnnnnnnnnnnnnnnnnnnnnnnnnnnnnnnnnnnnnnnnnnnnnnnnnnnnnnnnnnnnnnnnnnnnnnnnnnnnnnnnnnnnnnnnnnnnnnnnnnnnnnnnnnnnnnnnnnnnnnnnnnnnnnnnnnnnnnnnnnnnnnnnnnnnnnnnnnnnnnnnnnnnnnnnnnnnnnnnnnnnnnnnnnnnnnnnnnnnnnnnnnnnnnnnnnnnnnnnnnnnnnnnnnnnnnnnnnnnnnnnnnnnnnnnnnnnnnnnnnnnnnnnnnnnnnnnnnnnnnnnnnnnnnnnnnnnnnnnnnnnnnnnnnnnnnnnnnnnnnnnnnnnnnnnnnnnnnnnnnnnnnnnnnnnnnnnnnnnnnnnnnnnnnnnnnnnnnnnnnnnnnnnnnnnnnnnnnnnnnnnnnnnnnnnnnnnnnnnnnnnnnnnnnnnnnnnnnnnnnnnnnnnnnnnnnnnnnnnnnnnnnnnnnnnnnnnnnnnnnnnnnnnnnnnnnnnnnnnnnnnnnnnnnnnnnnnnnnnnnnnnnnnnnnnnnnnnnnnnnnnnnnnnnnnnnnnnnnnnnnnnnnnnnnnnnnnnnnnnnnnnnnnnnnnnnnnnnnnnnnnnnnnnnnnnnnnnnnnnnnnnnnnnnnnnnnnnnnnnnnnnnnnnnnnnnnnnnnnnnnnnnnnnnnnnnnnnnnnnnnnnnnnnnnnnnnnnnnnnnnnnnnnnnnnnnnnnnnnnnnnnnnnnnnnnnnnnnnnnnnnnnnnnnnnnnnnnnnnnnnnnnnnnnnnnnnnnnnnnnnnnnnnnnnnnnnnnnnnnnnnnnnnnngacaaactgttggtgccacttctttgtcatcctctgacctcctgaaggatttctcgtcctcctctttttgtaaattagaacttacattggcaaataaaatgcactaagtacgaacccccagaatataaatagatctggcaccaagagagccagatgatgtccgcacttgtgaaagtcaaacattcaccctgagcagcagcgggaggttttaggatgatgtggctgttctgtattctcagtgtggtggtggtcacacaaatctatacatgggctaaaattcatagaactttccgtttttaaaatattttcaaaatgattttaaatctatttacccctaatgacctctagggaaattgttgataatattaaacccataagccgtaccatgcctaatttttcttcctgtttttgttttgttgtgctgtgtttgggtaaaaaagatatgtttgttcatcctgtcacaggatggccaggagggtaaccagtcatttctggaaacggccggacaggggaacctacgaaaacaactctggggcgtaaacagctgctgatggaggaagcattgatagcatgcagtttctttagtttatgtgctgttttgtgtatgtggctcatcaacttgtcctccaaaagttaaggactgaccactagaaacagagaagtgacaaactattatggctgaaatagcaggactttgcaagtccagagagaagatgaaggctgagtggggttgttgatccagcctccgtgtgcccaggggtcctctgtgtgcccaggagtcctccccttgcttctgacatgattatttacgcccatggcctgcatgcccatgcatgagacatcatggttttccctgtaatcgttatctcaaaaccagctttcccctgtggcaaccctccctcctgagggcattttcaagcttactacagagaagcagctggctttgcaggaaaggtctccccccagcccccagggagagaacttcctttgtcctggatgtaatggggtacgtatcctcattctaagtgctgggcctcggcgagggtccctgtgcctggagtggtcccagcagctcgacccgggatatgcacccccgtgactgggctgtggcccaaggccacatgctgggctcagagccaggatgcttccctgtctccacaggggcatttgcttatttttttggaggaaataagagggtcgacagcctgtaaatgtccttccacagtgtcctctgcagctcagagcagccagtgtaagatgtgggttttcagggccactcctggcagcaagaggccccaatatttgcagaactgagcttacgatcaggctgcccagcctctcccgccgctgtctcgtgccccggcctgcgctgctggagtctggagcagcactgggagggactgcccttccttgctctcaaaagacacctcctaaagcgtgttcttctttctctgctcctcgtgtgctccctgcttggctcccacgtccagatccctaacctgggattagaagctctgggattcgaagtcctactgggtagccccagcctgcccctctgccactctctcccgatgtggcctctgcagcagcctgacctgctcaccgtccgttccagtctgcacggtgcctttggcataaggtgccttccctgccttcccccgcctccaggcctccaaacccagttctgccccattccccttgtgaaactcaagtgctacctttgccataaccaaaagagatttatccctcctctaaataatttgcgtttagtataatccatcttcttattcatttatccatttgatccccaaagaaatgatatatttcttaggccctgggtctggctcttaaacccggggagagaaccaaggctgattgtatccactggttgtacggtgaacacgaatggcctgccacccttggcttagactagggtaatgagacagagagacgtaggtctcagcgtcccgccagctatgtgagttgggctaagtctcaccacctctccgacatgactttgccacagctcactggatgagagccgacgttctaggtgagggctttgggaacaggaaaggtcttggtaagttttaagcctcatgtctagcctcacagcctcttcacgtcctgcagttagccgagactataaatacattactatttctcaccgtggcctctctgtccctggcttttccctgttcttctcctcccgctatctgtttgtgtttctaaggttctcagactaatccaggtggacacgttggaagtagatagggaatctccagacaccacccgacttagacactgggcacaaagaggagaaattccagcctctgggagtgatgccggttcactgctttaccttcctccatcggggctgcccttgcannnnnnnnnnnnnnnnnnnnnnnnnnnnnnnnnnnnnnnnnnnnnnnnnnnnnnnnnnnnnnnnnnnnnnnnnnnnnnnnnnnnnnnnnnnnnnnnnnnnnnnnnnnnnnnnnnnnnnnnnnnnnnnnnnnnnnnnnnnnnnnnnnnnnnnnnnnnnnnnnnnnnnnnnnnnnnnnnnnnnnnnnnnnnnnnnnnnnnnnnnnnnnnnnnnnnnnnnnnnnnnnnnnnnnnnnnnnnnnnnnnnnnnnnnnnnnnnnnnnnnnnnnnnnnnnnnnnnnnnnnnnnnnnnnnnnnnnnnnnnnnnnnnnnnnnnnnnnnnnnnnnnnnnnnnnnnnnnnnnnnnnnnnnnnnnnnnnnnnnnnnnnntcttctgggcacaccccgtttgagtgagatcataggaacaggaaggcctcagaaaaatgagccgcagtgctgcctgcgagactcagtcccacatggaccaagaggggaattctgctgagaaagcctcacgagagaaatgaactgaggagaggaaatatcatttatagattgaccagagtgggagggttaactgtaaacgtgcagatttcagaaaatacagcgtggatgtacacaaaggaaatacccatttaagaagttgggtgcatggctctctatttgaactaaacataagagtttgtattgaagcaggtcgttgctgatgatggtgactcacgttttctgagtatttgcaggaaagggctttttgtgaccgtcatcatagctctgaggtagctcttgcagccttattgtccccatcacgtagggcactgtgtggtcagtgcgtggcctcaggtcacccacatgttggtgaccactacaacggtacagcctctgtgtcccactctgtccagatgattccttgcagaaagcaggcgtgttgagggtccccaggctgtggtgtgcacagcaggaaacccccagctcctctagaaaggcctggcctcaggcacccttgaaaacacgtctgatttcagcagtctcacgtcagccctcccctccccccacctcgcacaggcaagtgtcctgccctctagagagcgccactgaggatttgttttcctgtcccattgggaacctcatgcttggttagcacagacgtcgtatatctgcatcactgctccattctgtccgaggcaatgatgatgctgacaccactgcacagagcagcactgcccctgctccagaattaatgattcagtgccccagacaaaggtggcatagtgtgcagccacaggaagcatgcatgttttccagggtgtgcctcccgggagggcacatctgtgcattcactccgcacacccctggcgtgcgcagattgtgacccagtgctgtgagggattcagacctggggcagcctggaattgaccctgagaatgtcaatgggagggatgcaggtgacagccatgccagctggacagcagtcatctcctaagatcaccaaaggtgaagggtgaggggttctgccatgggaaaggccaccttgtgcctggtgcagagggacctatgccagctccaccctccccagctgcaggcccagccttgcctcctgatagcagggtgtacctgaggggcttacactctcctgctccttagtgagacttctcctggacaaaacgtaacttcttgctgggttggaggctgtggatggcaggtacatgtggcctaagcatggtcctcttccccaggtgataaagaggaggcggggagggagcctatacatattcacattatcctcctttccatctagcaagcgagactcaccacacttaaatactttccatttcgcctgcacagcgtgaggattgctgagtttgttttgccatagaaattgaatgtttctaatgaaacatgacaacatcgcctttcctagcaagtaggaagggagatctttttcaggagatgtactccctgcggccctggggaaatgagatactgccccaggctggtgggagagatggcgggtgccactctccagtatctctgtctcacggttcttgctgcccaagctactgtgcgtcggcagccggctgggccgccctcagtcaagcaggttgttcggatcgtggcagctgtggtgctgtgtgctctgcgtgggtcgtcgtttttattatttattatacccgtccttcaaggtcctactcaggtttcatttctctattcatctttctttgggcactctgctcttctctgctgtaacttcttgctgcatgtaaaatctgtggtataatatatgcctccttgcatttgatggaacttttgaggtttggaacttttgttctatagctgtgtcctgggtgttagtcctggtcaaggagctagactggaacctttctgggtgtctgtgctggtgattaacatattccctgtacttgatggtggcggggtgggtggtaaggattagagatttcacagggcctgttgaaggaaagctgttatataaatcgcccaatcctttcatgagctacaaaggtcagtgttaatgaaaatcatttcaggatttttgtttcataaattatgtttaaaataactttttcaggaacgctcttacatcgctggtacgaatgtaaaatggcacagccactgtagaaaacagtttggcagttcgtcaaaaacgtaagcatagaattgccatatgattgctgcaattccattcctaggtatacacccaaaagaagtgcaaacaaggactcgaacaaatacttgtacatgcatgttcatagcaacactgtttacaacagccaaatggtggaagcagcccaaatgtccatcagtggatgaacgtatatgcaaatggtggtatagacatacaatggaatattatttcgccacgaaaaggaaaaatgtactgataaatgctacaacatgaacatacacccaaaacatcatgctaagtgaaagaaggcatacacgtatcgtatgatactctttatatgaaatacccagcatagaaaaatccattaagatggctaggtgcagtagctcatgcctgtaactccagcgctttgggaggccaagatggacagatcacttgaggccaggagttcaagaccagcctggccaacataacgaaaccttgtctctacttaaaaatacaaaaaactagccaggcgtggtggcgtgcacctgtaatcctcaggaggctgaggcatgagaatcacttgagcctaggaggcggaggctgcagtgagccaagatcgtgccaatgcactccagtctgggcgacagagcgagactccgtctcaaaaaaaaaaaaaaaaataaaaaattccattaagacagaatgcatattggtggctgggaggaggggataataggataaattcttaatagataagggattttacttccaaatgatgaaaatattttggaactagatagacgtgatggtttgtacaacgttatgagtgatgaatgtactaaatgccactgagttgttcactttaaaaagactaattttacgcatgtgattcacctcaataaattattttttaaacagaaaagggaaaaaaattaattttctgtttaattattttttaaacagaaaaaaaaaaacctttaggctaagtaggaatgggatgagatttttaccaggaactgagattcaggccctttttggtttatttgtaygtgggacctagcattgttagagatgccaggtagaatgagagtatctttgagagctgtgtttgtgtcgtcgccataggagctgattttataaatcctgacaaaagcagatttgcgaagatgatttatacttttccggctgtaggctgaaacagtaaggtaaatattttgttttctccttcactcggagagaaaaggagcagctttactgcagctctctctgaggcccctgggcacctgtgtgtaagcagagctcggcgttgccctgatggaagtggtggtgttatctgaagaacaggtgtagtgtgcacagcgaggcaggaggtaaagccaggccagctgcctctgggtgctctctctgtcttacaagaaggactgatccctggcagggggtcggggaggaggcgaaagggggagtattttgtctatgatatttcaataattctaaagtctgtggtatagttggctttagagatggtaagcctaaataaaattccatttctgcaactgactaccctcgtgtgtccttggcaagttacttaactttctgcatcccggcttcctgacccctaaactggggatcataatgctgtcttatagaagttttaaggattagatgaaatccacacatgcagtgcctggcctgtggggatgcacagaaacattcatctctctgaggaagcaatgctctgaaacgtgtcacctctgagtgttgacgccaggaagatgtgagtgttcctttcagcctgtgtgactcttccccctttactcttttcaccccgccccctttacttttatgtccatttctttgtgctgccatttagaggaagtgaaaagtatctgggtttggttttgttttatcatcaactatcttccctaatcagaaaagactgcatttttctttttctaccttttttttttttgaggcagggtctcattcagtcaccctggctaaagtatagtggtgcactcgcagctcactgcaacctcaaactcctgaccttaagccatccccctccctcagcctccccagtagctggggctacaggtgtgtgtcactgtgcctttctagtttttaaaattttttgtagggattggtggcggggggtctcactatgatgcccagacttgtctcaaactcctggcctcaagtgatcctcctgtctccacctcccaaagcgctgggattatagatgtgagccaccctgcccagccaagactgctttttttctcttcccattcctggtttgccacatggataattatatttcattgtcacaggcctttatataagaaagaaatctgcatcttaccactgtgtatttacgtagttgcatcccccaccctactatcaacaaaatcactgaccttcaacaaacatcacgttatcaatggctttctgggtacattctctttgccttggtttccttctgttcatctgcagcacactttttctccctctggccagttctccgaagtcttaaacattgattagaatgtctgttcttcctcaaatcctgatttgttaatacttttgttccccccttaattcaggaaacatttattggacacctattaggagcaagacagtgtgctatgatgaatcagaactaggcccttcccccaaggagagtccagtgcagaaaattagacagaaatcactctgatcacagttaagctgtgggacaggatttcactgaactgtggttttgtagccatttcatccctgagtcatgcttcttccatagttttcggtaatttgtccaaaacatctttggcagattatattttggaactattgtaaatcctcctttcctaaattttcatcttgagtgtgtgttctttctactcttggaagtttatatgggttttaatgaactgtttgtcctgtaaaccattctgtagagcagttctgatttgttctgattctttgctttcccctggcctcttgaataactttttaatgtcctcaagcttaaatatatctacttctattctcaagtacagaggtttccttcccatgtagcattgatgtcaggcaatcaggttggcgttctcagccccatttcccatttcatggtggccccaagagatggagtggcgagcccccaaggctgtctaactagcgggtggtgaaaggcagccccgggccacacagtagtcgtgcagttccggtgaggcctaaccctccgttctgagccgcccactgtgatggtcactttgatgacgaggaccacggctccctgggaatcggccygcaagcagcctgctcctctaatgatggaacacttatggctgctggcagtgggagacagtatgaatattaataaactatatttcacttttaktactttttcatggagatggtgtttgtgagtgaagtccgtgcactgagctacagacaggcgttttgttttcttgacaaaatggcgaacctcgcagccagaggcaagagcacgtttaggagcagctagctaggaaaaatgccagtaaacattagcaggccatataatagggggcgagcctgtggatttctgtgttttaacagttttctgaggcagataaatatcacaggttcagcagttttgcaggatattccttgtttgactgttccttttctgttgtaatgtctgcatgcaactgttaggccattgccttgccccataaatggttgccagtcacctgtcctggggttaacaggcagagccttgtcctcctgcccattcactctgcaccttccagccctcatcctccaccttctctgttcaactgacatctttccactaaaccaaagcagacactacctcccccatttatcatagctgagtgccccatctctgtttttatgtgaccatggaccatgcgcacaggaatgatcaggccaccagggaatggtgggcttgtctcaatcagtgaaccttggcaggtggcgagaacgctttgagacccaggcagaccacaacagactccccacgtggttccagagaccagaggtggatctgggctggggcaggaatgacccctcagcatgacagtgccccgtgcctttggtcctgccttgggaggagacacctgtcggagctctgagccgtgtgttgctgggatacgtcatgatcatcgatctgaggtatctttgtgttggtaatgggtatctatcactgggctaggtgacagaaccttgctctgttgatacatatctggtgtcttgtggagcgtgtaaggacacacgtgtctctggcagagtggagcatggcagactgtgagagttacaggaggatggattaaagttcatccgtttatttcatgagtcagaaagagcagatgaatttttgctaattcgaagtgcatctattacagccaggtcaaaagagaaatctgagaaaccttctgtactgagtaatgcagacccttcagacttaacctttcttgatgatttattgaataggaaaaaaagtatatttctgcttttgcagttccaagtttcttctcggtttagaatcartcacttcaaggaaagactgcactctttatgcatgtggaagtggcttgtttttagagttggattatcactcctttcatgtgttcagtttgcagcaagcatttattgagtgcctgctgcctgcgggatactgcattttagtatctgataagtgcacatgtttttagaaatgtttacctgagtcacacattattggagaataaagatatcatgtgtgtatacatttcccaagtgactaaaacttacccatttcaacaccatacttaaaatgtttttttttttttctggacaaaaatttaacaggaagacatcatagcatcccataccttctgatatagagtagaggacgaaggggaatgaatggcactggcattttaataagcatctgctaaaggccagaggcctacatttaatctttgggacaactccccatttagtggatgagaaaattgagtctgaggaaaccaactgccaagtggcacaaggctagaagtagtgctgctgggatttgaaccaggtgtgtctgacccccagacacacgtttcttctaccaagtgctgctctctctccaactgaaccccttcctaatccctcagggttattataaatgtgatgaaatgtgttcaaacacagacatgcacttaggtgctctacttagagtttaattctctttgctccagttaaaaggctccttgtatctgtgttcattgagttaaaattctaactctagctgccatttattaagtgcctgttatatgcaaggaattttacatgcattttctctgttcttcacaaggcattttttccattctgtagatgaggaaacaagctcaaggaggttaagtaacttgccccaaatcctataatcactaagtgatagagcctttggagtctttctgcctccaaaagctttgcatcttctcacagtggttggtctctgttcctcttggggttaggaactgttgtcattatgccagccccttcctgcagtggctctctcctgttctaatgtcgtgttcccatctcttcatgacagcagaatcaagtcaccaaacctgttggaggtaatggaaaaaatattggcataggaaccaaacgacctggcttctagccccaagctgggcatgtggccttaagcaagcccttggctcctgaaatttagagccgtacttcttccctgcctaggatgggcatttatcacgaatgtgtgagaatctgcatatgctccacccacataatgggtactgacgaaattatgtttgggacgtaagcacataactgtttttttttctgatgcatatagatgctattgtgattaataaattggaaaatgtgacttgcctactgtgactttttggtattttgtattttctcaattgggagatagtaacaatgcaattactatcatgtgggatctaaccattcccccaccccaaattctacagatgacaatagaaacctacttcatgtcagggagccacggtcacccctctctgtacacaggaaaagaacctgtcctgctcccttagtaggattgctgtgaaagtctaggatgtgggaacatagtgcagggtatacagagctagctctatacctttgaccttggcattaagcaggctctcggggagggcctgacaccctctctgtagccagtgtgcatgagcttaatgcacagattttacatctatttttggtgctcaaaggcctttttgagttcacttccaggttctgggttatgttctaggtagttgttggtgccaaatgaaaatgagcttcaaatgttattaaatgtatgtatttctttaaaaaagaaaatactgtttcagatacttcagaattagaaactgcaccaggttggtcatttctttgagcactggcctatttaaaatttttagaaaaccaaaaagctgtccctctactgtctactgatatgcctgtaatgttatatcaaaaacctgttaccttaagttttattttttaatatatgaatgcgtagaaatcatctttttataaatatcctggttttggtggatttaataccttccctgaaaggagaaataagtataccacgtatatttctattccccaaaaactctggatttttttcataggccacggtttttaatgtattatttatttttgaggtattaatacaattttgtacttgacagagcaccatgatgtatacagtttcatttaatcatcagagcagctccgtttcatccccacttgcacaggtggaaactgagaatctgccctgtccctggacgcagagccaggaaggagtcaagccagctggtccccagccagctctctccacaccaggctcacctccttatcccagctggttttgctgctgtggggcagctcactgtgccagacttttcccacatggtttatgagggctcatgaggtgaagggtcaggctttcattttggtccagtgtttcacatagaaattgtgctccatgcagcagtgccaggtcagagtgtaagtgattccaagccacatattactcttgggtaggcagggagcagggttgcaaaagagcaagacttaatgacattggctatctgctattattgtcttattacatgaaaagagggcctaagtttgttgtcactctctccgcagatatgaacactgaactttcttagtcataatggggacgggctcgtcagagtgctaaattaccagcaactgcagtgttatttgatgttcggttttatcagcaagggtgccagatgtttgcacaatcgaaactatggaactatagagacatataaaccagctctgcagctagccacatatagagccaataccacactgtgatagtaagggtaggggggcgttttccttttgtccaaagaaaagaggtttcccacagaatctcaacactgtgtccctgaaagtgatcttggcaattatctaatctcacctccttcattacagattcctgttttttatgtcaaatacattggaggcttaaggctctcggccagatgctaaaggtgagcatttgcaggcttcccaggccgagattgtccaggatcaaacacccggttcgtaggatgtctgagtccctttagtgttgctatcaaggaatacctgagactgggtaatttataaagaaaagaagtttatttcgctcatgattctgatgtctgcaaaagttcaagattggtcatctgcatctggtaagggccacaggctgcccccactcatggctgaaggtgaaggggagctggcgtgtgcggattacatggcactggaggaagcaaggcgggggcaggggagtgccaggctctttaaatttgtatttattttattttatttttaaaatttatttctattttttgtagagacagtgtctcactatgttgcccaggctggtctcgaactcctgggcacaaacgatcctcccaccttggccccccaccccaaagtgctggggctggctcttttttacaactagctctcgtgggaacaaatagagcaagaactcatttattactgcgaggacaacactaagccgttcatgagggatctgtccccatgacccaaatacctcccattagttcccacctccaacactggagatcacatttcaacataagattggagggggacaaacatcaaaactgtagcatagggaagccagcatctgtccacagcctgctgtatgtccctactcttcttggccctctgccctcccctgactctgtgtgcactgctcataccactaaatagggaccgatgctctagcaaatggcccttgtgttgatgcattcaccacccctttacactgacgtagttgggcaagcaagtgttcaggaatgggtctgagggctttctgggtgcagctcatttcccaagcgctttcccctggcatccctttaaacctgctgtgtcagctgtccctccccgcactcccccacccccgcccccaccgcttctcatggacctgcatagattgggccccaccttgaggctcccccagccccctgtgcacaccgaggtgcccggcaccctgcgtgagctctcactgtggatggtgagcaaggacatccacccagcgtctttccccctcacaggctgcctgaggcctttgtccctgtcctgtcagggaagctctgccgctctcctgttgattgactcaccacctgactccttcccagtcctctttttctcattttggagttagaagtctccagaccccagttagtcctggctcctcttcaagcaaagcgcaagccatagcttgggatttctgagccacacgattacatgtagggccagatatgacccttggaccaatgggaagctgtgtgtggcagagatgggcaggtttgtaataggaaagttccaggctgggctcatcaggtgagaaacatttctgcacacctcccccatagcagacccagtattcttcaccatcaacagacataaggtaactgagacaggaagatgttacctgtgaggaacttgcaatttagctaatacatataaatgatgttgtgtgaaagtaattctgggctgtttcacaagaaatatttattttcattccaaattggatagcaagccaattctttcttataagacagcatataacatacataacttcaaaatgacacacttggactgcctaaatcttaatcctgagaacttcaaggttccatttggtatgtgggcttcattgtgatgattgaattaggcagccctgttaacgccaacaaaatgtgaccgcttttctctgattgcatttcctgacttctaagttttcccgatagcagttttccctaccagcagttcatttccccagctcttggggagcactctgtggggtccgtggctgcatttacaccccagccaaacgtggcactcatcgggcgtctccaggctgcacgaagattcaactttagctttggctcttggtccaccacttggcagttgggaaagttttcattttgagagtttctcttcatttgccttgttaatattcaggtttgacttgtagtggtaccataaggtataaactcttagtaagactggaaataaaattgtggtattttactgtacataagcccctgaatgtacccagaagtcttatacaagttgttggtcactttgacttttttttcatcatgttctatactggtggcattaaattcacatgcaggcagaatccgtcttataatgaacattagtatttttaagttttgctgtctggattttggtgaggtgggaggtgggaagagggaaagtgattttacatgggaactcatctctggtgttaaaaatagtcaattgaggcatatgattgataacaaatattatcctgtgccacattattcaggggaggacttgatgctaagattgtaggctgcagatgaaaataagtagcctaccagccctcttaaacatctccctttaactgggatcatacccccaaccatagcccttggaagagaaccggcagcagccatcagctcctgccttttggcccttgacattggcccagactctagagttgagggagtgagaagcccgttcttccagaccttcctgtgtcttccagtctctagctgtcttcaactgcttctgatattcagaggtcaagttatcatttacttgacaatcactcccagttagggggagcggtaaggagaggagtttgaaaaggaaaaagtggaaaagtggaggagactgccagaccaagagaatgagaggagggagtgcctcttgatctcgatgaatgagtcatcagctccagattcacgtggtcgcgaaagaggaggagctcacacaggcctggtctggccaggcttcagagggcaagaagagggatggggtgtgtgtgtgcccagtggattgtccctgcaggcccaatgggctgcgtgtgtgtgtgtgttggcccagtggattgtccctgcaggcccaatgggctgcctgtgtgagttggggtgacaagaatccatgctgcttgagaacaagggtgagcttatccctggatgtgctcaagcacagctttgcagatcttggctaaggaagatcctagaatctggttcttcccaaggatctttgccttctctctgggaaatttcatctcctctcatctctggatccttctcccaatcacccatacatccaccagcccccaaactgccccagaatattattaagcacaaatctaagctgtttcagccagaattgtgtttagcctgggacaggaagagctggttcctctgccctgtactgcctgaggtgtgcaagtttaggaatccaggagactagtattttctcccaggttcttggcataccaatcctagtgaggggtgcctgctgagggactttagacatgggataggatgagatgggatgggatagactgagacaagaattgggggcagcttatcacccataccctgtgttaaaattaaaaccaaaattcttaagcaacattaaatatcctgtatttactatgttagtctgttttcttcaccaatgtattctatatcccaaccacctaataatgcctggcatattataaatacctcagagatattgcaggcttggtttcagaccacctcaataaagtgaatattgcaatacagtgaatcacatgcattattgtggttcttagtgcatataaaaaactgtagtgtagtctttgtgtgcaatcatttgtacttacctcatttgtatgctatatcatgtctaaaaaattgcacatacttaattttaaaatactagagytaattttaaaatgctagagctaggcttgcacctttaatcccagctacttgggaggctgaagcagaagaattgcttgtagtgatgagttgagaccagtctggccaacatagcaagacatcatttttaaataaataaatgaatgaatgaatgaataaaatacttcrttgctaaaaatgctagtgatcttctgggccttcagtgagtcataatctttttgctggttggagggtcttacctcgatgtcaatcgttgctgactgatcaggatggtggatgctaaaggttggggtggctgtggcaattttgtcaaaatgacagcagtgaagtttgctgcatcacttgactcttcccttcacgaaagagttctctgtagcatgtgatgctgtttgataacatttgagccacagtagaactttcaaatttggagtcagtcctttcagaccctgccactgctttatgaacgaggcttatggaatattgtattagtctgttctcacgctgctatgaagaaatacccgagactgggtaatttaaaaaggaaagaggtttaattgactcacagtttcacagggctggggagcccttagaaaacttacaatcatggcagaaggtgaagcaaacacatccttcttcacatggcagcagcaaggagaagtacagagcaaagtgggaggaaagccccttataaaaccatcagatctcatgagaactcactgtcatgagaacagcatgaatgcaactgcccccatgattcaattacctcccaccaggtccctctcacaacacttggggatgatgggaactacaattcaagatgagatttgggtggggacacagccaaaccatatcaaatattctaaatcctttgttatcatttcaacaatattcacagcatcttcaccagaaatagattccatctcaagaaactactttttttgctcgttcataagaagcaactcctcatccatttaagtttgatcatgrgagtgcagcaattcagtcacatcttcagctccacttctctttctggttctcttcctatttctacctcatttacagtgacttacaccactgaagtcttgaacccttcaaagtcatccatgtaggttggaatcaacctcttccaaactcctattaatgttgacatgttgacgtctttccatgaatcatgactgttcttaatggcatttagaatggggaatgctttccagaagactttcaatttactttggccagatccatcagaggactcactgtctatggcagctataggcttacaagatgtgtttcttaaataataagacatgaaagacaaaattaccccttgatctatgggctgcagaatggatgttgtgttagcaggcatgaaatcacattaatcttgtacatctccatcagagatcctgggtgactaggtacattgtcaatgagcagtcatatcttgaaagaaatstttttgttctgagaagtaggtytcaacaatgggcttaaaatattcagtaaaccaggctttaaacagatgtcctgtcatctaggctttgcagttccatttataaagcacaggcaaagtagatttagcacaattcttaaggaccttaggattttcagaatggtaaatgagcactggcttcgacttaaagtcaccagctgcatcagcccttaacaagagagcaagcctgtcctttgaatctttgaagccaggcattgacttctcccctctagctacgaaagtcctagatggcatcttcttccaatagacggctgtttcatctacattgaaaacctgttggccaggtgtggtggctcatacctgtaatcccagcactttgggaagctgaggaaggaggattgcttgagcccaggagtttgagaccagcctgggcaacatggcgaaaccttgtctgtacaaaaaattagctggctgtggtgttgcatgcctgtaatcccagctacttgagaggctgaggtgggaggatcacctgagcccaggaggttgaggctgttgtgagctgagatcgtgccactgccctccagcctgagcgacagagtgagaccctgtctcaaacaaaaaagaaaatctgttgtttcatgtagccaccttcatcaatgatcttagccagatcttctggataacttgctgcagcttctgtatgggcacttgctgcttccctttgcatttttatgttatggagatggcttatttccttaaaccttatgaaccaacctctgatagctgcaaactttttttctacaatttcctcacctctcttagcttccacagaattgaagagttagggatttgttctggattaggctttggctgaagggagtgttgtggctggttggatcttctatccagaccactaaaaaaccttctccatatcagcagtaaggccattttactttcttatcattcctgtgttcactggagtagcacttttaatttctttcaagaatgttttctttgcattcacaacttggctgtttggcacaagagacctagcattcagcctgtctcagctttttttatgttattaagacagtctctctctgttgtccaggctggagtgcattggtgcaatcataggctactgcaacctcaaactcctggattcaagtggttctcctgcatccagagtacctaggactataggtacacatcactatgtccagctaattttttaaaatattttgtttgtagagatagggtctcactgtgtcatccaggctggtctcaaactcctggcctcaagcagtcctcccgccttagcctcccaaagtgctgggattacaggcatgagccaccacaaccagccctgtgtcagcttttgacataccttcctcactaagctcaatcattactagcttttgatttaaaatgagagacatgcaactctttctttcgcttgaacacttagaagtcattgtaggattattaattggcctaatttccatattattgtgtctcagagaagagagaggcccgagaagaaggagagagatgggggaacagctcatagatggaatacacaccacatgtttgattaagtttgccatcttatatgggtgcaattcatggcacacaagtaccattacaatagtaacatcaaagatcattaatcacaggtcaccataacagatatcacaatgatgaaaaagtttgaaatattgtgagaattaccaaaatgtggcacagagacatgaagtgagcacatgcttttggaaaaatggtactgatagaccggctcgatgcacggttgccacaaaccttcaatttgtgtaaaaaaaaaaaawccatggtatctgcaaagctcagtcaagctaggggcaatataatgaggtatgtctctctatatatatgcccctccccaaattccaagcccattcagtatttaaaactattttctaaagtatttgtagcccttcaaaaccacaggagagtgagtaagacctaactgttggtgtaatacagaataatgaatctatctattttactctggaaaggacatagccaaccctcatgaagctgtatgacatgccattgcctgccaatggtatgaatgccattgccagggtatgacagtggcagccaacctccaggaaggcccctaatgaccctcacctcctggtattcaccaggattggtctgtgtgacccagagaatctggcagaaatgacggtgtttcacttccaagattagattctgagaggttctgcagcttctgtcttggtatgcgtgtgtctctctctctggtatttctcgctttggctcccgtgttgtgagcagtcctgtggaggcccccgtagggaggagctgaggctcacagaccgcagctgccttggggagcttggaaacatcttgatcgcagcctcatgagggaccctgcaccagacccggctaggccgctgctgaagcactggcctagagcaaccatgaagtaatggttattttaaggcactaagttttgcggtaccttgttacacattaacaggcagctaatgcagtctctgttcgcatttttatcctcgtgtgtggcacgcgtgttatatagttaagcatgaagcaggtcacgtccaggctccgaggtgagagccaggcccttccaggtaatgctaaatattgtacaaacagcaaggttttgttcatcaacccaggagtgaccttactgagtggcgtgttggtggtaaaaatgccttatatttaagagagaacacacattctcctttctctcccaccagaaagtctggttcttgctgctctgtcatttcccagaaaggaccagcctctcttgctccaccccacttcctgtctgtggccctgtgatgccagggggccctccactgtcctacagaggaggggacaaggggcaagaggggccagaagcatctctggaatgcacacagctcatgagcagctaggcttgctccagcagtcacatgtcctgactggagtcttccagcgccttctgtcccctctgttagaagaaaggggaacgcgggtccttaacacagtgcttttgggagattgccattgactcagagtctgagatttaccattaggcgcatttgaaacaataaacatgcatggagcacttactgtgtggcaggacatggtgcagggtgctgtggggaggagatgagtaaaacagtgttcctgctcttgaggagcagtcaagcacagtcattacggccccacccaccacagggacccagaggagggcacaggcacgcagcgggagggatgagggaaagcttcccgtaagaggtggtgtccacactgcacctgaagaaggtggaactgacatctctgtcctaggtgcctcaacagagcccttcattccaacccctcattgcacatgtatagttacaggtctggctacccctgctcatggatgagtttcttgaggctagagatgggttttacccagtgttcctggtgccaagcccaggtcttgactcactatgggctctcagtggatgtttgatgagtgagtgagtgagggcatgtggtggatgatgaggctggagaggtaacaggactgaatcataaggaccttgcctgtcgtgaatattgaacagcttggcaatagagggggttttccttctgaggagtggaagcaacgtggtctatggtatgtgccaagtgagggcagaagctggggcagtagccacattggcatctcaccatgagtcctctacatggcccagggtctgtaccagcatgacataagccgtgcacgagtaacaggagtgtcagccagatccgagggctccactgtgatgcctgccctggaaaagatagagcccactcaggccaggccatggtggtttgagcacctccagcaccaggggagatgctgtcctagaaccagggcccccagtcagtggacaaagaaatgtaggaagattccagctcagagaacatcagaccttctgctccctggagcagtggtggctgcatggacccagggcttggtgcatggaaagtccaggctccgcacgctgtgactctccttaaagtgagaatatttttcccaggagtgcaagggcctttcatgtgaggagttttaaatgtgctctctggtggtagccacagcatccttaattttcttgtacagcaaaagtcaatttggaattgcaggaaaggaggctttgttctcaggtgatgttgagcagcctcttttgtggtcacctcttgacacccacactgagcgggaggaggcgaggggagtgcagcactggcgctgattatagaaaacagcaggggttccggaagaagcctttggctttggaattgggtttgtgcttccatttaaatgtggaggtgccaggtgttctgataatttcactgcaaaattttgaaatccgctaataaagaccatttagaaggacctgagaagtgggctgtgtcctccctcctctcccacccacctctctcctgccaccagctctgacctgggatggacggcagcatgcttctgttatcaaaacaggccaaaaagaatgaaaagctaaaagcagggaaaacttcacaagtttagataaagttttcaagtgattaagtgctgtggcagtgaaaacattgacccaattgcaacttgtaggctccatcagagagctgtggttgacgggctctcctgtacatttatatcaggagagatgtgttaccggctccctcagagtgtaaagtgtacccaaaatagagcttgaagagtggctttatcatggagtgactcagcgccagctaagaggaaagatgaatatagcgtgacgatgttctccacaggaaacccatggcacgaaaaccaggggcggggagggtgcttgtagcacagtggccctgtggctgcctcactgggcccatggctgagtaatgggctgactgatggcagccctgtggaagctggcctcagacaacacaggaagcccgctcagattgtctctcagagcctgttcccaaatgggaagccaccagcaaaaaaatcccagtgggctgtgctcttcatgtcctggttgggaaattcaggaagcacacgtgaacacacacatgccacagacatgaaaaaggttctgtcttctgaaggctgttggccgatcttaacatgaattttaaaaaatgatttgctacatttgaggcatttcttcaagccagttttggacacaatccctggttactttgttcctggggacattcagtacccatgtctgccaagccctgtagttttgaaaacatccctggccctcacaaaagccctcataaaacagcatcccctcaaaacccaaggcacctggtaaggaaagaattaaagccagtgacgtgaatttaatgttcgatcccaaaaccagagttgacttggcttgtctgggttgttcacccaggggagggctctcctccacaaggcccaagccctactggggctgcttgggcaccagccacgctgtggggagggtgttaatcgtgactgaatcgtgattccatgtgggaaacagtcctgcagtcgggggacaggaggagccaggctggaatccaacacaaacagtccaggggcagagggaacattcccrggtacctgtgtccctgagtgacttgaaaatgctgaacttatgctgaattctgtttaatgattatttgcgggaggggaacaggcattcttaagagatcggtttaccttaggaaatcctgtactccccctgctttccggccttccggcctccttgtatcctgcacacgctattcctttgcatacatttgcagcgaactttgctccccagggtatctggcttttgggataaagactaatgtccatgtcaaaatgattcttgataaaagcatcctagatgttaaatatttattttaagctaaatgttctacttctgagaggttaaaaaacaaatgccttttcatgcagagccttttgccagtcaatgtttgagtttctttaggcttttttatttggctctgcagcagctagctaaccaactgcattcctgagatgagctgacaaggaggcagaaatgaagaaataaacaaaaagccatgttaatttcaagcttcagtaggaatacaaagagaaatattaacatttgctgaatgacaaataatgaaatggctggaaaattttaatgcttctagcatgcttttataagctctcctggaattttccccccatcaggtattgcacatttataaccagcagtgcaccatgtaaaggcagttcgataggttgtttaatttaaagattggtatttctgagcatatagtgttcctaatgcaattcctaaccccatttacacttctctgtctacccgaagtacccacatcttcttagcataatctttataattgtttgttgctatggttttaatgggtccccttcaaaattcaggtgttgccaatgtgagagtattaaaagatagggcctttaagaggtgattaggccgtgaaggcttctccctggtgaatgggtttaaggccctttagaaaagaggcttcatcattccctttgaaaactggcacaagacaaggatgccctctctcaccacgcctattcaacatagtattggaagttctggccagggcaatccggcaagagaaagaaataaaacgtattcaagtaggaagagaggaaatcaaatcgtctctctttgcagatgacatgattgtgtgtttaaaaaaccccatcgtctcagcccaaaatctccttaagctgataagcaacttcagcaaagtctcaggatacaaaatcaatgtgcagaaatcacaagcattcttatacaccaataatagacaaacagagagccaaatcatgagtgaactcccagtcacaattgctataaagagaataaaatacctaggaatccaacttacaagggatgtgaaggacctcttcaaggagaactacaaaccactgctcaatgaaatagaagaggatacaaacaaatggaagaacattccatgctcatggataggaagaataaatattgtaaaaatggccatactgcccaaagtaatttatagattcagtgctatccccatcaagctaccactgactttcttcacagaattaaatttcatatggaaccaaaaaagagcctgtatagccaagacaatcctaagcaaaaagaacaaagctagcggcatcatgctacctgacttcaaactatactacaaggctacagtaaccaaaacagcatggtactggtaccaaaacagttatatagaccaatggaacaaaacagaggcctcagaaataatgccacacatctgcaaccatctgatctccgacagacctgtcaaaaactagcagtggggaaggattccctatttaataaatgatgttgggaaaactggctagccatatgcagaaaactgaaactggaccccttccttataccttatacaaaaatataaaaaccctagaagaaaacctaggcaataccattcaggacataggcatggcaaagacttcatgactaaaacaccaaaagcaatggcaacaaaagccaaaattgacaaatggratctaattaaactaaagagcttctgcacagcaaaagaaactatcatcacagtgagcaggcaacctacagaatgggagaaaaattttgcaatctatccatctgacaaagggctaatatccagaatctacaaagaacttaaacaaatttacaagaaaaaaacaaacaaccccatcaaaaagtggccgaaggatatgaacagacacttctcgaaagaagacatctatgcagccaacaaacatatgaaaaaaagctcatcatcactggtcatcagagaaatgcaaatcaaaaccacaatgagataccatctcacaccagttagaatggcgatcattaaaaagtcaggaaacaacagatgctggagaggatgtggagaaataggaacactttcacactgttgttgggagtgtaaattagttcaaccattgtggaagacagtgtggtgattcctcaaggatctagaaccaggaataccatttgacccagcaattccattactgtggcgggctaggggagggatagcattaggggaaatacctaatgtagataactggttgatgggtgcagcaaaccatcatagcacatgtatacctatgtaccaaacctgcacgttctgcacatgtatcccagaacttaaagtataatttaaaaaaaataatagaaaagtggcttcatgtagctgttagcttagcttgctctcttgaccttctgccttccrctgtgtgagggctcagcaagaaggccctccccagacaccaaatgccggcaccttgatcttgaacttcccagccaccagaactgtgagaaataaactttataaattacccaatgttgggtgttgttttatagtagcacaaacgaactaagacattttctcactaaatgaagtcactttacccagctagaaggatggtcacaggatcattattgttgtttaaaaaatgtgtatatatgtgtgtgtgtgtgtctccatatatatatataatatatataatatcagcccctctctctctacatacacacacacacacatacacacacatcccacattagaaatactatggtttggccgggcgtggtggctcacgcctgtaatcccagcactttggaaggccgaggtgggtggatcacctgaggtcaggagttcgagaccagcctggccaacatggtgaaaccccatctccactaaaaatgcaaaattagccaggtgtggtggtgcatgcctgtaatcccagctactcgggaggctgaagcagtagaatcacttgaacccaggaggcggaggttgcagtgagccgagatcatgccattgcactccagcctgggcaacaagagcaaaactatctcaaaaaaaaaaaaagaaaagaaaaaaaatactatggttctaatacttgtgttcatttgtcaattagatgtatggcactattaatttcagtttaattcagtttagtacatgtttttcgagtacctactgtgtacaaggaactgtgtggggtaccttctgagcacttcacctgctctccagagatgcctactgagtgtttcattgcagaaaagaagtgctatggcatgttggaagaagggggactcatatctagctttggtctgttgaaccaaataaacagatctgtttgttcttccctactagatcttagtgctcacagaaaaagggctgtcattcactttgtatacccagtatctgggaggtgcttggcacatggtgggtaaccaacaaatatctgttaaatggatcacattgggtgagcacaaagatgtgatggaaatctgtgaggcgggcagaggaaagtgtagggctcttgactgtcagtgatggatgtgaggatacttctggtaaggagactattgtgtaggctcagacacccgcaggagggcaaccagaagttcagcatgggtgagcccagggattcccttgccagggttagcaaactagggtccacaggccaaccacatccattcatgtacctgtggtctctggcaactcttgtgccacgtcagcagagatgagtagatgcagcagagaggagttgcggtgtatagatagcctggtaagccgaaaagacttagtatttgtttctttatggaaagtgtttgctgaactctgccatagaggcacagaacaaaaatgagcgcagttaccttagggggccccattgcaaagtgacgatgcatacttggttctcttttgatcaggagacgactgacctgattggagatatgtatggtttaggaaagttgacatgagaatgattcagtggactggagcttttgggaaagggaccaagtatgagaaaaccaattaggagtatattacagccatctgttcaggcatcattgaagaaagagcatcattttgagtcttatctaagcgttggggttggcaagtattacctcctaggccagaaagccttgtccttctcccagtcccagttcatgtcactagattgggggtccacctcacagctccagaaacctcaggtcaaccccacccaatcggtcacatgctaacttcctctctggtgatctttgcacaaacatataactcacagcatggtgtctggttcttgctgacatcaactttgtaactgttttcagattattttttcttttctccacagtaactctcaggcttcttgaggtcagaaccatgcattcttgttttgctgccacctccccacctgcctgcccctcatgctgtgtcgagtccgcaygtgagaaataagatgagagtcactggcagcaaagtgagtgcygacatttaaatatggaagcaagtctggggccccagactccaagcgcctagtacctgtggccttgctcactgtttttcatatgctgtcctctggtcttgtttgtaaagtgacctgttgcacaacctgtcagtaccctgaaggtcagtgactgtgtccacacctctttgtgttctcrgtggttagcataatatttttaacataacggrctctttttaaatgtttggtgatgacacagtcactgagcaggatgtgctgtaagaagaaaacatactctccctcattctgtgaattagtcagaatatatcaggttaataacggtaagagcaagcttctgttggtctgatgcaccagcatctattggatcaagcaattaaacccatgtcagtcattttggtacaatagaactaaaattagacacagcataaatacaatcaagacgtgagcacgtttcccagcattagccttacaatgacaaaggcaaatgcagaagtgtgcgaacttccaggacaggtccggagatggctgttccagagaagagcyagggtggatggcaggaagcggcagctgggatggaacctccagtccatrtgtggcacctcttttacatcttcatcgtaagcsctaccaggagtttgaaatgcaaaagttttagaaatataaaccaggytttacttagtaatattcattaatgacctaaaccaagagagaatctcctacttaatgaagtgattaattagctctgggaattgaagtcgaaaacagaagrctaattgattaatagattactgtgttcatttttcttcctttcgtggaaaggagccagaatttggtccatgccaggtttgctgctttgggctagcaccatgctgcctggaatctgttctcgcctttcccacgtagcctgtctgcttcccatcctcatgcctttcttcctgccctctccacaggtggaaggccttccgtttaaaaccttgctctttcaggctcagcacgcatctcatccccaggatggatttgcgctcttctgacactaccgagctctcctttaagtcaccgttttacctaatcaataccatacggcttagcatttaatttttcttattgctttatrtgtggaataatggaaaagaattaaaagattgaaaaaccaaacacccacctcactccacattaggtgtgtcaaatctgagctgatgagaggccttccccaccacagctctgagcaccaaatgagatgatgtagggaagattccttataaactaaaaagtgccgcacaacatttagttattggcaccgtcttttttatatattaatcttaacttctctactatatttgtaattaaaatctccagccaaaagtcagcaaatttttcttttttttttttttgagacagtctcactctgtcatccgggctgaagtgcagtaggctcatctcactgcaacctctgcctcctcagctcaaacgattgttctgcctcagcctcccgagttgctgggactacaggcgtagtctgcagtctgcctagctaatttttttttttttttttttttttttttttagtacagatagggtttcaccatggtggccaggctggtcttgaactcctgacctcaagtgatccacctggctcaccctcccaaagtgctgggattacagatgtgagccaccacgccctgtccaaagtcagcaaattttttaacattccttaggaatgggctttgctctgtgccaattttaaaaagtcagacttcttcaggttacctaccatcactgtaggtagaaggatagggaagaccccacatgaaacagttagagaacttacatgataatggtaagcacctggtgtcagcccagtctctacgtccctcctcacagctccctcagcccctgggagtcctcacacagatggcctatgacagccctcagcctccaggggcttccccaacccacttagtgttacaaaaagaggcagaagctgatcagagaggaggttgggggaatttggccgtatgctcagaggcattggtagctaagtgactttttcccagacaggctggtctcctgtaagagagagagagaactgacagattatgcgagagaatgcggctccgccaccatcaaggtcagaagcctgcccctactctcattatgtgttgctagccaacacactccttcagtttgtttccagctgatcatctttctgtcttctgcattcccagttcgtaatctgcactctcttctctctccacgggccccagagcagatgggtcacttcttttggtttcaaatacaatttagtggccatcttccctcccatctttttcattaaaaaaaaaaaaaaaaagttctaaccactgcttttctaatcaccactgttctagccactaggactttctgtcctccacaaatctattgctgttaaaatatttgttttgattgttccaggtggtaaatgttaccttatgggctttgttccagctcgcattactttttgcaaggaggatactaagttctaaaacattgagtcataccatgactgagaatagtgaaagtgcaaattctttattaatacagaagttaaagatgaggtagtcatgtagaagacaacctgtgatgattaaataaactatgattctggttcagtgattctaattaatcaccagaagtgaataaaaatgttacttgtggccaggmgcggtggctcatgcctgtaatcccagcactttgggaggctgaagcgggtggatcacctgaggtcaggagttcgagaccagcctggccaacatggcgaaaccccatcactactgaaaatacaaaaaattaggcgggcgtggtggcagcgcctgtagctactcaggaggctgaggcaggagaatcacctgaacccaggaggcagaggttgcagtgagccgagatcgcgccattgcactccagctggagctacaagagcgaaactccatctcaaaaaaaaaagttacttgtaattattttttttgaagtcttcatgttctaagtcaagacttaaactgaccattttttttacaaatagttaatggttacttggtatgacatatttagaacttacccagtagtttttatcatcttgactggtcctcgctatgaaagatattttataatttcatgccaacttacataaatgtagcatttgattttcaggtaactaaatcactagctaatcaattctacttatcttcaagtgttatgaggtagatgtaaattccgtgagggcagggagtcatctgtaggcgaatcatctgttttattccctgcattatctttagcatctaaatcagtgttcagcatacactgtggtcactagataaatattgaacaaatgaatgagtaagctatagacataaactataagaaactcataaaaatcttttataaaaatctagaatcatataatgttaaacttcagatgtatctttttaaaccagaggtataagtagcaaacaaatgggaggaattaaaaaattctttgccttgaatctgaactatcacattcaaggcttagattttagtgatgaccatttctcataaatgcattaaagtcacttcattaaaacttgattctcagccgggtgcagtggcgcacacctataatcccagcactttgggaggccgaggcaggcagatcacctgaggtcgttcgagaccagcctggccaacatggtgaaaccctgtctctactaaaaatgcaaaaaaattagctggggtggtggcgtgcgcctgtaatcccagctacttggaaggatgaggcaggagaattgcttgaaccaggagacggaggttgcagtgagccgagatcatgccattgcactctagcctgggtggcacagcgagagactctgtcaaaaaaaaaaactttattctcaactgaaagtactaccaatgagtctaatccattttggtacacagatcagataaacagttcttaatcatcttcaattttctgatctacattcagcagtgtttatggagactcatgtaaagataggtgcagggcaattacaatgttagaaaaaatgtcacgctagaagttctttttaagtaagtcagtaaatacaaagttcaccagtgttgttttctataaacctgtctttggtataattactatttcttttaattattctactttttacctttagaatcttctattattgtttgacatgccaatttcaattccctgaattccagttgtaatactttgttttcaagtattataaaaatatcttaatgttctttctgtagcagatcactcttttggttcattgtttccagttgtggagttttaaagtgttatttttcaagttgtaatgagaactagaaggtatttaaaattggctttaaaaacctattttgggccgggtgcggtggcttacacctgtaatcccagcacttggggaggctgaggcgggcaaatcacttgaggccaggagttggagaccagcctggacaacgtggcaaaaccctgtctctaccaaaaatacaaaaattagccaggcatggtggcgcaggcctgtaatccccgccactagggtggctgaggcagaattgcttgaatctggaaggcggagagggcagtgagctgagattgtgccattgcactccagcctggacagcagagcaagactctgcctcaaaaaaaaaaaaaaaaaaaaaaaaaagaaagaaagaaagaaaagaaaaagaaatgaaacctattttgaatgattgggaatgcaaaggtggtagctacacacctccctttttaatagctgcagtcagcaggaatcaaataattacaccatttttttttatttttccttcactttttttgttctttttttttttcaagacagggtcttgctctatcacccaggctggagtgcagtggtgcaatcatggctcactgcaacctcagtctcctaggctcaagcaatcctcctggagtagctgggactacaggtgtgtgccatcatgcccagctaattttttttttttaactgattttttgtagagataggctctcgttatgatgccctggctggtcttgaactcttggcctcaaatgatcctccctcttcagcctcccacaatgctggggtcacaggtgtgagccaccatccccagccacagtttccttagacatatgaagagctgggtggcaatgtccagaatctcaattcagaatgcagatcagggggactctttgagtctggcaaccccaacccgcccggaaaaacaaacagccttgtaggacaacagccttttaggacttgaaccttctcaggcccgcctctcaaaacaatatgacttgaaaatgtttagtttttcttgtattgtctcacttgccaaacctccgaaagcaatttgagagtaatttcaaccacatcttttagcaggccttgtgaaaaataaatttaacaggttaattgtgtgccgttttgatttgtcttggcatctcaataagtaaaaggttaaaatcatggccacaaaaagtaaataaagcttgattattccagttgaaaattcatccatgggtactctagtgcctggctttcgtgttgacctcattgccatatgaccaccatcaatagctctttatatttaattaatttcctaaaaaaaccacactcacacatttgtaatgtttgtaatctttttattccatgataattgatgtagcctagcgtaattgtagtttttgtgtgtgtgtgaartakctgacattctgtgctttagtacgttttatttcatcacttaatgtgtcccccccacccgcccactggctgtgacagtgtttttgcgaatgaaacagttcagtgagacctgggaatttcctatggcatttatgtggtctcatgctcatctctatttgccagataccatccgtgtaagaaccatgctcaacagatacattttggagaaccagatgtctcattttstcattcaccaatgagtcttgaaaggctgaattcaagaagacaactttttaagatctttctctctcagtctacaaaagaaaaaacgggcttattactgtcaccgctgcctttaattatgtacagtcacaatacaattatctccctatttgggtgttatctcccctgccagatcaccaatgcctcaaattgggagagcacggcttctgtttattgttcatcctttgaaatgacttaaaaggaagctgagtacacagttgaccccctagccaaggggattgatagtggtctcgggctggggagaggactctgtgattcttcccaaaaggtcactccctatccagaatgataagtcctcagtttttagaatgtagttgttaggtaaagggattaatccagagraagagattttaaggctgcatcattgattttattgttttggataagaacgtggaattggcttttctgtaaattgastacattatataaggcacaggttaaagtgatccttccacgtgaattctttcatggttatttgattattttcagaatatcttgacatttgaaaggcatacagacaaaagccaatcatgtaaataattgcatttctaaaacagtcatcagtcttcttttacttcaccatttttaaccatttggattcaaagctggattttatctcaactaaatagaacagctaatatccaatttaatgtgcaactgtaaccagtcagacccagaaattttgaatagcatttgtaacttttaatcacaaaattaatggcattaaactctaacagaatagattccatttgttaattttttctaatcaaacttcagatatttatccatgcctcaggtgagaaatgtctcaccagacacccagttaaatgaaaagtaaatcatacctttttttttttttttgagacagagccttgctctgtcacccaggctggagtgcagtggcgcgatctcactggagcttgctcactgcaagctctgcctcccgggttcacgccattctcctgcctcagcctcccgagtagctggaactacaggcacacaccaccatgcccagctaatttttttgtatttttagtagagatggggtttcaccatgttagccaggatggtcttgatctcctgacctcgtgatccacccacctcggcctcccaaagtgctgggattacaggtgtgagccactgcactcggccagtaaatcatacctttttaaaatagcatttcacattaattatacttacttagttaacactgaggttatctaytattgcataagataccgttgattttagttgcatatcatatgcaggtaactgcttgcttgcttgcttttttttttttttttttgagatggagttttgcgcttgtcacccaggctggagtgcaatggtttgatctcggcttgctgcaacctccacctcctgggttcaagcgatcgcctgtctcagccttccgagtagctgagatgacagtgcatgccatcacacccggctaatttttgtatttttagtagagacagggtttcatcatattggtcaggctggtctcgaactcctgacctcaggtgatccacccatctcggcctcccaaagtgctgctgggattacaggtgcgagccaccgctcccagccacaagtaattgctttctttgttcttacctaaaagataagccaaagtaaaatagaatatatttactacttaacacctatgaaactagattgttctaatgtataaaggaaattaaccaatatgttttatatattatacaaatgtacaaatattttcccgagaatctggcaatgtttctaaaaagcagctcattctttgttgttgttttctgattataaaagctagtgagtcagtaccacttctgaaatggcagtcactacattaggatcctgcagcagtgattcagcaccagattagtgacactctgcagtgttactagttgtcacaaagggtagatcaaaaagtataaaattaattaaaaactatgtatgtgtacagttcttctaaaggtcagtttttcaaatcatatccccagccatgaatatttttatatccttttacctgatgatctcattccttaaaattataagtaattaattttttaaaagctatatgtgtatatgtgattatccaactgtttctaaagattaaatattaaaaacaaccaaaatcagcaaatgagcagtgacaaagtttataagatggaatattaataattggtggacttgattataagtagaaagaccaaaactatgcaagggtaactataggctatcaagtgacaaaaagaatgcaaaattatatgatactatgattacaactatgtatttaaggagttaaatgaaaatttattgtgttagagttagagtgtggagtttttttgttttgttttttttttttaagaaggagtctcgctctgttgcccaggctggagtgcagtggcgcaatctcggctcactgcaacctctgccccccaacaaggttcaagcgattcttctgcctcagcctcctgagtagctgggattacaggakcctgccactacacccagctaatttttgtatagcagcagagacgggtttcgccattttggccaggctggtctagaactcctgacctcaggccgtctacctgcctcggcctcccaaactgctaggattataggtgtgagccactgtacccagccagaatgtggattttttaaattttgttttcttcatgttgttacgaagttgtctaatacatttctaacatctttttgttatatcagcactttatggaggactagaaggcatcagtccatatccccaaaatatggtgtcttgttgtactgtggtgcctcttaacaaatgattgtattcatttgtggccttctaaaagagtgactgcttttctgagagtcttttacctactcccagaaagttatttactctgtgggacagttcattctgttgcatcttatctgagtacttaaagccccaaggaagaagatgatatttgccagtacataaactgacattttggcacnnnnnnnnnnnnnnnnnnnnnnnnnnnnnnnnnnnnnnnnnnnnnnnnnnnnnnnnnnnnnnnnnnnnnnnnnnnnnnnnnnnnnnnnnnnnnnnnnnnnnnnnnnnnttgacttgaaagagcttacagtctgcttgtaaacagaagacatgaaatgactgaagaatgttctcaaagctcaacatgaacaagtcacattacagacatttgaactgaactgaatgctgaaggaccttgaacaaatgagcatctgggtcagattagctaggcagatggcactgggtgcccaaatggagtgagcatgcatggaagaaaaagtgaaggcccaggcactcatttagaggggaggagtttggtaatataatgaggataaagaatgcttgtagatttctggttagtgagtagtagaataaaaattgtgactaagcaccatgggtggatggatggatggatggatggatggatggatggatggatggatggatggatggatgtggccaggaggctgaaggcagtgctctatccaggagagccaggtcagcgcatgcatagctagggcataagctaagaaaatggggaagacacagcaaattcctgatactttacataaaaggagtttgttgggttttattttaaaagtgttgaatgtgagataaaaaagaagaagggttgggatccctaatgtagatgaatagctttgtttcaggtccgcccttctgggcacagcgggtcacacctgtaatcccagcactttgggagaccaaggcaggaggattgcttgagcccaggagttcaataccagcctgggcaacatagtaagacctccatctctgtaaaaaattcaaaaatcaacctggcatagtggcatgcaactgcagtccccgctactcaggaggctgaggtgggaggaccacctaagcgcaggaggtctaggctgcagggagccatgattgtaccactgcattccagcctgggtgacagagcaagaccctgtctaaaaaaaaaaaaaaaaagagagagaaagaagaagggtaaccaaggaaagagctggaaggaattttaagcctttggaaactgttgttatggtggtgttagagacactctgtattaaggtcagaggaaggagtctgagcgcttgttggtatgttgtaaatagctgatatctgtaggatgtctatgcaaatgattaaggtaaaaaaatagggagcagttagtagcagagattaggttttttgatcatttctgctttggctgaattaatatacagaaggaaaaactagttgaaagtcaaaggggcacctaagttaatggtggagagtgagaaaagagacagcagagaaatttagggctacagtacagctcagagccactcactaccaaaagaagagaccagcggaggtggccctcgttgtcccctgaaagggatgttgcgccatagcaggaagggtggaagccatgtgggaggaataaaaatcaagggtttgcaggagaaaaatcctcaagctactttttttttttgagacagtctcactgtgttgccccggctggagtgcaatggcttgatctcggctcactgtaaactctgcctcccaggttcaagcgattctcctgcctcagcctccctagtagctgggattacaggcacccaccaccatgcccggctaattttatatttttagtagagatggggttttgccgtgttggtcaggctggtctcgaactcctgacctcaggtgatccacctgccttggcctcccaaagttgctgggattacaggcttgagccactatacccaacccctcaagctacttattgtagttgagaaagaagggtgcggatgacaggaaaaataagtagatgaatgcaaagtgagattaacatgagatatttggttggttggttggttggtttgcttgcttgtttgtttgacttcaggagaaacctggatcagattgggcatgaggggaggacgctgaagcgagatgaccaagtgtgagaggagggtcgtcagggactcggtaccaagcgtgggggcagagtcctccttgaagaatggccccttggcccaggcctctggggtttgatccctggtcaccctgtatgtggacactggcttggcagaagtcgaggacaagaatatttctgagagctggtgaaggaagactcgtgggccggcattatgggtgggcttcgggaaagcaggagatagaattgaggaagttcctggctagttccttctccttgctcagtctgtctccagcttcaaaggtcagcactgtggagagtgctaaagtctcaaggttaaattttaccccagagtctaattgaatttaacttttacattttgtttgtttgtttctaatgtctcaaaagcctgttttacccaaagctatttacagttgccgttgggttgggatccctaacgtagatgaatagctttgtttcaggtctgccctgcctggagcccctccttcccaccagttacctttatggttacatatggtttggcatagaataccagtaaaataccagtagacacagctgaggtgctcttttttgtttctgaaggattttcagtatagtgtcatatccgaacgtcaggacagtggaggaagcccacgaggcctccagctcatcagtggcagagccagcattcagggcccctgtgactctccagctgcattgcactgctgcccctgagctgtaaacccgcttcctagttaggaagaaagctgaattaggtgatctccagtccagccttccaagtaaggcttctgtgaatccatggctgtaagcatttgaatgaatgtcgtataaagaaggtgaaggtcagtggagaccagaactgggaggagaagcttcatggtggaggggacttgaagtgcactctgaaaggccagtgggcatgagaagggcaggatgcagggagagttcctgggctgagggaagtgtgagcaggaattagtgtcgaaggtcatggacagaaaggagctggcctgaaacccagtcagaggccatggtggccagtgggaaggtggggtctgatgatggagagccctgatagtcagagacaggacttggatagtgtcaggaatgtctgaacagcagggcaacatgaagaaagtggcattttaggccaggcacgatggctcatgcctgtaatcccagcactttgggaggccgaggcaggcaaatcacttgaggtcaggagttcgagaccagcctggccagcatgtgaaaccccatctttactaaaaatacaaagattagctgggtgtggtggcgtgcacctgtaatcccagctactttgaaggctgaggtaggagtaacgcttgaacccaggaggtggaggttgcagtgagccgagatcacgccactgtgctccagcctgggtgacagagcgagactccgtctcaaaaaaaaaaaaaaaaaaaagtggtgttttaggaaacttcgcctggcagtcgtacacaggagagacagctagggacaggcttgtacacccctggtatatggcccgagtggtaaactcaacctgaatgtgattgattcccaaggaaatttcttacaggatttctttggcaagtggtttataagcaacgatagaaagaccacagggtacccatgtgacctcactgaggaaaaaggcatgccaaatgaatcccatttattttcttcataacattctcagagagttctggcagggaaataacagacaaatccttacctttatacagtgctttcctgctaaaagtacattctaaatttcaactaggcacttgacaagtgtgtgaaattctgtgagcaagatggagaaacatagattggagagtggtgccgctggctggatgttagctaaggactatactcaaagagcatggattaaagagggcgaggtcccttgtagatgctgcaaaaatctatgtgagtgaattgaatgaagacataaaaggctttttagcacgtttgtgggtaacaccctttggaagaataaagaagatctcagtagaggtcagaagccaagctaaacatataacagttggtgagaataatgtagtyttagcaagtgtattttaataatcaattaatgtgaaaaacctgaaataatattaaaagactctgggaggagggaaaggctttgggggagatagttatgtaaggatgaatggttagtatcaggtggctgtcaaaagggttaatgcaatcttaggagagtaagaaaagcatagtatttagagcaagcttgtccagcctgcaggctgcatgcagcccaggacagctttgaatgtggctcaacacaaattcctaaacttccttaaaacatatgagatttttttgtgtgtgtgatttttttttaactaatcagctatcattagtgttagtgtattttatgtgtgatgcaagacaattcttactctgattagcacaagggagataatggccccattgtgttatgttacatttgggacatttttatgttcattgtattgtgggtgggctgttatacttttgatgtgaagggtagtagaaggatctggggatatgtttcagcatggagaagaaaggagaagaccccaaggttcatgaccactgtcttcaagtatgtaaaaggttgccatgttgaagacaccacagatgggtagacttatcctgcacttctccagtgggcatacttagggcattctaagctaggcagatgttagacttcatgagcagctcaccagtggagagcaaaacaggtttggtgtacagctgtcagggattctgtagaagagacgcttatattgggtgtcggattgttctccagggtttctagtgtgttaagtattatccagtggtgtgctggagccagttcataccagcttgcaggagctggttgttaaataatgaggatttttaagggctagtagttaaaatgttgtttgcttgaaatgggccatggaagcagtatttataccaaggaaattggcaatagatcaaccccaccccaccccacccctacccagtgtcagcatgccagcataccaccagtattatccataataaaaaggtgtcttttagaggccgggagtctctggaatgtggaagagcagacgggtgtgggaacatccacgtgcgtgttctttggagttttcagattctgtttccttgttaatggtgcgtagctccccttttgtgctcataccacttcctatctcctgccaagatctggggcctgtgagtttctctgtctctggatctgccaggaaaacgcagatatcttctgttgcttggaataattctttccttgttacgtatctagactggctagccctctgtgagaggtgcctcccacctcattctcagcactagcctcaaggactgtgaatatcagatgaattcaaccagtgaaataggatttggaaacacctgggctgttgagaacaagtgattgtaggagtaaggtccaacccacaaatataacaaagccccgcaggccatatggcaataacagcccaaccgatggggcctttgggttgacctcagatcagcctctgtccccatgctgcctgggcagagagcaaacaatgactttatttctgtcacttttatctcccttatttctttgtaaaaaggatttaaataaagtctgagtcatgctgtaaccaggaaaagcaaatgtcctgtggtatacatgataggcgaattcagctgtggtcatgcaaattgtatttgagtttggttgaggctctaattaaaaacaacaacaacaacaamaaaaaatkggttgtttttacttttcttagttgcctactgtgttctatttgaaaccctataggctttgccattttccccaagggtgcctacttcctactctttcctttagtggtttcccaagagacagacaataacacccttgaccagttgggctacaaccagatatgagcttctcaaactatgggaggccattccagtaaagtgtgtattgccagccagtgaactgtttgtttttgataaaaggttttcttggcaaaacaacccgcccaaaggtgatttttgaaccatggaacaattccgaatttcaaaattcaaattataaataagagagctgaagtataggtgttgcatttaacatgcagttatatattgggaagctataaataggtctgtttttgaagagactaaacccaagtaaagattagctatatgcctgtatgatggtggcatatgtagagggatcagggagaactgaataaaggaaatcaagaaataaccctaattttctaatagggtgtcaggaagaaaagagagagaatgcagctctagccagccagaagttcgtgggctggagacacaccctttaaaggaagggtctgtcttcctttaaagggcataggcataggccaaggcataggccaaggacagggaataaagagaaaactgaatgcctactgcagagactataggatagcaacagcagaggtgacagtgacgaccatattaaccagagtccagacctgggacactaatagcccaagcaggaatctctctctatccgtgcacaagctgcagctgcagccgggggtctgtgctgggtcttctggctggagatctgaccccgcggctcagggccagggaacctaccaaaaagatggactcaaaaaaggctgctcctacttgaagggtgcagaaagaatcggatgttattaaattatgcctgttgaatcttcagctgcatgaaatggcatatctgtgaatgcttttagagtagaaaatttggtttgaatggcctaattgtgatgcgtggcagggaaagggttaagacgagagacagtcccaggaaagaagtagggcagtgagggaaatgtggacacaagcggcatagaaaagcaagtgagttcattaaggtagtgctcctcagtgaaaaaatccctcccggcccccttgcagcagagacagggccctattgtttttggtcagccaatgccaataccacatgccgtcggcctcagcgagaaatatgtccatccgtcagtgtttagccttccccaactagggttcccagggagaaataagccctcctgctttaagacatccattgtagtgaatcgactcctctcctggccactgagagtggtatataggaaggttacagtcacacagatcattttctgtgctctgtagttcagatagaaaaccctggttgagaaagactagtagtgcagtgacccagaactggccttccaatataaaattagcaggcacttcagcaacctggggttttgcctgaaggagatggcagaaagcagttgtaataaaagggcactcagaattaggatgtacaaaacaagatcttatccccaccttcacagcacctcccaactctgccgtacctaccagaactctgactgtctcctcttcctacctaggttgtatattgtccaagactcttctctgtccaaatttctggtatttggtttataaaataggttaaactagtgtgggcattaaattagtttctatggagaaaattttggtttcgctttcctacttctcatgaagtcactttccctgaaaataattcagtggaattgaaaactcttggctcatcttcatttcataacatggccatttgtgtagcatacatacattgaatgatttgagtgagtgaatgagttaattaaacatacaatgaagtttgtcaaatatgtcaacactctgtttgccttttccccgttcattttttttttttttgagaccaagtttcactgttgtcacctaggctggagtgcaatggcacgatctctgctcactgcaacctccgcctcctgggttcaagtgattctcctgcctcagcctcctgagtagctgggattacaggcacacaccactccactcagctaatttttctatttttagtagagacggggtttcaccatgttgctcaggctggtctagaactcctgacctcaggtgatcccctattgattcttaaggtgatcaagtaggaatggctgctaccatcttatggctgagggaacttaggctcataacatttaagtgactcaaccaggaacacaaagtagatagtgacaaggtcatgtggagaacccaggtctcctgatccctgtgcagacctcttaaagggcatctggaaggatggtggccagtcacatggtgtgacacaaaataagtcaatcagttgtgttttcgtgagcacttattgtgtaacactgtgttcagtgatagctgtccaagaaaggaaggtgccatgtttctgtttttgtttttgttttaatcaagaagcttatagcttaattggagagattaaactgctacacctagaaacaagtgcctggcatgactcttacagtttaatggaaggtgtgtgaagggaaagaagagccttctggaaggcatcaaaaagttcctcaggaagaactgaaactgaacattgtgcagagatagcactgggtaaatccagaggccaatgagagtaaaggtctacccaggcaggggatgatggccaagaatcatttgggtggaggcagaatgtgccagtcctgtctctgtctagagatgtgcagctgaaggtgaagtctgataagctcagcgtagataaggcctggggatttgggaccaatacagtgaaaaatcgaatggacgaggtctgaaggaacatttgggtcaacacaagccaccctaacagcataatcactacctaggatggtagatgaatgctgtctaacagacgactctgactgacgtagtacctcccacggagggtcagcgtgcaaggtggacacagtgcagtccaaggctcttgactacagcagaagcctgggtgagctgtcgggggactgctaatagaagtggaggtagaactggcaagccaggcatgggggctcatgcctgtaatcccagcattttgggaggccaaggctggaggatcatttgaggtcaggagttcgagaccagcctggccaatgtggtgaaaccccgtctctattaaaaatacaaaagttagccaggcgtgatggtgcaagcctgtaaccccagctactcgagaggctgaggcaggagaatcacttgaatccgggaggtggaggttgcagtgagccgagattgtgccattgcactccagcctgggtgacagagcaagactccatctcaggaaaaaaaaaaaatggaggtagaactgaactctgaggatgtttaggatttgaataagagaaggagagagcatcgcagatgaagaaagcaacatgcacagaagtgtcgagtaaggagagtattgcggtgtgcacaaatgacagggaagggtcagacctaaaagaagaggatgttatgaactgaacacagaaaaacatgatggggtaagggagggcagctgtggggccttgggagcaattagaatttggattccgtgtgataggcaagttggttcttgaggaaagctgtgggatgatgaaagtgagtcaggcagcaggctgtaaattggattggacggagggaaagattagaggcagagaaactagccaagagactgtttcagttatcgggcccaggccaagggagtagtggcattgagaataaagaagaaaaagtgactgtgaggtaaatcccaaaaagaaggcagaaactcaagaaataaaggtaaacgtgataagcaaagatgactcttgagcatcctaattttggagatgaaaaaatcatggttctgctggaataagtggggtgagctggagaggagccccgttttgtgggggtggagggacatgatgacttcactttgaggcatccaattagagatacttaagtcaatgagaatatggtactagaacccagggagagattggggctgggaatgcatctgcctggtggtagatgcctggcagtgaatgagttcaccatggaggtggaccagggtacagagtgagggagtgggagaaggaagaggagagagaagaatgatgggagaaatgagcagagaccagcaaaacacattagcaaccctaaggggacttggaaagcgagttgaggtcaacagggtcagttatcaaagagaggcaaggctgaggatgagaaccaagggaaggcccctgagtcccaaaagcagcttggtggtgatgtgtgagtgcagcctttccagcttccctggcacragtctcctcatccatggttaaatgatcatccaattatcatataggcctcctgacttgcctccccaccctgagccttcttgaccctaattcattctccagttgcccattacaagagtgtgcccttcctttaaaatcataaccacaatcaatcattatgtttccaaaatacaaatgtaatcatacatcttcacctggacttgtgggttgcttaggaaatgaaagaggggtgtgtagacccctccacttgtgcgtccatcagtgcagggcagggagcagggacaagcattgccaccttaaaggaagaaggagagaaagggccaaggagaaaagaaagaggaagtgagcatgttcagaagcaagagccaagaagaccctgccacgtcggataagcggaaagactccagaggaagacagagttgctgtgcaggttcccacacgccttctgtctacagccacctgcagaactgcaggcagcagcctccttgcccggcgggagcctcttgcacagggcctccccattcactctctactggctccactgcaacttacgtctttgtcccaaagggaagactgacatttgtttgtttatcataactagcttcgcttgctctgaatttatttgtgtgcctgctcaacccttttctgaactattttctggtttgtatttgtcatgactgtggtcccttaactgactgtgatccttgtcatcaactctgcaccttatgggcactgagaattcagtaactggctcatcaatactcagctccaggctggggaccctaattcctagggacactttcttatccaagcgaattccccccacagtcagagcagcccttcatgtgaattagctattttctattgctctttgtcgcctgtgaatatgtaattgcatgggatcgggaggaaggcagtgatagaatcctagattgtgtgttggcaagggctttagaaatcaccctattcaacctcccactcgcaggaatcccttcaacagcttttatttaacttattaatagcttttctcttgatttaaactgttcccaaaaataaatattgggtaggtgatccaaggagtagtttgagagttgatattaccaggaatatcgtaatgaacaggcctcttcttaagcactcagaatttggctggactcgtgagcgtccatgttgcactttgtccttcccatctgagttttgttatcttgctactgactgcaaccccgccatggagacagcactcagagttttcacaggggcttggtgaagcctcaagcccataacagaccaccataaggactccatgctccctaaatgcattaaacagttccaaagatgtgttttttgctttggggttttttgggggttttttgtttgtttgtttttgagatagggccttgctctgtcgtccagggtggagtgcagtggcgtgatcatgactcactttggcttgaacctctcagactcaagcagtactcctgcctcaccctccagagtagctgcgactataggtgtgcaccaccacacctggctaatgttttgatttttttttgtagacaaagtctcgctgtgttgcccaggctggtctcaaattcctgggcccaagcgatccttttgcctcagcttcccaaaatgctgggattacaggcatgagccactgtgcctaacctcaaatatgtgtttttaatgatgtttaagagcctcacttgtatagcagcagcttttatgtgtatctcatgctgttaaacctataggaacaggggcctggcagcccctgtgtcattgaggctctgttttgctgctttatcattcaataagctgggctgcacatacacaaacctgtctctgtagtaaagaaacagttttggctgggcacagtggctcacgcctataatcctagcactttgggaggccgaggcaggcagatcacttgaggtcaggagtttgagaccagcctggcaaagatggtgaaacctcgtctctactaaaaatacaaaaattagccgggcgtggtggcaggcacctttaaccccagctactcaggaggctgaggcaggagaatcgcttgaacctgggaggtggaggttgcagtgagccgagatcatgccactgcactccagcctgggcgacagagcgagactccatctcaaaaaaaaaacaacaacagtctcgaggaggccagaggagcatgttttgttccccccacctttggaaagaaaaaaacattgtacaagtggaaaatcttcactaatgcaacataaaacttggcgattttcatcacaccaggtcaggtaatcccaggctgtgcttcttgaggcagtggaagctgatttyctttgctcacttatcacctgtgcctctcaatggcatgtctstaacaggaggcagaggcctccttcccgaggtccatgggtcagagttttaccatacgagatggcggtgtgggaggtgtgatttgtcccataagatctctaaatcccaccacccattctgtaacagttgatagtcctcrgcactgcattttccagttactcatgtttacagacaaatgtctctttgtctgtagttgctctctgaagaaatcaaagagcagctgttgtcctgcctcagcaccatggcataggaggtccagagttagcatcgaggatgacagtgacgctgtttctgctctggtatcacttgccccttgctcctactgccctagcccttgtgtcacttccttgttctcctgaacagtttttttttttttttttttttgagacagagtcttgctctgtcacccaggctggagtgcagtggcgtgatctcggctcactgcaacctcagcctcccaggtgcaagccattcttgtgcctcagcctcctgagtagctgggattacaggcccccaccaccacacccatctaatttttgtatttttagtagaggtggggttttaccatgttggccaggtctcaaactcctgacctcaaatgatccacccaccccggcctcccaaagtgctgggattacaggcgtgagccaccgtgccggccctgaacagtcttctttgtgttttcctgcctctgtaccttcgttaatgatgttttcttacctgcagtgccctctcccttctctcaactctgaagtcggtggtacctaacgattctatttaaattctgcctccttgaattctctcctgttcttcccagcctggagtggagtccgctgaggtctactagagttcaagttccatgagaacagagactgtctttttttgttcactctctaattagtgcccagcacataatggatgctcaatacatgtttattgaatgagagagattgctccctctaaacgtagctggcatctgacattcatgatttctgtctgtattcctttttccatacgtgtacacgagatgataagcttcttgagaacagcaaccatgacttggtatcaccctctagcagagtcttgaacatgctgggagctcaataaatatcagtgattgaacttactacataatcactcaataatccaatcatgtccccgagctcaggggaagggggaggcagacagaatgccttcctcctgctgtcttatacaaagccactcgtgagcagcgtcttatgcaaacacaaggccccattctcccccagcccagcacttgcccacctaggaaggatattctcaagaacatgaggctgttgacatcacattccttttccaaaaatgtgcaaaggactacagaattgttcaagaagcagtgatccagtgcttggctagttaattcctgagtaagccactctgaaaactgattataatcctgtttcaaatggagaattgggagaaggccaataaagggtatattattgtatcttgtaggagggaagaatccggcagatattcactgagttatggcgccagagccttcctctctaatgttattgtaaataattgttagagtagaaagccagatcagcaaagtgagactccagcattgcagttcctctccacggaggtcttatataacgaagacctccataaacaaacattgcagaaacataacatcggatctctcctmttaaagttcacactgtgtaatgtaaagtggaataatcattttacattccttgtaagttctaagaagtcccttctggggcagctgtttgctaaaccttttttgtttgtttgtttgtttaataaaagaaaacaaattgtgtacctctccacagtgcccccgctatagagctaaaagcagtgatttcatgtaagtgtttcatttgtccccctccagctcgcctctctcctaggagtcacgaactcaagtgcctccagggccaggyaggtggtcagtgagctggtaatgactaaggtctgcatctggtgacacacacgtgcagagggcagccttatccagccccaggtcattgtgaccacgaactgacaagtggcccagagttgccagagcttttgattttcagcaggaaatccaaacttttaggaatatcacctgagttctaaatgttaatagctagttgaaaaaatttaatatctatgcaggccaaagagtgtctgtctctgtgccgggttcatcctgtggaatagcagcttgcaaacttcatgccatccgttcagtcttgcctgcatttgggtgcttggaagtcctcctcaggctgtgttttccttgtgcctcctacctttttagaaagtgcttcattggttcccatcagggcarggcaggggctggatggaggacctagtgatgtgttgggtatcagggggtgctgacctaaggcttgttggaaacacaaatccagagcttctctgcgtgctccctcccctcttagagacgcccaatcagtatctgtcactgcataacgaagtacctcaaaattccgtggctgacacaataaacattatctcaccgttgctgtgctccaggaatttgggagcaacatgacaggacgattcccactccagttctgtcatgaggtggcggtgagctcttagcccaggctgcagtcacccaagggcgtgactggggctggagggtgttcttcccaggtgggtcacccttgtggctggcaagccagagctggctgttggccagaggcctgggttccatccacgtggatctctccacagggccattgagggtcctcttccagagtaagtgattcaaggcagagcaaaagcagaagccacatgccttttacagcctagtctcagaagccacacattgtcatttctgcgctgtcttattggttacacaggtttgccctgctcagtgtgagaggagaccacaccagggtgttgacttccaggagaactgggtcctcaggggccatcttaagggctggctgtcacagctgtgatcacaaccctcagtcggtcccttatgaacaaatggtccaaccctgagaatagtttaaaaaaaaaaaaaacccgaagggaataaaatatatgtcatagtgatttgcacctaatattcagcccacttactattgtgttccccagatcagcctcagaaattaaatatcctttttttttttttttttttgagatggagtcttgctctgtcgcccaggctggagtgcagtggcacaatcttggctcactgcaacctctgcctcctgggttcaagcgattctcttgcctcagcttcctaagtagctgagattacaggttcatgctaccacacccagctaatttttgtatttttagtagagatggagtttcaccatgttggccaggctggtcttgatctcctgacctcaggtgatctgcctgccttggcatcccaaagtgctaggattacaggcgtgagccaccatgcctggcctaaatatcctatttttatatcccatcttagaactgtcttccctgaatgtatctaaagtcactttttaaaaatattttttaaaatcctacccataccacctcttcaagcgatagactgaggtgtaccaaacagaagaacccttgcttttcaagggaaccctttcgcttgctgcttacccctgtctgcttccaggggtattcctaggtctctcagttgctcgagcaactaaacctaaccaacttctctactaaacctaacgttttgtaaagatttgaaaggaaaatcactctgaacaaagagtagtccctgctttggtataccagtagcacctgtgaagacaggtggccccagaagttttctgggaccctctgaattggtaggagaggggcaccagttaatcagaggcacagacagggaggagcagggttgctcctgttcctgcagcagtatccatttctgggacccactttccaaaccacccccccgaattctaacagcaggagacacacacacacacacataccctcaggctctacatcacctctgcctccttcaagaccacccttaatattcattttaaccagattttgcctgaataaaaacgtgaaggggaagaaaaggtgccccagtgtgttttcccctaggaaaatccctactggtaactagtcttatttgctcaataaacaaaatcttaggctgggaactgaaggtcagcacaagcagcatctgcgggtgtgcaccggggctctggggccctgtaacatttgcgcgtgtacctgggggaaggggtgctgcatcggcccgccccccgcagccacccgccgcagcagtggtcaccgagtcrgggtgtggggaggtggaaatgaaatgcataattcataggccgctgtggtgtccagtctgtgggaggggtggtaattacagaactgagaaatgaggctgcagcgggcaagtcacctctaggttagaggctgctatgatagatggcctgcattgttctctttctgacctttttctgaacttccccttagaagaacagaggaaatatggtgctgccttttcccatattgtttttgaataataccttcagacgccagcttttagagtttctgttcttccgtttggggttttgcttccccctccacccgcccaatgccttgcttctttccatagaaaaatcgaatcactaatgactttatcctagtattaatggtaaatacagactacacaaatatttgtccacactgaacacaatacatacggggaaaggaaaaaaaaaacccgcagcaccctctccctccttctgctccgccctccactgccaagcaagacaatcccaagagccgtcctccgtcctccgtaatgatgcagacggggctgatgagaagggtggggggcgttgctcggtaggaagtgatggaacctaagctctggcttgcagaatagaatcgttttaaccggacgtgaaggtgcaagcmggaatgatgctcactcccatgtaagctattgatgctatcccggggggataaagtaacaaggctggggactgtgtgccgtattcccttcatcagcctttccactgtgtaacccgaaagccgcaacgtcgtttccctccacgcttctctctgccgctagtgatttcctggtctgaactgtgactccctagtgatggcctgtaactttgggttctgtgatcatctgaagtctatcaacctctatatagtcagggaaacccagaagagggaagagggaagatttctgtttgattttcacacaagcaagacttactaaagagttaggcagaattgttcacttagccttcaattcaaaattgaatctcaggttgaaactttggggtatgtggggttgttttgttttttgaaaaatgtaccccttttgaggccaaatgaaaaggaactagacagttctgtgtcagagcctttcagactgggggtggaatttggttagctccatttagcgggttaatgttgattgaactcctgctgtgtgcatcaccaccctgagctgtgtggcagctgagcacttccctgggaagcaaatataggttctgtctcctcaaggaacttttgatctcttgggggaatccaggacaagcctaaatacaaccatacaaagacctacttacacagctgacactacagagacaggcctgccaggcaggccctcgctgatttccagtgatgccacaaaacttttcttccttggcaaaaaagaaactaagctgttcataccaatgatcactgtcattctttcaaacatctcacaggtttttttatgggtttaattgcttatgggttttttttaattgaattttcaaaatctccctagctgcctcctccctatctccacttattctctcttcttcttcaggtaggtaaatagtatctcctttatcacctgcttttcacccactattcctcagcatatatatagatatctagatagatagatatagatagatgatagatagwtacaaactccctatgtcaagcttctcctattaaaaagtggagctttataggtttctattcacatttcaccattgaaatccttattatcagagaagaactaaaagagccacttatttccttaaaagtaaataaacagtaagaaatcccagttttcacttcttcttcacacaatcagctactcagttcagcaaacatctgtgtattgggtatttactgttcttagcacagtgcttggcggtaggaaagaagataatgaaaccacagcttcttccagctcatgagtgtgaacaatgacacccaatgtctgcagacaccgaccctctyaccccagtagacaaggctgtacgctgggtgctgtgaggtgtacagagatcagtcatgcacaggccatggcctcgggatgcttccagtctaggagctgattatagatgattcttatttaaaaaaaaaaaaaaaaactatcagtgcaaggaygagtgaaagagctgaattggcagtagagacatagttagcgttgtaggaatagagcacaggagggagcctcagtcagcagggagtgctagagcaggtaaggtttgagtagaaagcttcaaaggctttccatgagagccaggccagacatgctttccacagggccactgacagaggtgcggaggggaagcctgggtgtgctcagggagagtctgggaccaccaagagtctcaggtgctgcctcaccgcccctcactctttcttctctgacttccctcaagagtccctccctcccttcctcctgccttcctttcttcccttctccacccaaagccccagctgatgtgtgacagctccctgattccataagctggttagctcagttggctggagtagtgtttggggctcacgagaacaaaatgagcattctcatctcttttgctgaatgttgctcygttccaaaggcactgtaggagagtccctgttcttggactacaaagaggccccattgttaggataagaaaactggttawtgagaagatggagcagtggtatcctcatctgaaaactttcttttctttctttccttttttttttttttttttttaagacaaggtcttactctgtcacccaggctggagtgcagtggcgtgatcacagctcactgcagcctcgacttcccaggcttatgccatcctcttacctcagcctcctgagtagctgggactacaggtgtgtacaaccactcctggctaattttttaaaaaattttttgtagggacggagtcttactatgttgcccaggctactcttgaactcctggcctcaagtgatcctcccgccttggcttcccaaagtgctggcagtgcatgggtgagccaccgcaccagccttaagggaaccgtttgttcccttacccagtgggtcgcgtccctctgtctccatggaagttgaaggttcaggtggctttccgagcctgtgtctgttgcacttcagcgccccctagtgggaggtgtaaagagccagcttagtatttcctctgtgacccaaacacaagaaggcaaactttggtttggtttggtttggtttgttctttttcagctcctttaagaaaagttgagtgttggaaggtttcccctgagtaagctgcccttggctggagacctggagtttatgcccattttgtttggcaagatcttcttgttcctaactcctgctggaataaccaaccagtcaccgtgagagctcgctcttgtccggaccacagcaggtcctaaccaggagtgctgtgagcagacgggccatggccacatttactctgtggatgctccctgctctaaaattgggtaaaaaacataccctcagtgagtcctgttttgctggtttgatggcgtgcacgtctccagagagcaaggccagcctcatccacctggctcccctcaccgcactcacacctgcctgcttagagtcaggccgcatcctgtacttacaggatcagagcctactccatcggccaggagtagtggctttatttggaaagttgcttaggtagggtattagtgggtttcggccctgctttctcagtagttttccacctaacacacagtgcagtgggggagacctcctcagacgatacctgttttattggaatatcccttaggctgcaatggaaattcactctctaacttgtgtttgacatttttactgagtgggttccttttcatagctcaagtttctggcttctgttctcttaattggtatgtctccggctggtgacactgaatgtatctccctttcaaagaaggagcaagtttctgtcttttatcccagactgtcagccataaagactgactgtgacttagctccacaagccacatgatcagatggtgctgtaaggaaagaaaataccccaaagatgagccttgtctatggcacagtcactcatctgagagttggggattcggggcttctccagtggaggcactgggaaccttggaaaggaaagcatcgtgtttcttctgcctgttgttggttcattcattcatccagcaaacacttattgaggcctcaccatgaaccagtcgaagctaaatgttgaagcaatgagaagttttgcatttaaatcagtaaagttgcacataagtgatgttactttcttagtatgcatccatctagagtagagggtgaaccttgaattaatgtgttagtgtggaagagaccagccttttccccagcctcacatctcatgatcactataagtgggtaacatcaccaggctgaataaagtgaagacrccacatctgcagttgatccacaggaattgaaattccaaatcccttgccagtgcagagaaaagaagagtggtcccagaaagctgaaaagtgacagcaggtgacagtgggacttgggttaggccttcccagaatcagcaggcttcccaacacagctctaaatgcccagtttcaaccctcggcttcagtcaacagactaacaatgaatcggaagaaaaacagtcaacaaaaggatccatgatgaggaccatcataaaagaatggctgaggcctggctcctttctcagccactgtgttgggattcccagcctctggcctttgcgctcacctgggcaggagcctcatctgagcacagtggcagagcacagcgaggcatgggggctgccacaccgatgtgcacccatacccaggcttgagtgtgcaggctgcatgtcacctcccacacatggtgacttcagagcccctttgaggaggagggacagcggatgggaggaaataccacagggcttttgtgatgttgacagtgctctgtttcttcacctggctggtagtgacactggtctttgttttccaataagttgttaaggtatacgtttttgttgtatacttctttgtatatatattctctttcataattaaaaaaaaagataaaaacatttaaaaagagcctggagcagtatacatatgaaaagattacatagataggcacctgcagagacacatggttccatttctctggctgataggtgcttctgcaaacatttgttgagcacattctttgacaaaagtcaccaagcataaagcgtggcctggtgacactgtagtctggtagagtgctgggaggtcagaacaggctttctccagcaacgcagagcttcatggtatagcaccagagaccagattgggggatattgggccacccaggccagggatgggtaaagcaggcacagcacgtgtcaggagtataaggatctcaggaattacagggcagcgtgagtatctttgaaatacttatcatggagtccaaactggttcttctaggaaccttcctcattgacattacaattcatagttttctttttttcttctttccttcccttcttgcttttcttatttcaccaagtcaagtcaatatcgtttaggtggatccatgtccctggctgtactttcttcactttattctacatgcacaagcacataaccacaaatttagaggccagtatgctctggacatctgagaactggtttccagtttgcaccaacatcaccagaagcctttggagattatattcatttcagttgcagatgcaaccttctcctctggcatgtaaacaagtgagttagattttggtgctacgcttagcagagttggagcaggactaagaacgaaggatcagtgtgaaaatgtgtgtgtgtgtgtgtgtgtgtgtgtgtatttagtacatattcagagccaagatgttcwctgccaatatgaatagaaaaaaccgccaatctgattctaacattatacagggaatggccagttgaatcaaggaagcctgcatcctttaagagactgtccaagtgtgccatgagaatgatgtcaacatctagacccaactgcaattatatcaacctccatatggatatgatggttcattctgaagtcttcagcacttgtattggtgatagctgaagatactcagttatgacagaatcatcagtgagggtctgaaatgatcctccttagcacacagttttatggacatcagtagcggccccttaggtagaaaatctctgcaacagtggttctacgtgtattacatcaagctgcaaccacccagaagtttgggtgtcgtgtctgtccccccagctctccttttggagttggaaccctgttsccttgcagcagctctccaccttaatttcttcagcttataaccaggcaaaagtaccctgctgcagagtgcacagagatcttggggtccacggtgtttggcttggccattccaaggatggctccgtggaagccagcgcaatgggtgggccccttgtcaacctcccccatgttttgctcctagagcttcatctctgggtccctttttccttttgcttgtctgcctatcaccctaatcaaagacaaaactatttctctttgatctcctgtttgcctaggaagctgtgtgtctttttaagaatccaatcacaggttgacctgggattagctcacctcaatggccatctacatctccacttggaccttctggatccccctaggcatggtgtggattcatcctgtggggaggctgcccctgttttcccagcaggcttgcctgtggtcacagggcgtgttgtctctccatgcagctgccccgaggtgctttccagcccttgcctttctggctgtcttctgtgcagctctctcttacctctggctccaattcctctgaaatagcctcctcctcctccctgctcttcagatttctgccactgtttcttgggtcctgtgctgcttcactgtaatccctcgcctcccactcccggtcaccagctcaaacagcggctcagagctcaagacagcaatgcaagtctccttatttttgcagtggaaacataagatttaacaacccatctgaaatacagttttacattttgattgcttctgccccagccatactgaggttactttcaatctacatatatttgtgggaacggactttttctctgcagttcgagtacaccttataataccagtgattataaaataccatggactaatagagtgtcttgcttccaaggagtttaaactgttttataattctgccaaccrtaatttatcttcataagctgccgtagagacaagagaaaaagtgagattaataatcacattttatagatggtgaaataaaaactcagagaaattgagtaacatttttccagaaatgcacagctccgcctgtgcgctccgattagcgctgcagatttattacccaagttcggagtggcagtgaaccctgcccttgttttrtcagtgaactrtgtaaatgagcaagacattgactctggtctcagacttgaccaaagtgtttggggtgagcaagggactataccctgaaccctgcgtcccagcccttgttgccgccgatgccataagcagacacagtaatacaggttgactctgcccaccggggtcctcagacccacgggaccaccctcccaaacctgttccccgggctgtgctccctgggcatcactctgacctctagcctggcacactgttaggactccaagcagcccaagcgcatggctgtcttttcagtcttcattgcctagtgtactgcatgtacccagcattcatgtgagatgaaataaaaggaacactaggttacggtagtatttctccacacaaggaagaagcaagaggattgtggatagggagttttattcctttttttttttttttttgagactgagtcttgcttgctctgtcacccaggctggagtgtagtggcgcaatctcagctcactgcaacctccaccttccaggttcaagtgattctcctgcctcagcctcccaagtagctgggattacaggtgcgtgccaccatgtccggctaatttttgtatttttagtagagacggggttttgccatgttgaccaggctggtctcgaactcctgacctcaggtgatccacctacctcggcctcccaaagtactgggattacaggcgtgagccactgcacccggccagggagtttttatttctaaagctaggtggtaggtacttcactgttggttatattaatcttttcagctttttgtgtaaataaatgaaacagttgtttagtgtatatgctttaatgtatttcaacagagtgttccatatcagaaagaaagtggctttaaaaaatgaggaagctgggtgcagtggctcatacccataatcccaacactttgggaggctgaagcggaaggattgcttgagctcaagagctcaagaagagcctgggcaacatggtgaaaccctgtttctatgtgcctgtggtcccagctactcaggaggctgaggagggagggttgcttgagcccaggaggtggaaggtgcggtcaaccaagattgtgccactgcactccagcctggacaacagagcgagaccctgtctcaaaaagaaaaaaaaaataaggaagagggatgatctgtttatttcattgctttcacatggacttagacgtgttatagataagtggtttagtattgttcagctgactactctatgccaggcctctgcaaggtgcccccctatgatgctctgtttaacctagtcttcatacctgtacccagaagtaggtacacaaccagtacctgacagggctgggattcaacccggtgaacactgggatcccaagtgcgggccacgccctcttgacttctgcagcctctacacctccactggaggccattcccctgcagggtcatatgatctggacatgatctgggaatgcttctcagtgtgtgcagtcaagagagcgagtggagctaaatcatcaaagcttccatattgatggtgtccaaaatgacagttgtttttcctctttctttagaaagatagaattttcagtgtcttcctatgagaatgttggaaagaaattatccccctctttcttaggtgcagattttgtctgacacttcatgtgtgtttaaagtatttttgatgtcccaaaatagtaatgaggcgattctttaagatggttccatggggtggagctgtagcagtgaaggtgaggaagagcaaatgagagatcagttatgacagaacctggaaatgctcactcacagtattcaggaaccagcagccctacctgcctgaaaccgaaccgagaacaggaacagcccctgtggaagcaaccgacatgtgatgatcaacccaaaaaaccatgtaaactctgaaacagaaaggccaagctgtctgcctctcacataggaggtactgacaaggtggcattgccagctccagggaaaactggcaactgctgagggtgtgcacttgacatagactcattccttctacaaatgtgtatggagcacctacatgcccaggctgcgtgctaggcgctggagatacagcagtgacatgggggttgggggacttgcgctgctctgtgtgtggtagccacccctgcctggccacttactaaggctcagctcagactcctcctgggaagcccatcctgctttctctctcctcctccaatttcccccatctttgtgtactatgtacacacttcacacattgtatgtcagatgtcgctatgctgctaccttggctagacggtgaactcctggaagagctgcagggtctggtttactttttgatctttagcacccagcacagtacctggcacagaggaaacacttagtaaatggtggttgaatattctaataagtgagtgaggacagcttgaaacaaattctggctcagaatgactgtcagaatgagcttccctgaagattaagcatgctttagcaaccatccaacatgcttcaggtgggctggatgaaaagaaacattttagacttgactttgaacttctaggacctcagagccttatagactagcagagcagggggacaaggcctctgcaagatcagatcccagcaaaatggtctgaagtccccaaagattcctgggggccaaatggggaactacctcccttacctgagggtttatgggctgggtgttgagcagctgtttacgaagcagcttctgtgtgccaggctgaggatcaaggacaagtgagatgcagaccctgccctccaggaggtatagtagaggcagatatgcaaacgtatttgtgtgtcaaaaatgacaattattggctgggcgtggtggctcacgcctgtaatccagcactttgggaggccgaggcgggcggatcacgaggtcaggagatcgagaccatcctagctaacatggtgaaaccgcgtctttactaaaaatacgaaaaattagccgggcatggtggtgggcgcctgtagtcccaactactcaggaggctgaggcaggagaatggcgtgaacccgggaggtggagctggcagtgagccaagatcgcgccactgcactccagcctgggcaacagagtgagactctgtctcaaaaaaaaaaaaaaaaaaagacaattatttactctctttctccagaacaagaatgtttagtggcttgctttgggaatgttggaaaggaatgagtcctctttcttaggtgcagattttgtctgacacttcatatatatgtttaaagtatttctgatgtcccaaaatagcgatgaggaaattctttaagatggttctgtggggccagtgggtgctcagttagtatttattggaccaatctggtctgagtatgtcattgatctttgtatgcttgtcacctggtagagccagcacagagacagtgrgcagtgtctgtttgaataaggaagaatggaagcgggcagggaggggrgcaggctgtatctgaaacatgtctcatgagtgcagagaaaaggctgcacccttaggggtgggagagggatccagagtggattggaaaaggttaaaaccaaaggcaagagagcagcaggtggctgtagtgaggcccagatggaagagcatgtgatttcgcatgctgcagtgggactgcgcaggataaagtcttcaacataagagctaaggtggaggctctagagggcgtaatgacaatggccataaaataagaggtttgggctaaatccctgaggtcccaagtcctaaccctgcatgagccaggtgccacttctagccctcctgttcctcctccctgtcatttttgctgtaattcttttgttggccacctgcaagtaggtgtccttggcactcctgctgtctgccctgctgtggtgagtgtgagccgggttgctcgtgcccctctctgagcctcagcttctgctcctccttgggctaaatcctgccccctcatgcccaaaccttgattgctgcataatgattcagcccttctactctcttttatctgcactgccttagagctttgtcttaatccatattttaacactttcttatatttaataaaggtttatttgatcaacaaatgcttaatgagtggctaccgaatgcctgcgctgccctcatagacttggtcagggaagacagacagtgagcaggttaagaaagtgctgtgaagtggcatttatggcaccctatatgaagactaactggtgtcaagggaggcctgtctgtagcgtgacagctgagctaagatttgagggatgagaaggaggcagccatgtgacagccagcagggagagcatttaaggcagaagcaacagcatcccacgaagactctggctccaaaggagctccaggtactcttgcaaatggaaaggaaaccaacgggcctgcaacgtattaagctaggagagtggttggcagtgatggtggagaggtgggcagggtcccaatcgtggaggccccatggccatggaggggtctagatttcattccaagtccagtggggagcccctgaaggcttacggcaagggggtggggtgccatctgttccctgtggctgccatggaggaagtgggcacaaggaagggagagacaagtggaaaggctgcagtggaagctccaggtgacgcaggggtgaccagcgccactgctgcggcaggggggatggagaatcaggggctgacttgagactttggagctggccatgttagtggatagatggtggggatgaagaaatcaaacatctttcctggatttctgcctaagcagctggagggtggtggttccctttcataaaatgaggaggacagtggaaggaatatgtttagagagggggatcagagaatagttcccttctagacgtgtggaattggagatgactatgagacattccagaggcaataccaggcttccagaatgcaaatctagagccagaaggagaattccaagatggagacaaacctgggaatacaaatggaatttaaacctatggagcgagtaagatgactgtcagtttcctagggctgctgaaataggtaccacaaaatatctggcttaaaacaaaagacatccaaaatcaaggtgtcaacagggccatgctccctctgaaggctccaggggtagagccttccttgtctcttcctgcctcgggtggctccaggtgttccttggcttgtggcagcatcactccaatctcttcctcccttttcacatgaccatcttgctgctgtgtcagtatctatgtccagatttccctctgatatggatgcaagtcacattggattagggcccacctactccagtgtgacctcatcttagctaattatatctgcagcaactccattcctaaataaagtcacatgccaaggtgccaggaattaggagttcaacataacttttagggggacacaattcaacccataacaattatctagggctgggtggaaggagagaagacggtgggcttaggacttggccaacacacagcagttggatagaagagggcgagcctacaaaggaaatgggcaagccacaagcagagaggcgggacagatatggggagcaagcgatgtcatgaaaaccaagaataagtgtttcagggcaggaaggaatgatcacccgcgtgaaaaaaatgtggctcccaggtcacagagctaagaagttgatcaacagatgtgacagcgtggagatcactgctgatctcaacaagtgcagcgcgtcagtgacgcagagtgtccaactccaattagaggaagctgagcaaatgctgtgaggtgaagaggtgggaaccacagggggagatgactctctccagagagtgggccttgaaggggagctgagaactagggcagcagctgctgggagacgaagggattaggaaaggtttgtgtttggggcttttgttttgttttttgtgttctgttttgttcttgtgttctgctttgttttctaacgtgggagccgctagagcatgtggtgtgctgtgtcggctcgatttttatgtctgtgtctttctgtgacacacgttttgtattcgactcgagttgtcctgtgtgctttgatgtggctttcgcagcatcagaggccttcgcagacagtactgtctcccagccacctagccagatgcctgggcatttgttctttacggtcgcagcaggaacattctgcggcacgtatcatggtaccgtgaatggctgccatttcattttcttggtggactacaagcaattttcccaggccccgttcatgtcacgtcagtcgtcaaaatctatgtctggtgtttcctgctaaagaacatcactaaagtgcctttgtgtggccattttagttgttgcagtctgccttgttcatcactggggaatggaaactggaaaacgaggtttccgtgggttaggaacagccttccgggccatgagaaccacgtaactaacctgataggaagggcaggcccatagtcaagttcagagaagtcccctggggccagaccggccttcctaagacttacttgagtgtcaaacatccaaacctacagactggagcgtcagacttccaaacgtcaggctgcaagagggcaggggccagccaagaggccaggtgacaagaatcgggggacagaggtgagaatgtgcttgatccttgagccagcagtccaggccaaaactctcctcccatgaagaggcctagatccacgtgagaggaggcaggaggccacccctgactctagaacagggagggcagagagaaaagcaggttctgacaccataatactttttttggtagtgttcttttcagatattcccttcttttctggccaggtatggtggctcctgcctgtaatcccagcactttgggaggctgaggcaggtggatcacttgagatcaggagcttgagaccagcctggccaacatggtgaaaacccgcctctgctaaaaatacaaaaattagccagacctggtggtaggtgcctgtaatcccagctacctggaaggctgaggcacgagaatcgcttgaacccaggaggtggaggttgcagtgagccaagatcatgccactgcactccaggctgggcaacagagcaagactctgtctcaaaaaaaaaaaaaaaaaaaaacctgaaacagatagtcccttcttttttctaagggatgtgatgttttaaataaactgaaacgatctctaaaggcactgctagaggcaacctggcagtaatcttatcagttacacacaatgatgagtgaacctgggggccctggtatgtggccaacactgacacaggtggcctaggcaggtggtgggctcgtggtcacatggaagacaagggtgcagcagggacatgtcttggagccaccacaggcatccccagctcatcagtgccagtgagtaagagtggcccctgacaatacatgcgcagtccaatgtggggaccaaaggagacaaaggccaaagggggtgaagtgccaagcagaacactggcagctgaagacgcccagcagcaggcgatggggacaacggaagkttcattaaatagcaacaaggcaactcactccagcccccagcggtcactccttctgctgcccagaccggcaagtgtgactggtactctagaagcacgtagtagccagtacccagtctctagttgtgaggaaaggaataaactaaaatttttttttttttttgagacagggtcttgctctgttaccaggctggagtgcaatggtgcaaatcatggctcatggcaccctcaaactcctgggctcaagcagtcctcccacttcagcctcctgagtagctgggaccacaggtgcgcacctccatgcctggctttttttttttttctttttgcgacggactcttactctgtcacccaggctggagtacaatggcacgatcccggctcactgcagcctctgcctcctgggttcaagcgattctcatgcctcagcctcctgaatagctgggattacagacctgcgccaccacgcctggctaatttttgtatttttagtagagacagggtttcaccatgttgaccaggctggtcttggactcctgacctcaagtgatcctcccaccttggcttcccaaagtgctgggattacaggcctgaaccactgcgcctaacccctttttttttttttaagaaacagggtctcactctgttgcccaggctggtctgaaactcctgggctcaagtgatcctcccatctcaccctcccaaagtgctgggattccaggcatgagccaccacacctggccaaactccattttacttgtgaaaaatcagaacttggtaataagacatttttgggttttgtttgttttcttcttttcaatactattatataaagaaaaaagattagcaatgagaacaaatttaaagggggaagaggaggtactttttcagtagagaaaaattcagctagaagatccaagaccagtgggggtgtttctgatcgccctcttcctccccactctcatgctaggtgtgtgaaaggtaaccaagagaaaggtctccccagctcccttcactcccactccaggctgcagaaagggtaggaaagtagcctcttctaccatctcttagtgaagtggaaaatttatagagaaaacaaaaatcaggctaatgcatttcattatcagcagaatgccttgagctactttctttcttttttttttttttttttttttttgagacagggtctatttctgtcgtccaggctggagtagagtggtgcaatctcagctcactgcaacctccacctcccgggtccaagcaatcctcccgcctcagcctcccaggtagctgggactataggcacacaccaccgcaccctgctaatttgggtttgtttgtttgtttgtttgtttttggtagagacagggttttgccatgttgcccaggctgctcttgaactcctgggttcaagcagtccacctgcctcagcttcccaaagtgctgggataacaggcatgagccaccgtgcctggccttgagacatatttttttaaaaaaacataagctgtgttcatatctcaaactttgagcctggttttgtccaaaacatacccctacctaatcatgacagattcttagaaaagaagatgtacctgggtggtctctttagtgttgattaccaactccctgtgaaatgttctcttggggtttaggtgatttccttgaagggacagaactcctgcattcaggaacaggttgttcatggagtttacgctggaatcctggttgataccagactctgtattcatgaatggggttctataattgtaatattaggtaacttctaagaagattagctttttagaagctaataaaaaatagcaatgtttccttaagaaagtgtgatgtaaattcttaagaaaggataattggcataaacagatattggacttaatcccgttattttgggaaggggacagcttgttttacatcttcctgragatagaatacctcgagttaggtgtggttgtgcattcctatagacccagctactcaggaggctgaggcagaaggattgtttgagttcagaagttcaagactatagcgagctatgatcatgcctgtgaatagccactgcactccagcctaggcaacatagtgagttcccatctctagatagacagaagaaaatagaagacctgcgtttcagaactcctttgtaaaaaccaggcattctctgaagattrgtttcccagactttcagctacaaaagataacttcagaatatctctaaaatggttgttagctcatctgattggcgtgtgaargtaatgaagtcagtagacgtggttctctgtaggtgtgttctaaacacacagacttatccttcatctcagccaaccttccaagtgggccctccactaatggaggggaccaagccaaagaatggaaggattgttgtagcacagcgcctctcctgagagccacaggcccttcagaggaggagtcagtaatggcaccccaggtttgaaagatagtrttcatatagaaacagcttcctgcatttccarcttrctaatggtttcttccattcttccttttcagggcccctgagatcatccttggtttaccattttgtgaggcaattgacatgtggtccctgggctgtgttattgcagaattgttcctgggttggccgttatatccaggagcttcrgagtatgatcaggtgggtccagatgacacagatattcacaagacctcattcttcatctggaaaatagcctggattagcatttcattgattacatgacaaatgggcgggactgtggaatgtcacgttgtctcccaaaccttgcttcccttaaccttgctattttttctttattcctttctcttttycctttttcttttttctcttttttgttaacttctttccctacaaaaattgtcattttcatttttctcaaagccagcagagccattagyataccatatgtatagtgacaggaaaagccctgacctcattcttatcttttcttgcagattcggtatatttcacaaacacagggtttgcctgctgaatatttattaagcgccgggacaaagacaactaggtttttcaaccgtgacacggactcaccatatcctttgtggagactgaaggtaggaagagcgtctcctccactcctcacagtggcccagcgcttagggaagagggccgtagacccattagtggggagcttttgattcagtcagcaaaatgagggcactgggggtgctgttgttaatacatggyrtggctgaatctgaatgctcagaagcccctctttcccttggcctatcgccgcctgtgagagtccaaccttatgattgctgaactcccaggatttaatccgataagccttgatgactgtctgatttgtgctagggagagaaacgaaccccactctgcccttgagagctggcagtccagagggagacaggaccatgtgccacaagctcccgcccactgtagtaagggccctgttcctggtcaagaatgggtgtgggtgccaagaggaaggagcatttaattctgcctgcagcagaggggcaaggaggagcatttgaactgggccctaaagaatgaagagggagcgtggtggctcacgcctgtaatcccagcacttcgggaggctgaggcgggtggatcacttgaggtcatgaattcgagaccagcctggccaacatggtgaaaccccgtctctactaaaagtataaaaattagctgggcgtggtggcatgctcctgtaatcccacctactcaggaagctgaggcacgtgaatcacttgcacctgggaggcggaggttgcagtgagctgagattgtgccactgcactccagcctgggcgacagagtgagactgtgtctcaaaaaaagaaaaggaagaatgaagcgggtttgcccagtatagaagtgtggggtggcggctggggtgatgggggttagggagaggggttccaggcaaaggaggctgcctggtgagcccatgggaatatcctaaggcccagggaggtgtctggttcacacaagtaaccataaacctgaaactccgggggcaggggcttcactttaacagaaacatagtttgctttcactttgatctgtgcctagcaattaaaatcaaagtattttcctggtaaaaagaaaataataaagtcttaaatatgtttcattttaggtatttctttttttgcagcagggtgggtrggtgtttgttttgttgttgttttggatttgtttttttaatggaatctgcagccaaatcctaatatggtttaaagataatatatatccagtagtcacaaaagactgagaaaagagatttgggaactgagcaagcactcaggctattgatgggaggcctggcatttggcaactgtgagggtgagtgtcaaggtcaggtccagtaaaaagagtcctccggtggaggagggtgaggctggagtttgctgttgtgttttattgaagagcctcagtcccacatgtccagctgttcccaggacttaagccgctccaggtgtgctgtccttgagtgagattttgaagacgaattacctctggattacctcatggatgagtacagaaatccatagtaattggaaacagcagtatctccagccatttggggaatgtaggtctgtgtctcagccaccaatagaggggcagcccagccacaaactctggggccagctgccacctattggccatgtgaccatggcaagtgcctggagctttctcttcctgtttccccatctggaaaatggggatagtaactgtgctacctaatgtggttgtcaaaactattaaatgaataaatgtgctttagaacaatgtctggcacgtagcaagagctatgtgcataagggtttattaaataaaattggaaaatgcatgggaaagccctttgcttttccacaatggaatcttgccttattccttagactcagagaaggctgtaagctgatcgaggatgtggcatacctygatcagcctgtggtatggagcaagactgctccatacctgacccggagccagcccctgacacgtgtgcataggaaggaggagggatgggttggtgtggatgaagagagaagggaattgcaggtgtgcaggtcattgaagaatcaaaatctcttccgaaatgtgggaaagagaccctctgtgagacacaggagttccaaggcttgagtcccagtgatgaggagctaagtcacrctaccaattggcttttgcctctcttgacagacaccagatgaccatgaagcagagacagggattaagtcaaaagaagcaagaaagtacattttcaactgtttagatgatatggcccaggtaagcttcatgggtgagtatgcaacgtaagccctttaaaaccaagggcagcaagacttctgcaatagtaatagaagataatgggttgaaatccacattattcaactgcagtggttgaccttgaccttaaatagttacagccagtcttagtaagaataccatttggtgtgtgaaacatttttaaaacttcataccagctcctttaaaatcgttccagttggccaggcatggtggctcatgcctgtaatcctagcactttgggaggccaaggcgagtggatgaccttaggtcaggagttcaagaccagcctggccaacatggcgaaaccccgtctctactaaaaatacaaaaattagctgggcatgatggtgagcacctgtaatctcagctactcgggaggctgaggcaggagaatcacttgaacccaggaggcagtgagccgagatcacaccactgcactccagcctggacaacaagatcaaaactccatctcaaaaaaaacaaaaaaacaatcattccagtgtattggttcccagttgtaatatagtactggcctatctgcctgatgttatcatgagaagaattccagcccattagtacccatgggtttaatgcccataatttagtgtgtatgtttcctggggcagccgttagaaggtgccatgaactggatggcttaggacaacagactttcattcccccacagttctggaggccagaaattggaagttgggcttcagcaggcccatgttcactgtaaaggccataggggaagagcatccgtgtctgtctcccagcttctggcagctctggcaatcctcagcgttctttgacttgtagctgcatccctctaatctctgcttccttcttcacatggcttttgtcctgtgtctcctctgtgcctctgtgtccacatctcccttgccttgtcactgggcccaccctaatcgagtatgacctcatcttaactcaatttgattacatctgcaaagaccctatttccaaataaggtcacattcacaccaactggggactgggactttaatatatcttttagagggatacaattcaatctgctacacagtctcagctcactggcagggaccgcaggctctcacctttgtgccccagagaaaattctagaacttcagctatttttagtgtgaaaattagtctgaaaccagggcaacccaaagtgagttttctctttaaagcaatgagaaacaaagctatacaccagtaaacacttagcacccctcttactgtagatgactataaccaaaaatcatgattctgagtaaagtgtgcttgtcagttgattagcagcttagattgtctgagaaaactgaaattggtttccagaccatgtcctggaaaatacagaaatcaccacaaaacaagccttttaaagtcgatcctagtatagactcacccttggaagaaaaatcctgtgttcagatatcctgcctgtcttggccagaggtgactccattgaacacagggactaaaataattctggccctaactggggaacccatgagaaggatgatatgctgtaggtggaggacgggcacactcaggcccttccacttccctctaaaggttaaatacatgcatacatacatacatacatacatacatacatacatacathgacttttttgtatcttatttgtactgcttggccgtgactcttttttaaaaattgtggcaaacacacacatagcataaaatttatcatcttagcctttgttaagggtacagttcaatagtattaacactcccattgttatgcaaccagtctccagaactcttttcatcttgtggttatttttaatgaggagtgatgaaagctgcatttcaacttaactgatgaaagcaggagcagtttacatcctgtcattcagatatatttgcaggtcccagcagcagccctctccccttcctggggcacagcccctctctgcctttcctgcagagagaaaagccacatcctgtgggcaatgacaacatgtgggtggtgcctcccataggggcagagtycctgggaactgagaaagggggcttgagagatcaggaggaagttacagggcaaaaaataaggggagccaggagaggggaggcacgctggggtcttccttggtaacctgtccttacttgcgtccaggtgaacatgacgacagatttggaagggagcgacatgttggtagaaaaggctgaccggcgggagttcattgacctgttgaagaagatgctgaccattgatgctgacaagagaatcactccaatcgaaaccctgaaccatccctttgtcaccatgacacacttactcgattttccccacagcacacagtaggtgtcctgcctgatgcttcgtaccagggatcggcaaactttaaaggcccagacactaaatattttaggttttgcggccataaggtcttggtaacaactactcagctgtcactgtagctgaaagcagccacagatgcaatacataaacagatgagtgaggctgcattctaatgaaacatttatgaaagtgggcagggctgggcgtggtgtctcatgcctgtaatcctagcactttgggaggcccaggcaggtggatcacctgaggtcaggagttcgagaccagcctggccaatatggtgaaaccctgtctctactaaaaatacaaaaatcagctgggtgtggtggggcgcacctgtaatcccagctatttgggaggctgaagcaggagaattgcttgaacctgggaagcagaggttgcagtgagccgagatcgcgccattgcactccagcctgggcgacagagcgagactccatctcaaaaaaaaaaaaaggaaagaaaaaaagaaagaaagtgggcagtggctggactgggtccctggcctgcagttggcttcacactgaaaaggagggaagaggagagcacagagctggatgaacctgactctgggtatctgtgcaggaagagaggtgcccgaaacggtagtctctgtagcgcaaaactagtctcagggccaaagattgctcccagaaccttcccagagtggacccagtctagtttgggtttggatttgttcattcatttcttcagcgtgctgtgtgccggggtacagtggtgagcagagcagacggccctgcccactggagcttgcagtccgtaagagagagaatggtataaaacaagtgatgcccaaatcaccaggctgctatgaggacaagtatcaggtgtgatgagagcatacccacaggggagcctcattttggggcaaaccaggaagactcccaggaagtggcctgtgaaggatgaggaagaggatgggcatgagcaggcagggcattgcctgtatggacaggacactcccccatgggcaggaccatgcacccatcccagaaggcagtaggtgagacagtgaggcatccagtcagccagggcaggccgtacatgttaaggtttttaatcttgatccaaaaagcaatgggaactcattaaatgattcttcagcaagggaatagctggttagatctgtgttgagcaaagatctgtctgctgccacacaagtcaaatgagtctggaaaaaaatgtccattcggtttaacaactcacaagttgtcagtaacgcagtggcagccattcagtggagtggtaaaagcagaaaccagtttaccaggttgaaagaccaagtgagaggtgaagaaatagcaacctttcatgaagtgaggctatgcaagagaagaaatagaggggtgactggggaggggtcaaggggattgtttttaagacagggttcagagcacagggatgggccagtgtcattggaaggatagatggacgaggggcatgtggatgtcagcgtatgtgctggtctcatggagaaaagttgagggagtcctgtcagacagcttctgcttctcagaagtaggcaatgaggttatctgttgagaacgaggtggagggtggtttaagaagggtagaaagtttaggtagctggagcagaaggtggcagagcaaactgaccagagaaatacggtggaattgttgagccctgaggttcgacatgaatcgtttatagtgtaactcatctccccaggtgaaggcatagagaagacagatgagtcttctgatctaggtttgtccaggtggaatttttgccaggctggtaagagaagaagacagattgacaaggaagctgatgaggctagccagagagtaactgtaatccagaatgatgtctattggagactttgcccaaagggaaaggaagtgaagatgggaggggatccaagtaaacgtggtgttctggtcaatgcagagaagggttatcatagtcatagtggaatgagccagatggaggaagaatgtggctgggaaaacaggatgcttaaacttgtagtttctggaggtggagcaatttcaggtttgacggtccagggaatgagtggctgtactgggttgagaacaagagtcactggacatgagaagtaagcgggaagccagggtatttaaaaagggacctgtgacttctgaagccttcctagcgaggcagggaatggcttggagaggaaggtccagccagtggcaaaggcctcagtgaacgaaggggagaggaaacgaagtcatggccggttgcagtggctcacacctgtaatcccagcactttgggaagccaaggagggcggatcagctgaggtcaggagctcagaccagcctggccagcatggtaaaaccccatctctactaaaaatacaaaaattagccaagcgtggtggccgcacttctgtaatcccagctacttgggaggctgaagcacaagaatcgcttgaacccaggaggcggaggttgcagtgagctgagatagtgccactgcactccagcctgggcgacagagcgagactccgtcaaaaaaaaaaaaaaataggaagccgttggtggatgggaaggtaatggagggtctcacttcagcctctcaaccctgaggtacttgggatgtaaaagaataaataatcacatcctacgtctgcagggaaaaggggtgtgctcaagagagcagcagattctataaggatcaggaggggaagggaatcctgtgagaagagcctggagatgtgagaattgtgcgtatcatggcgggccctgctgtctccagagtcagagggggctgggtctcaaggctggacccgcccctttctggcctacaggaagtgagtgggtggcaccaccatggatagtggggcctccatttcatttctgtgccttactatcagtgaagcaagtcaaatggcattgcaacaaacagatagtgcctctttaatgtaaaaccatgcttgaaacaactgaactccggtacaaaggaatctggacccatccctcccctactcttgttatgggatttgtcctttttttcttttttttttttttttttttgaagtagagtctcactctgttgcacaggttggagtgcagcagtacgatctttgctcactgcgtcactgcagcttccacctcccaggttcaagcgattctcctgcctcagcctcccgagtagctggaactrcaggcacacgcaccacacccgactaatttttgtatttttaatagagacagggtttccycatgttggccaggctggtctcgagctcctgacctcaggtgatctgcccgcctcggcctcccaaagtgctgggattacaggcgtgagccaccgtgcctggcctggatttgtcctgtttctgagtgccataggggtcagccacagagctgtccatctgtaccacaagaagaagaaaagcagacttggcaatttactggatagggctcccatgatttcagtcttttgatatcacgggtaaaatkggatgactgagaaacagctacggataggagactgaggataggggtgccctctacagaggtcctcttagccgtctgcaccaaaacagtcagatagtcacccccataaagcctggggctttaatgacctcagagtccttccacctctgggttctgtaaggaagaatcagtagagtgtttcacggcttggtcacatggagaccgtgagcatcagcaaccaattcagaacttcatctgggacccaagaggggcactgacaagtcagaactcagaaattagcctaagaaggaaaggtgggtctctgaacacacctaggcttgcctgaaagtaggcctgatccctaaagttctctagaacttgctgggaaaaccttgaagaactccagggcaaggataaatctccaggcccatgcagctgtagcgcccctgccctgggagctgagccacagctactggattactaggtgaaacagaccccactcctttctccataccaggattccagtgcacaatttttaaaaaaccaatcttcttataaacctaaagtgaaaggacttgccctttcctaaaacccaaaacttgaaatatttcagttggaaaattctgaaggggtatggaaattttgtgttgaattgtcacgaaaccaaatgctttaagcccattccaaaaagaatataaaatgcattggttttatgctgcagcctccacgcacaagaccttggtacttagtaggagctgaaaacacactggcattaacagcattattaggagtatttttacctactggataccgcagaatatgttttcttttctcttcagcatcatcagtccgtaaatggttatgtcgtgtgcatgacgcagccagtgtaagtggtcagaatcttagaaagaagtaggactctctaagtcgcgtctcagtcagtcatttgaaacttggaatgcatttttcacaggatgtttgggaatagcccacagacacctgcttagccccaaagatagcatacccacagagtactgaagtagtacacgtttgtaatcctaaaatagtagaaaacttttattttactcattcagttattacattttttataattaaaatagacattttgagttgaaaattaaatgagttttttttctttttcttttaatttttttttttttttttttcctgagacagggtctcaccctgtcacccagactggaatatagaggcctaatcatgactcactgtagcctcgacctcacaggctcaagtgattctccgacctcagcctcctaagtagctgggaccatgcgcacgtgccaccacagccagctaatttttatattttttttgtagagaataggatctccctatgttgtccaagctggtcttgagctcttggactccacccaccttgacctcccaaagtgctgggattaaggcgtgagccaccccacccagactaaaagggattttattatcttgaatattagcatttgaggaaaagtaagtttaactacaagaaatgaatgagaagcgctgtataaattctgaaggacactttttggtcgattttcaagaatttgggtggctgaagccacttgtggctttccttttccctgatgctggtttcagcaccacttttatactttacttttgtagttggggttttgttttgatacacagatgcaatgggggaagaaaaggagaaaatttctatttcatgtagctggacaagacttagacaagaaaatgaaggctgaagttggtgaaagaggacgtatgtgtatacacgaaggtagccagtgattacctatccttggcaaactccctacctccctaagcttcagccttactcgtgaagtagggacgagaatcatgtctccgtcttatggatgttgccggaccgagtgagaggttgcagagtattattattaggacactaataaatgttaaccactattattaattattagtattattactgtttccattacctacctgcacaacccctgtgggagaaagtgtggcaatagggtcaccatactgggttggagagttccttggccgtcccctaggtggtgctggtgacccagggtagctgaagcaggtgactacaagggttgtctttgggaaaggtggaggcgggttataagtgactagttaatgttcccattcagagagcttatacattggtttgtgggccagaaaccaggctgagagttgagaatgagcagtgatgctgcaggtggacctgatgtgagaatgcagtgtgagcagtcagttttgttgtgatatatagaacctatatggagaaagggtagtagggcaytggagaaaattcatctgaataaccgtgcctgttgcaaatgcacaggctttgcacaagcaatccaagaaacttagacctaaagtttagtttccctgcttgtcctgtttactgaattaacccttctctcctttcctttgttttctccccttcatcccacgttaccctcttcccctccccttatgtctcaatatgcctctgccttttgcatgaacagcgtcaaatcatgtttccagaacatggagatctgcaagcgtcgggtgaatatgtatgacacggtgaaccagagcaaaacccctttcatcacgcacgtggcccccagcacrtccaccaacctgaccatgaccttyaacaaccagctgaccactgtccacaaccaggtaagtgggaaacagaagggaaggagaggcggggctgcacagtgtgagcctcagracttgtattttccatcatacctagtcaggaggcaaaattcctgctgtcatrttcaacaactaawcaaagtatttgcatccaaggttatttcctttgagggacccaggcacattttgtgttgacttctggccccattgacaggtcccagaaaggactggtgagggccattctttctgagatggttccccttactgctttcctctgtcctgatgtgggaatagggggaagggggtgctatgatccttttatgcctgatatgtgmctggtaaagaattctagaactggccaggcacagtggctcatgcctataaccccagcactttgggagttcagggtgggaggatcacttaaagccaggaagttcaagagtagcctgggcaacacagtgagacgccatctctacagaaaatacaaaaaattagctgggtatggtggtgcatgcctatagtctcagctactcaggaggcagaggtgagagaagtgcttgagcccaggacttcagggctacagtgaactatgattatgtcattgcactccagcctaggggacagagtgagaccccgtctcaaaaaacaaagaaaaagatcatggaaacatggatttaatctaaaaaaaataaagattctagaactgggaaggactcagggaatcacccagttcaggcccttcccctcgtccccacatggctggatctacctgatctccttttgggacagataaaccctgtcctttctccgagtcatggagaaaatcagttcatcagcctgtcaccagaatcccagcagctggaactaaatgggatcaggaagctaaggttttcttcccacagatttccaggaaattggcagaaggagcagctaacatactgcttgaaacttggatgacacccaggcaatatttattgaatgaataatctccaagtctgagctgagactgcctctagtgtctaagaaactgtaactcctactcccatctttcaatcctcctagttcccctaaagaagggcccccagatttttgttcttaatatcaatctggaatgaaaagacttctgtgtggatgtgtgtgtacctgaaatgtgaataccttatgtccattctttttgaaaggtccctcctgtcactgaagagtcactgccccctgcttttcagccgctccccttcccacccttttcccctaggccatccttgtggcacattggcctgctcaggcctagcttttcttcccagcctgccatctccctttgcccaaattctaggagacaccacctggtatctgctgccctctgggggccgtttgcattcttgaagctctccttagggtgaaagagctgttgggagtccgaaaactaaccttgcccagccctaaggctaaagcatccatagccagacctgtgagcttcttgacaaaaatcagsatggttttgttcattacctccttgaagacatttgtttctcccaccagccctcatgaggcacctggtcttaactccctaaccccaaactacctgtccccatctaacatctgccccatcaggtatcaaaggcatctgtgaaacaggaggaaggagcacccctccaatgcaggcgtcatgtcaagtggagtctccccagcaggctgtccttcccatggatgtctttctgccaggctggagaactgtggtccctgaccagacgcggggtggggggccaccgccatcttgctggtgatatgacagccagcatatccactccaaagggtgtcgcaaagactctgcaaaactaaaagkgttgctcatcaaaaggcagttgtcaaataagaacacccgtcttctccacggcactgagaccatccagatctggcttgggactggggtgaagtaggagtagctggtaacttagtgtgatgcttgggccagagtcgtgggtaagggaaaatgacatcccacaaaagcaaagggtccaagaacaggatttcygttctcttgcaytggattctactactccctacttttgaatacatcaggaaaaaaaaattactcaggacacacctagccttaagcactaaggcatgctttccctccactgatactgttgttattaaataacatcattactaatagctaacacttattatgtgccaggctttactaagcgtaccataactcttaatcctcccagcaacgttgtgagataggttttattattatcatttccattttagaggaggaaactgaggcaccgagtgattaattctcttacccaaggyccttgctcgttcatgagaggtgggcttaggctttgcagccagcaatctggcttcagagtctggactcttaaaatatacatacacagcagcataagtaagtcttaagtaagtcttatggaggtccccaaatgcctttcctaggtgatgtctgctctttaaatccaacaagacttcttctgttcattgctggttctagtagctagctttctacatgagctccttggagctgtttgcccatttagatatttagaagcaatacaatatatgcatagttttatgttagaagttgaaggacattaaactacttaaagaatctcttgctacctttaacatatatccagtagactaaccaaagaaccatttcccaaatgatcatgaatctacaatcttttaggtctcaaggaagctgggtcaataattcataacccgttaagtctcaaggcagctgacttcctctactttctaaaactttcargttacccagttggtaacatgttgaataataagtcttctctcagctattccttgtttatcatgtggatcagcaacttctctaacatttccgtggaattctattatttggacctagccttctaccaagaatttgaatttgagtttatagaccaagctcaaaccccttccttctggaaccatttgaacgtctactacaactgcttccaggaatcacttcttccatttttggaaaacctgtgtcatcaataaacttgctttttcactaggcacagtggtgcacacctgtaatcctagctatttggaaggctgaagtgggaggaccacttgagtcaggagttcaagtccagcctgggcaacatagcaagaccccagtctctgattttttttaacttgttttttcttgttattactatctgtcagctgcaagagctcttcccagttctctgtgtgctcctctctggcaagtgataggctagctacctttctgagagctaaaggaggatatacagaagtagaaaactttttgttgccctcacatgggcttcttcaactggtccttaagcagggttcgaaactaggggaaaaccttatgcatgtctgatggtcacactggagactgggtccatatcaggacacaagtgccatttgtccttgagtctacagagctggaagattcagcctctcaaggagctcatggtctccatggtgagacaggctgtaagcaaaaatagtttaatcaaaatgcagaatagcatgtactaggggccaggtagacaaacagattatgtgttacagaatcgagaggaaggagagaccactgcaggctggaggaaaacaccactaagacacagcccctccctcccaggagactttaggctggaaagaccaactgtactgtaaggcagattgtaacaggagctgggctagaaggctatattgtactgtgtgatagcaaaggaaggagcaattcatttccattaatggtgtctgaaagggtttcacaatggggcatgtgggacccaggctaggccttaaagcccaaaggcttggagagaatgctatgggtcagagagcttgtatgaagggaaaggcctgtgctcacagtatgcttggaaaacaatgagtaaactaatcttggtgtcagaagagtggagagcagagggagataagtctagaaggtaaggttggccaaaccagggaaaacagggcactagaccaggcgcataccatgttcatcaagctgtaattgggattttggagcaggggtgctgacatgcacaaaggtgtcttgtggaaagaatgatctaccctctgtgctcaagaaggctggaagggaagtagagaccagaacatttctagtcagggccttataggtcccaggcaccaggaagtcacaactgaaaagagtcagtggattccagggacatcaggaaggaagcagcagcaggagcagtggctggcaagaaagtggaaccaccgagcagaagtttgggaacctagaggatacaggtgccaggacccccagcagggacacccacaggggctaagggctggggggagtctagatatgagcagaccatggggaatgtggagggttgagggggaagaagcctccggaagagatcgcgatatggagaaaacaggaaatacaagtcatgtcatctgacaaaacacagacactgatgcccacatatgtacacacgtgtcccaagcagactatgcgacgctgcaaaagcacacccactttaaaatatgtggcttaaaatcagacatctgtgccactcaatttcgtgattattttcaaacaaatcaatttgctttgcaatgaaatttagcacaaaatctaagtatagaaaacatatgtaaaataagactttgtcctttttatcaaatgtgacatccatacacaccctacttgaaattctatttgtgtccaagatatcttcgtggtttcttcctatgtattccctggtccttgtaacttctagaggcaaaacctcttgtagacagtgctgaatgtgaaaccactggtaaccacctatcttgctaaaggatcagtatgaaggctaagataggggaaactggagaattccaaagttggaatttattttccttatacagcctcatttttcatgcaagttcagtctcaagtgatgtctttttctgaaaaagaaaggcaagaggacataatgtcaatggcttgtgtttgtcaaagccacctccatttcagttatctggacacaccagcatcttttctatctgccaggctttgtcactgcataccaacatgaatgcatgggatgcagacacaaagccccaggctcarcatgtccctctccctctctgcatacatctcctgtacttctctaagctttgcagccatctaaggacatctgtaaacagtactgcccatagtcctgagcccctcctcggccctgctctccgcctgttgcatgtgctcctgtgccaagctctgggtactgagaccatagtcctttagggcctgcaagagcctccccctggatttgtcctcccacatgtggactgcacccaccaggcccgaggggagtgtgagcagagcttggacgtgcaggctggcaggtccaggcacccagagctcatcatgttgtgggatggaatggggcttgggcagagagaaggagggcaaggtccagctctctccctgtcaccatgtgtcagcacagaacccaaggaatcccatagtcctcaactcacgcctggtcttcccggttattgggaaggtgtatttgtcaaaatgaaaaggcagaacattttattaaacagttttctagcctaatttttagccttttcagcatttagacatggtagcaggcatccgtgtgtcctcttgtctgggcctcacaaatgccaggagcaagtctgaatgtgaacaccaaggtgactgtctcccatgttttcagggacctgcttttccctgcgactttcaatcgtgtttccactcctctctgcttttgcctttctgctcttagtttttgtttgtttgttcttctttgagttcatttatttgatttagattcgtgtctcccaacatgccacctccctcattttttatttttgtttatttttgtttaatccccatcactcctttaggctccctcctctaccagtgccactatttccttagccaatcccgaagtctccatactaaactacccatctacactctaccagccctcagcggcatccatggctgcagtggcccagcggagcatgcccctgcagacaggaacagcccagatttgtgcccggcctgacccgttccagcaagctctcatcgtgtgtccccccggcttccaaggtaagattgagcagccacagcctctcacctgcttcttacagaacggcctctggggctccggcacctgcagttttctgtcacgctcattttcatggagaaaggccctcctcatttcttccagtgagagcgctggtatcactgaactagagggctcctctcctactgtggccaacctagaaacaatagggcttatgcctcagcaccaagtcaatcctttgtgactctcacacctgccagggactgtgtccctggccagctgtctgtaaataagtacatagtttgtgctttcattgttatgctgatgtcagctcttgcttttcctcgcatgaaatatcctctgtgtgggttatctgtagaaaactgccaatctctgacagccgacatagtcccagctcccatgaagaatatccatcagtctgaaaagtacttccctgggacccctcctcaaaacaattctttggccatgaccccagcactcctctcctgtagactctaagaagctagactgtgtactttgttacaatttacccagaaagcttaagaatttatttttgcaagcctcatggtgtaaactgtgtggttacagtcaatgcaattccaaatgggttcatacatctccccaacacccctcattttgacatacacaggtacatcttgatggtcagaagcccttgttttcctgttgtaatctgcgagcatatctgtcctacttttggccttacagcctccttaatctgaccttctagcctttgaagacattcaagatttcaggaggagttttgttttttaatttgttagaagccaaaggggagacttccaaggaccaggcaatacctggttgttgtcagtgaccagtgcaaagggaagcagaaagttgacataactgcccaggaaggttcttttcatccagctgttcacagcgtctcagctaacccttctctccctcacactgtctggaacaggcttgcaggcctctccctctaagcacgctggctactcggtgcgaatggaaaatgcagttcccatcgtcactcaagccccaggagctcagcctcttcagatccaaccaggtctgcttgcccaggtaattctttctcctttattattactggtattaccattacctgtgttaatgttgttcacaaaagatatatatctccactccctctctccctagtaatgagttaggtgcttctagtcattggaatgtatctgtaatattctaaatggtccccaagtgaattaccttcctaagtatctgcttacaattccaagaagaaatttagatacagggagagtctggggaaattattattattatatctttgaaatgcaaattaatctgggatacctaggttttaatcctaactgctagtaacttgtctatgacctaaggcaagtcagttaatatctctttgcctcaaatttctttcttgtaaaatagaaatgagtttttagagccaaaaggagccttggtgattatcctctcattttatagttgaaaaaccaggctcatggttactgtaagctggaaccttctatctctgtatccatgtaggtgctctgatggtagaatgagatggcagagatgaaaaatggttgaaaatttgtaaagtgttatgtaaacgtaaggtaacagtagtgatgcaatgataacagtaacaatccttaatgacactcgaaccctgataacaaatacatcatcattataccagggcactttacagttgttaattgatttaatccccacaatgccacagtatttgtctccatttgacaaatagggaaactgaagcagaataacttgctcatcagagtcacacaacaattaggtaacagaaccaggacacacacccagtaagtctgatgccagcatctgtatttcaaccaccaagctatactacttctgtataatcatttctactattgagtagcttgacctaaatgttattagtttagaagcagctttatttttaaataaggtaggttcacaaaggcttttcccaaagacactatttgtcctgtcttgttaaatggaagttgtttttgttgttgtttaatttttaatttaaaaaattaaaaatttaatttttatgtaatcaaattgcgtaggtttgttctgtgctcttctattccattggcttctctaatatcctgttgtcttaaccattgtaactttagtctgtcttggtatctagtagggaagccctgttcccagagagttcttcaaattttccttgtctgttcttgtcccttcatgtttttaagtgaattttaacatcactctttcataagaattttagttacagaaaccaaaaatctgctttatatttactggatatacattgaatttatatttacttcaggaacaactgacatctttaaacgtgtaagtcatttttatccatgaacatggtataacactctgtaatgggtgtggtggtgcacacctgtagtcccaggcctgtagtctcagctactcaggaggctgagatgagaggatcacttgagcccaggagttcaaggccagcctgggcaacatagtgagaccccatctctacaaaaaaaaattaaaaattagctgggcatggtggcacatgcctgcagtcccagatacacaggaggctgaggcaaaaggatcacttgagcccaggagtttgaagctgcagtgagctatgatcacatcattgcactccagggtgggcaacagggtacgaccctgtctgtaaagaaaaaaaaaaattaatagaaacactttatcatgtttaagttttgtaatgaatattgaattatatcaaatgttctttctgtatctattaagacactcatatgctttttgttccttaatctactaatgggacaagttatattaatatattttgtaatattaaactacccttttatttatgatataaactccatttgctcatgtgcttgatatgatatgctttttaatattggattcagtttgtaagtactatagttagtatttttatatctatgttcataggtgaaaaatggcatataatttccctttttataaaatccttatctgatttgagtacaaggttacaccaggctcataaaatatcttcttcttgttgttacccacacgagtgggtttggtcacttgacaggtaccaacccaatgaccacagacaaggatttagcaaggggattgtattacttgtaacaagtaaggagaacactggagatagttcccaaagcagtgtctctgagcaaagggctgggtcaggttttataagcatagggtaatgaggcatgatctgattggatcttgcaacgaattgatatcagaggcatgatctgactggatcctgccatgcagtgatgccacagctcgatctgattggatcctggatcctgccatgtggtatccatttctaaattccattcactcgcctcaatccaggcacttaggttctgcctgttgttacatacctggttcatctgggcatgctcaggttatgtgacctttaacctgtggatccatggcaaatgaaaaacaactcacaactttgttacataaaagttgaaccagactgctgtggttacattattatctattctgttttccggaacagtttgtttaagatcgatatgaagtattcttcatctctgtgcttaggtccagaatgacactgtgcagttgaccactaacaccagtgactggtagcacacaaagttttgtcttattgaaagtttgtaaacagagaactttttgtatttaaaacaggccttctcttcgttcctctctctccaatgggtccttgtagcttccttttatttgcatagttcagtagcggggagttcagaaaaggccaagatagatcagagaaagaactacagctcagtccaggggcaaaaaagcttcttcatactttatctgagtggcaaaaatccacaccagtctcccagtgctccgcctttgtgagcccaaatctacagaactcacgtgtgcttttaaaggataattacagatcttttttatgtttgcacacttaaccctagtaagccaggagccatctctgaaagaaataataattagcatttcttattagccaaaatagggattcttcrttgttcagtttggtggaaccagtagactcagcagtcagaatttgtttcagtcctttaatcgtagcaggggagaactttaccttttgcttccttgaaagagagtccctagagtgttgtaaatctccaagtagatttaacctaaagctgtaattaggaaagtgaacaaaaaatacgtgtgtaaggattttaattgctactgtgtttataactgagattgttggaagaaacttgaatgttcgtcagtaagggattggttaaataagttgatgcacacgtaaaatggaacaccatgtagccattaaaagaacatggtagacctttgtgtcttgacatgcagagatttctaagatatattaagtgaaaaaaatcctgccctatccagtatcgtgttgtgtctttttgtcagttgctttttatttttctctctgcttgtcacttaatccatgccaatatgttagcctgttgagatgggctctctcctagatatttttaaacattcccttcaaaggacaaaaataagttaatttataaaactcttatggtggctataaaaaagcacaattaagcatttaaactgaaggcttcgtttttctacagttaaatttctaggcaccaggcagaggcattccaaatcctattatttgacataaatgtattcaaaaagttgacattgttctttttctctaaatactgaaaatcttttaaaggattttacttatgaacacttagagatggagtctttgaatccactcctcatgttaatttcattttctttgcccttttcctccccacctcccagcagcatcacataaaactttcagggaaacaggcctctgtggggcacccagaggatgtgtgcatggcaggtggaaatggtaatcattctgcttatgttagtgatatgggagtgatctttgtggatcaccttgcaacaaaagcttttttggtactgcctaaaaggagctgtcaactccatcctcccaagccccatgccacagctagcatcttggccaccaacagaaattgtgaatgagtaggtaatagtggagagatgggaagcacagttcttgattgagacagtattgaatttatctgacttgtcaaatgtcaggatctaaaatctcctttgactagcagggttagagaaatcactgtagactccacccttccatgaagtgttttgtgttcttctagccaatcaaatcatatcacctgaacctctttattttttacttatttactttatttcttgggctcatatttgaccaactgagcctttaaatgtttccctgaaaacaaactgttggcttgaaccctttaaactgttcgaaatacaaaattttaatgtttctcactcaaaagttcctctgataacattttcagcaaccagtctttccaaccattgtcctgctgtctgcctgtctcttgactggcacctgatattcttagagaataaggaagacttgttcatgccacctttatgcagttaccaccaatgcctgatcctgaataggggccattatttttgtgtattatcaacacaaggagaggtgtatattggctgaaagcatgggcactggaattaggttgcccacattcagatggctgcctcaccacttactggctatatggctttggggaagttatttttgaaatttaaatttaattccttttcaaagtaatacatgtacataatttttaaaagttaattaataccataaacttataggaaaattatagtcctctgctctatcccatccttaatgtctcctccccataacaatatatatagttacattatatatgtatatatgtatatatatacacatatatattatccctgttatatatatattttatatatataatatatattatccctaaaagtttttatttatacacacacacacacacacacacacacacacacacacacgtatttttttgagacatagccttgctctgccaccaggctggagtgcagtggtgcaatctcagctcactgtaacctccgcctcctgggttcaagcaattctcgtgcctcagcctcccgagtagctgggattacaggcatgtgccaccacgccccggctaatttttttttgtatttttagtagagactaggtttcaatgtgttggccaggctggtctcaaactcctggcatcaagtgatccacccgccttggcctcccaaagtgctgggattacaggtgtgagccactgtgccctggccataacgataatttttaacttaactgtttaatctgttctttaactctgtgtttctaaataatatgcttagactgctttttatggatttttttttccattttaggtattayccattgacttcctattatggaagatgaagatttagctttctaacccactgccatccccataacacacacaatttctctcctgttcctcctttcactcactcttttctcctattcctcccacataattttgattcaactactttgtaatatttacataattatcaatattatataatattattcttagttgagccttataatatactgtgattatgttttctttctaacacatctttttgtttttcctggagttaatgattgcctcatttttcccattgggttagttttctgtatatctcattatacagccccaaacccttccagagctataaaaggtttgtatgtttgatgtgttgatgtgtttgagcacactgatctcagtatgttgttttttctttctctgaaagcgactttctcctcatccacagtggactcacatttcatgactacatgccttcttttgggtcttttttcttacattgtcctgaacaccctatttgcccttttaatctggattttttttttcctttgataatttcttcccctccattttctctgtttctcctttgcagaattcttattaattgagtgttggtacttctaaattgatcttccgattttcttatctttttttcccctctatttcctatatatcctctgtctgcactactttctaagagatttcttaaacttttttgaaacctccttttgaatggttaatttctgttgttgtagttctcatttccaagagtttgttctctgctccctccataccaaaaaagagcatgttctctgaatatagatattgattctttatatgatcttgtttcatggatatattttttaactctgtaaaggcattaattatagattttagaaaattttcttctgattcccacactgtttttgtttcctctttcttttgtttgcttattttattctctttcaggttagaggcttcctttactgtctggtgwtcattagctattcattcctatttaagactaaagcactaaaaaactaattggaaacctggagggtaggggagagactattgaatgtgggcttctctatagactgaaaagaggcaagtccagcattttcactgacagatcccctgatccttaaatgtcatatctgtagttattttctcttggactagtcatttcccctagagagaattgtctagcctcctgctttggggcggggagtggagggtggtataagcatgtacaccaaggatctgggaactaaggggaaatgaagacctgatcttagattccttcagtctgttaattcacttagtaattgtccatcagtttttcagcttctaaaattttattcatggtgattgcctctctcctactctctttgcccttatgaatctgtattttttattcctttactatcattttagttgagtgtaaagaaggcaataaatgtatatgtttaatttaccatatttcagggcaagttattaatattattaacctctctgtgtctcaatttattaatcttagaaatggaagaaaataacagtccctacctcacagaactggtattaagaagtcagaaaaaagaagtagtcagaaactcatttatgacttaactctgtgtttggcacacaatatccattaagaaatgttcacttcattcttgttagtagtaataaattataaaaatgtctgatgaagcgttgtcacaaatgagccaagcatatcaatcagtgaaataagtcaaaaatagtctttctaccctatctctttgaggtaaaatgttaatatccatttcagggaaatagaagaaaaatgataaccttagcttgatatcaagatttattttttaaatgacattagttaaaactaatgcttttcatgagctctgaaatgagttccaattggctaagtcagtagaaaccttactgcaaacgaaattgttatttatttaatatttggaatttgcaactgttktaatcaattaaattatgtttccgctttctgtgagttaagtaaacctgaaatacaattaactgtagttaatagcgttggtagagttgcttctttcattttatcaacagatattaagcactcatggtatgcgcatggtccctgagcttctgcctatatcaaaagcaaacaaacagtatcaaaaacatctaagagattgcactgggcctcaggtgcaacatgaaaataacggaacaggtgaactggtccactcagctctcaaatgtgattctctcatttttataagcgtcaatgttttttaggccctgactcaaatctgtaatccatttccagaattgcgtatttgtacctataaaacacccacactgagcacatgcacagtttgtgaagcactgcattcgataaattacccaatgttagtcacatccactctgatagaaagagagatggctaagatatcaaacctttaaatatttgatctgtccaaaaggtattttaccttagtgactatgctttaagtgtccaactttaggcagtggtattcagtctgaatcatctaatgaccaaagacaagcagaatagtgatcatggattaaaagagcttaaaacacaacatacacacacacacacacacacacacacmccagtgaatctatcaaggaagaatcacaaacgttcattttagatttcttagaaaaattaggttcaagcagtgacttccgcctctctctcatttttgctttgagaaatcaaagtaattctcaattaagctatagtcacagctaagaattttacttcatacttgcttgctctcagatgtaggttccagatatttggtgatcttagaattgtgtaaacttagattcagaagataacacaagctggaacctagattctaattgataaatcaaaggtaaaatgttaaataaaggatactaggcagaaagcttcttgagggccagcggtcaccctcatctagctcaactcaactaccctaatcccctgtacatagttgtgggacagaacaagtaaataaataaactttcagaaacttcaagcattgctcattagagcaaatttataaagaaatcattcttcaacatgaatgaatcccttccatacagctgtgtccctgtacttaattatcttctacttagttcatatatgttcttttttttttttttttttttttttttgagacggagtctcgctctgtcgcccaggctggagtgcagtggcgccatctcggctcacttcttcaagctccacctcccaggttcatgccattctcctgccttagcctcccaagtagctgggactacaggtgccygctaccacgcccagctaattttttgtatttttagtagagatggggtttcactgtgttagccaggatggtctggatctcctgacctcgtgatccgctctcctcagcctcccaaagtgctaggattacaggcgtgagccactgcacccggcctgtatgttcattgtttatctccccttactttagtttttgaggccagagaccaggccctcactctcacacccatgagaatgtctagcacaaccccaggcacagaataagtgtgggttcatgcaaatcaattatgtgattagcaaacatggtcattgcacatgtcctgtgttctacagcaggcttggccaagtgggacccagcagatcctrcttcccccagcatggcagcaactgactggagtggccacccacacatcagtgcagcatgccaccgtgattcccgagaccatggcaggcacccagcagctggcggactggaggtaagcaggaaacccctctagggtgagtgggtgtgtctgggatgggaggcacgtccactgccaacacagggctgccaggctggcctgtacttcaattccccggtttgtagagagctttttaaagcttctaaaaatattgtgtggactatgagtgcagggtaacaagaagcaatttttaaataatataccaggatacaagaaaatcagtttcattaatttatgcttggttgtcatttccacccagaattcagttatgtcatttactcatcagtgtaattcaccagacttggttctggatgatgtttggtagtttctcagaattaaattctacgttcagaaaacaaaggtctgtcaccagtgaaagaatgcagaagagggtccccaaagccctaagcaattctagaaagtgttctgaagatgtttgagacgggggtactctggagtctatctgacctcccacgggatggcttgacagaatggggtttatttggaagggtaaatgctggcatgtttgctgagtgtgcctcttcagttaatagtcatatcttacagatcagagtctacttcccacacaccccagaggcgtccacctgactgcctgccagcacagcataccccctgcatctgtttccagaactctaccctgcccaactcatgatttcctcacagatgcgctcctctgttatttttatggctagatacccttgtaccttcccccraacaccaccacaatggccccttcaccagtgcagagccagatggcaaccctccaagttgtccccaactcctcatggccctattgggctatctctcattctgcacgaatatcaggacaggtcactcccctcaaccccctgacagcctccatatcacmcagggaacctcccacagttcttattctgacctacaaggctattgtgaattaagatctctccgagaaaagaagaaaggtggtgatataagcccccagtcagacccctactgcagcttcctccattcctccagttcattttctgcccagtacagagtacctgggcccttccccacagtcccactcacttcccttctggcaacgccctcatgccaccactccagcctgggcaacagagtgagactccatctcaaaccatgtagagctgagttcaatcctggctctgcatgacctggggcaagttaacctttatgcacctcagtttcttcttcaataaagtggggatagtaatgcctgcttcacaggattgttgggaggtttaaagtaagataaaatacaaagcacttggcctatatttaacatgcaccatcgcagtgcccggtacatgacaggcattaaataaacctgtcatcttccctccccactatcacatcggcccatgctcagcaagattgcctttcctcctccagctccttaggagcagccgagtggaaagctgtctgaccaactgggtttttttttttccctcgcccctttttctcctaaaagaccacacacatgacatattcctttttttcccttttgtctttcagcatttatagctcatctaatttcagaaatacacatacacttactaattcctacatattttcttattcctcctccctccttcctttcgttttgacatctcttacctagtgaccacaggagacatctaaagccagcatactctcttcctggtctctctccatttcatgtgtgagccaaagaacatctattattgtggctaacaaacagaagtaccagtgctaggcctgactcaaaagagaaagagtgccacctgtctacaggagaaagagctacaacaaaataaagaagccataatatcagtttcttggtcggatgcagtggctcacgtctgtaatcccagcactttgggaagccaaggcaggcagatcacctgaggtcaggagtttgagaccagcctggtcagcatggcgaaaccccgcctctactaaaaatacaaaaattagctgggcgtggcagtgcacgcctgtaatcccagctactcgggaggctgaggcaggagaatcgcttgaacccaggaggcagaggttgcagtgagccgagatcgcaccactgcactccagcctgggcaacagactgagactccatctcaaaaaaaaaaaaaaaaaaaaagaagccataatatgagtttctaaagtccatgtaaatgcccaaaaggcgctatcaaaatccctacaaaagtgttcatctacttcttttttcctgttcatccttttccccatgttgcaacaataggttcttataattttctaaaattcaaatgaattatcctttagctttgaattttattatgtgttaaatgagctcttatgggccaatctctgagtcagtcaccacctttaacatttctgtgggaaaacaaggctttaagcttcatacaacccaaattataagaattgtgaaacataacccgtttttaggatgagggctgccagtatttctatcatgactgttattaattttgatttaataccaactttatacttgtctagtcaaccttcagttaatctaattattcattcagcaagcgtgtaattaattgatcagctgctatatgcctgagcattgttccagccactgagggaattcaaaagaacattaacacttcctaacaccagaagcatatggctcccaggcttcaaagtttgtttttcacgtaaagtataatttcttctttaataaaatggtattgctaagatatcctgcctacgtcacagagtggaataaaataacccattgaagacactgtgtaaattccgctttttcttcatttaaaaattttttttataaaattaaggtgaaactttttttttttttttgagacagtgtctcgctctgtcacccaggctggagtgcagtggcacaatctcggctcatgcaacctctgcctcccaggcttaagtgatcctgccacctcagcctcccgagtagctgggcccataggtgcaccccaccatgcccagctaattttttgtatttctggtagaaagggggttttgccatgttgcccaggctggtctcaaactcttgagctcaagccgtctgccctcctcggtctcccagagtgctgggattacaggtgtgagccaccatacctggcctgtaaattctaaaatagaatattgttcaggataaacacctaggtgctcagggactttaaaagttggagggaatatttatctccagtccctagaacttaaaaacttggagccggtgtacttggcattcttcccacttgaaagtcctctttctcactcacagccagttatgtttcacctactccttatgagtagaagaaacccacccgttgagcacacrtggccaggytcatcccttcagcagctgcacagctagtgagataaccaactgcagtcagcgtttaattggggaggaagcttgatcttatagaggagctctacttttagaacacctctaaggcaccttgttgtcccggttscctttcagaaatacgcatgctcacggaagccattataatcccatcatgcagcagcctgcactattgacsggtcatgtgacccttccagcagcacagcccttaaatgtgggtgtggcccacgtgatgcggcagcagccaaccagcaccacctcctcccggaagagtaagcagcaccagtcatctgtgaggtaggtgrtgagagccaccctagggaagagaaatcccaggggatgtgagtgctaaagaaatgtagtttagggagtatcagcacccactctgaacatgggacagttgcatgggatgggggcactcctcttcctgcagtgactagcaaaacatcctgtaccacctggtttggcctagggtttgcaggaagcacttggtttaagaccgtggtaatagtgtagggatggatgcaatggaatcttgcagtgggcaagagagattgggctcaactccatacagcgtgggcgagtgaaaatttatagccaaggcagggttggggggtgtcggtggatgggaagttactaagaggaagcatcaggggtaagggagattctgcctaaactgacctaacaggattcttgctaatgacaggcccgggtgatcagatatcacacctggaggatgaggaacctcatcagatatcgagggtgatcagatatcagggatggtgggttcttgctaaactgacttagcaaggttttttgccaaaagtagattgtacagcagagtgcacagttagacctaggagaaggttcacaagcctgactaaagtttggtgaagcaaattatcttttgtcactttctacttgtctggagaacactcagcttcacctgaagtttcattttggaaacaatttaccataataattgttttaaaatattttaaaatgttgaagttgtttaaaaatgttttaaaaaatactaaagaaatgtgctttctttgtatctaagatcagaagtttaactgatttagcaccttgcttaaatagaagcaatagcttgtttaatcccagacactaaccagcagaacacaaatctttcccattccctttaaatccattctcatctcaatgaacactttgaaaaaatcaaggtcaacaaaaggctgcatgctgtatgattccatctatatggcatttcggaaaaggcaaaacatagagacagagatccgattagggcttgccagagaccagtaggagaggaggagattgactgcgaagaatcctgaggggaaaagctctaagtctggattgtagggggggttatgactgtgcatttgtcaaaactcatcaaacacttcaaagggagaaatgttgctatatgtcagttataccttaataaacctgactttttaaaaaatggagatttccaagccagagagagagagagagatcgtgtgactacaggattgctcctgcatctcttcctaatggcacagctttgaggtgcttaattgcttatttgcgataagtcaatcaagagaaatctggtatacaaaatgtctagtgattttggttttctgcttcctcatataagcagataccagaaactaggcctttttcttttcattcttattcaaaaattcatccaagggctgaagttgtcatcctccaagattccttatttgggtatttctgacaactcagggaaatttatctcagatcattggcagctttccagaacgcttttgtttggcagccttgtgacagctcacccatgtcattattagactgggtggcaacaaagtccactgtctcaatcctcatgggctgtcatgcccagcaaggtcacatggagcactactctgtcccaggactgagcttagcatctttgtggttcaccttggctgagtaggggcagtaagaacccttagcctcccaacctgtttagcaagtccctcctttttgtttactcaccacccagctgacttcatgaagcctcattgccagtacatttcaaratcgatataattatagtgaaaggtatgtatttgcttatttttaagaccaatgccttagcaaaacagtctgaaagaccagaagtctctcccttgttggtgatgtggccaggcatacttttccttaacaatgccaagtggagatactaaaaccattggtagtgaaaaacataatcttaaaattgtaatgtattagcaacgacaaatacataggtttatagtaagtacaaacaatggtacaatcatatcagtgaaacatattaccagtccctagaaggagcaagcaatgtatctggcactagctagataggaaaataaatccacctttattgaattattttcattttactgccatccctttagctagaaggtgctagaatctctaaagacatataaaagtctgagtttcattatacattgctgttagtctctcactgcatagatactacaggttgagcatccctaatccagaactccaaaattgtcccaaattcggaactttttgaggattgacatgatgccgtaagtggaaaattccacacctgacatgtggtctcagtcaaaactttgtttcatccagaaaattattataaaataatgtataaaatgacctcaggctatgtgtataaggtgtatatgaaacaaaagaattttgtgtttagacttgggtttcatccccaakatatctcattatgtatatgcaaatattccaaaatctgaaaacaaaaatccgaaacacttctggaccaagcatttcaggtaaaagatgttcaccctgtgccagagtcagtgaggatctaatagggaggggagaaagtatttttcccctaaagttaccaaaaatcacactggttaatttagtaaggaatttcaagttgatcaaaattaagattaaaagttctctttttaagagtgctttttcaaaactcttgcacttttccaaattttctattacaatttagactaatgcgcctcccatgaggctccacgaggcaaaatccagaaaaatcatttttaaggtttttagcaattatatgcacacaaatactttgatggtcatgttctttttccagaggaggaaagaaggaaaactgaaccactggtcaccaaggttaggtcctttagatcctgaaactcttaaggaatgaatgtttcagtagaataaccattagcaaggaaaccaaagcttgatgtggcaaacaccaattcttccaccacccccaaaacaagacttaagtacctttgaagggatgacacaagacagagctcagaagtagggccttgaccctgaaggcgagggggtgtgttggggcaaacacagctggaatcctggcatgacatctgctcctacaagacctgtagagcctggggcacaagagccccctccctgctccgaaagccctggctgctccctttgtcctgctgggagcaggcatgtagatccaaaccagagcccagagaaggcctgtgtagccgctcactgaatgatccctttcccagtcacagatggaggctcattgggcagccactgacgtgttttacagagatttggcaaagcaggtgtttctaggcaattgggctccttcgaaggagttgtggggcctgaccttcctctgtgtgagagtgtggttttctcattacagaaatgtctccacctgtgaggtgtcctcctctcaggccatcagctccccacagcgatccaagcgtgtcaaggagaacacacctccccgctgtgccatggtgcacagtagcccggcctgcagcacctcggtcacctgtgggtggggcgacgtggcctccagcaccacccgggaacggcagcggcagacaattgtcattcccgacactcccagccccacggtcagcgtcatcaccatcagcagtgacacggacgaggaggaggaacagaaacacgcccccaccaggtgagrcagtgccaccttagccttccaggaaggagccgggagggtttgcattgtgtgcagatctgaccatcttccatcatcaaacataaggatccctctcttctgacccttacagtttggttttgccatctactgtggtcctaaagttatttcaagggaatgtcaaacaggttttccataattgtttaaaaccaaaataatgtcgaatcatgttggtcttaaaagataattataggccctatacatttggggaacttgagaccataaaaatcgggcacacaatgccagtgtatttcatcctctgtaagtttaaaagtctctgcctcaagctagtgaatttattcccagttggtcaggatatttctctaacattgccttggctcactcagaatacgaagtaattgtccaattaatcagaaatttccctgtgtctgattaacctaatctttcaaaactgccagttggctcttcacccagagagcattactgtttatcccaaagtaataataattcattttagtctttgtgtgcttcctggggagagggaagaaatctttattatatttacaaaactactaaccctggcgccagagcctctttttctgtactgcccagccagacttcagcaaaatgtggtttttgtttgggccactcagctcaggttctgagcaacccctctagaacagttggcctcctggccttctgcatccctagagtgtggccttgtagagcccaaaatctcatggccccaccctgctggctcctttgcactggaaccgagagccagggaagggaggcctgcccctcccaggcccagcgctgccagtcagcacgcatcctgcagctggatatgaagcctaattcacaattaggctcgaattattaattcctgattggatgcaatgtaactaattagtaatcacaaatcctttgattagataataaattctcacatttgaaatcattacaaaatgtatagatagactgatgaaaacattctcattataactattcctgcataggacgttcccttccctctttataatgaagtccagtggttttagtttgtttctgggtggggttagtacatgtctcattcaagtgtcctcttcccaccaattaggtacagcctaattgtcattgtatttcagagaagaatgtagtggagcacttgtggccgtagcattgtgccaggtgtcagaggggacccaggtcaaaggtccaggcatagcactgaatactttggcagcccaggactgccttttactccccatctgcctagtccagaaatggcctcaggtccctttttgatgacagcctcaagttgagtgaatggtccattctccgcagtgcccccacaccaccacccaggaatactgtcggttcagtcctcacgtgggctcagcagtctcttcacaaaggggacggccctgcccagccccagactgaagcctggccttgagcagccacccacacgtgggtagccttggtcatcagaagggtccagcagccttgcccggccctttgccacaaatggaaaaaagcaaaagcaatttaaaatctgacaatcagctagattggaatctcattcctaacgtatgagatctgagttgacacagactctcaacatctgtgcccaggagagaattgaatagcgtgtctgagaaggaggatgagagagccgtctctccaccagtcagagagctgacagggctgagagtggaacgcaaagccagagcatgtccgtgcctctgcggcagcccctaaggcccccagaaagaaatgatagaaccgagaggctgggcagcagatgaggaccttcatgggaacaactcaaagaaacctgggagagagagccaggtgcacaggtgaggggcagccacagacagacagtagcagtggctactgagtcccacagcatcctgcagtgaagagtggcggggactgccagcctgccagggtcgtgaaaatgtgccggacacatgaggctgaatagggaagctgcagactgaggctagggagtcatccaaaaggcttcagctgtccacagttgtgactgggagctcccagaataatgttttctagagagatctaatggcaagtgccttagaaaatgtctttgcactcaagaaggtaggaaagtgtatttgagtctgagtaggataaaacagaaaccagtagctgttttatttatagagaaaccactgtgtaactgtgatcacattattgtgactacattttgggatcagaaaaaaaaaatgtggggaaatatgattacttgttcttagaagtcagaattatcataaaatttaacacagtcagtatttattggccccactagtgtaagatattatgctgggaactgcaggtgttacataaataaggtagacagtttgtgtcctcatgaggtttgcagggtaataaacaagacgaaacacatacaaatcattataacacaaaacacagtgtcagtcccataaaaatgagcaaagtaccatgggaactcaaagggaaaatagcttaagggaatagcaggggaggggggctttgaaggccaaaggtctggacaggtccacacagtagaggaggtgcggttgcaaattcaagtgaggtgattgatggggcagagcctccaaggcaagcgaacaggatcaagacccctgtgcaggagcttatccaaaaggggcttcaggatggaaagggggttggggagggatctccccttacatgggggtggtcagctttgtcaggagatactgaggggctcaaggggaagcatcagtcctgggaaaacaaggatgcacccccaagtgcagccacatggaggggtcacctggtccctctccagctgaagagcttccccagcccttctgtgtcccagctggagcgatggagaccttccctcctacacattgatcatccttgttctcgagcctgatttctccatgctgtgggcatgttgattcccaccttctgtgttcccagcctcgttttctatttgctacttaccccagtgccagtcctgtaactttgcctaaaatgctggttaattcccctaacatggctcagcctcagcttggcagccagagtcaggcagccgatgaccttcagagggatggcagtgcctccaccaccaaaggggcttttagacctgattgagggtgtcactaaacctctaggactagatgatatagcctagaatttttaaaagaaagccaatgcaaaatcattattcctgaccccacgtatgtggcactgttggttgcacagcagatggctggccagcagctccactcgtaagaactccagggcatgttggaggcagatgctgggagacactgagctaaagacaggagaatcatagcaaacatgcactgggtgttccacccgcactagctcctccatcatttgatggggcatgcaaggctgatatttctattcccatttgatagatgaagaaactgaggctcaggaaaggtaggtgactcacccaaattgatacaggttctaaatagcagaattgggactcaggtgccatgctcttgaagaaatgtcaaacttaataactggcaaaaataactgatttcagtcattcattcaatgaatacagattctatcctgctccctcctgtgactaccactatgccactgtgtgcaggtcaccatgccagggccatagggagtctagagtattgtccactgagccccctcttggtgctgggcgtttgtcagagtgctggagccatggcactgagaagggcggagtcagctctttttaaagtaagaagggcagggaagagccagggaactccttttcagtgaattactgttggactaggggactctggtcatggctagagaattggccaaaagataagacaaacagatattgttctgggtcccccaggattaagtagtagaactggtcttcttttaaatatttatagacaatttcgattagaaaagcatttaattgtctacacatactgaacaagccatcttttctctcctggactctcttgatccacgtctcctgatccagacccccctgctatctttaccttgtgttgaaatggtcttgtaaaggctgtagcatacaacctttagtcatgagggtaatttctttttttatttttgtaagaactagagacagtgtctcactatgttgcccaggctggtcttgaactcccaggctcaagcagttctcctgccttggcctcccaaagtgctgggattacaggtgtgagcctccatgcctggccgagagtaattttttaagtgtgtaaaccaaagtggttcacatcaactgatcatatagaaatgattttgtccagctccattattcattcacgcattcactcattcagttacctggatatttctggtaggtgggttgttctgcttaggtcatcaagtgtctcctgcaggctgcacttcactgtgcctgtgtaagcagccactgtttcagccgacgttaccaaaaatgaaaactttaagaaaattgattcataaatatcattcagtattttagatataaaaacagttacttagctcactcttaacatgtttatatataaaaaaaatttgacccgaaatgttttccttgtttatactaagttgaaagtctagagaaatcattatagataaagcaaggttagaaaactgataaactgcagctcaaattactttggcctgaaaaattaacatccacttaacagagggagcaaaaaccacacacactcatttattattgcatgggcaaaaagcccaaagtgggattagcctccattgctacctataaccatgtagcttgctccatcctgccattggttgagaagctgctacagccagcctcctgccatgctcatggagacgtgggaatcaggcttgagtgaaggaacaaaggaacccagacacacagtgccatttgaaggaactttggtgtctctccattttgagtacaatacatccccagttgaaaaatatttcagtcatgtgactcatctcaagaggtgatggtaggatcttttgtccagctgacttcgccacaccctctttacagggctccatttaagacactccagtgggctgagtagagtggctcaggggtgtattttgaagaagagacacttcaccctactgtccccagctgctgtcacattacaaagctgtcactgatatgccacagcttcctggtttgctccttgctttccacagggaagaaggaggaagaggggtggcagagggttggataccatagggcagagcggtgctcagtggatagactgaaggtgatgaggaaagatgagtcaaaactcccaggccagttgggaagagagagactggacttcagaagaagatggaaggagagcaaacacttccttccgctgcatctgatgggacaaggacgaggtgactactcatggctacttctgcgaccctgtttctgatttctctagaaagtagtcatgtaaaaatgatcttaagggtgatatatgtgtatttatatacacacacgtgtagacatagacatagacataaatatgcagataatacaatttgaaaggaggagccaggcatggtggctcacacctggaatcccagcacttggggaggccaaggtgccaggatcacttgaggccaagagtttgagaccaacctgggcaatatagcaagaccctgtctctacaaaaaatttttttaaattccccaggcacagtggtacgtgcctgtagtcccagctacttgggaagctgagatgggaggattgcttccgcccaggagttcgaggctgcaatgagctatgctcataacacgatactgcagtctggatgacagagtgagaccctgtctctaaaaataataataataatttgaatggaatgtatgtgccatattaaaatgaagattttttttttctctctaatgactctaagtcagcagctatcaggaaggagcatactggtctggaggcacactggaattaccagcgtgagccactgtgcccagccaaaagtagtcatattctttaccacatcatcttgccatgatgattaaaggagataaacatataaagcactttaagctgtagttagtatgcatccaataaatgttacctgtacttaataatcagcatcatagtaatagaacacatagcattgactatgaaatcagaagggtaaaagaagttattggaggagatgagttttgaccctggtcttgaaggatgaaattgactcagattagcaaatagaaatcagagacacattccagataagaccctacagggaaggggtcacaggttatatctgatcttctgccagtgctttctcctttagggatttctttactttttagctccttatttattttcatcattttraaatgatgaaaattatctattgccatgacaacataatgcaattgtgaactctgacagctttgttctttattcagaagtgatgttcttccaaggccatttcagcaaatatttctcactctgcccctatcgctatctctctcacttgcattaaccaactcataatgggattgataagctgtcaataataactagacgcaatcatggaatgaatcccagtagtatcgatagatacgagcctaaagaatctgccgtagtcatctgaaatgtgtgctcatttctaaagtgactcatttaacagcttcccattagttctctaatctgcatagtgtgttcaggtagagcgcagagctttctaacaatggaagagatgaaaaacagctagcaaatgaattcaccttctgcaaataaatgtgtcacttgtaaatccaaaaaggtaggcaaatcagcatcaagctgtgccgtacatatttgctcattaagccaggggctccccagctacaacaaagggatgggacctgggaagagtttataaaggttttatcccacactccttgtagataattagacactgacatgcagattcttcagtctcttcagtgggaggctcactacctgttgggtttccatcaaggagatggccctcagttctcacaggtcacccacgccaagctgtcagctctcacaagactcatgccagaaagccattcttcagtgacaagaagctcagtgactcatgaagtggctgttgtgtcttgagatagttctagttgttagaaaattcttattcatattaagctgaagcttctccacaatttccacatttgagtgaagagctccaaatatgcccaatttgaattttactcgagggcagattacagttttgccaaaattagtgtgtgtttttgtctttttgttgttttttttttttttaaatgctcattttctaaactactcagatcctaaggaagatatgatcagcaagaactggccagatctgggtctataggtaaggtacatctgctaaaaggatctctttcctctccagattagggctagaccattcctattttagaatgtctctaggaatctttcagagatcctcataatggctcctttaatgccatgagtaatctctctcaatgaatttcagagcagattggagctggatggatgttacaggttatccaggccactgtccagagccacaccagtaaaggaacagcagagctaggactgcagtgccagctcccaggacacatttgggagtcagcctccatcctcacctggggtcctccacccacagaatgggcacctgcaacagaacatgtctgcgtttcatgagatgaccagaggcatgttcatcattcaggagtagctgtgcccgaagctgagagtgaagggcagggcagcgccatctcctcacctcccctcgggagccagcagctgctcccagtcatggctcccagctcttcccctggccctcagagtacttcgaaacagtgtgaggtgggaggagttcccttattacacaagagactgcagcagaccagttgtttccctttactcccccgcattcatcccagaagacagctgcaggtttctctgcccttgtcttcttaaggcagctctccttccctcctgctccctcctcgtcctcagcctccagcatctccctgctttcagatccctcctccctacctcctagctcagagacctcctagagtcccacttcctttttttgcttaatttatatttataaaatatttcgagatattcttttttgttgttattggtagacagcaatcttttttttttttttttaagacagtctggctgtgtcaccccgactggattgtagtggtgtgatctcagctcactacaacctcacctcctgggttcaagcaattctcccacctcagcctcccaagaagctaggattacagtcatgtgccaccacacccaggattgttttttgtttttttgtttttttttttcagcagggggccagcgcggtgtgggggcagagtctcactctgtcacccaggctagagtgtggtggtgtgatctctgctcactgtaacctccacctcccgggttcaagtgattctcctgcctcagcctccctagtagctgggattacaggtgcacaccaccacgcctggctaatttttgtatttttagtagagacggggttttgcaatgttggccaggctggtgtcgaactcctgacctcaagtgatccgcccacctcggcctcccaaagttctgggattacaggtgtgagccactgcacccagcagatttcttatttttagtagagacaaggtttcatcatgttggccaggctggtcttaaactcctagcctcaaatgatctgcctgccttgacctccccaagtgctaattacaggtgtcagccaccgtacctaactatttttatttatttatttattttctttagagtgtaggtctctttgtcacccacactggagtgcagtgacacgaccacagctcactgcagcctcaaactcctgggctcaagccatcttcctgcctcagtctcccgagcagctaggactataggtgcacaccaccatgcctagctaatgtttttatttttgtagaggtgggatctcactgtgttgcccaggctgctctcaaacttctggcctcaagcgctgggattacaggggtgagctaccgcacctagcttccactttgtaattcttgtactggatctcagtgccctcccaccctctgggtgtctctactgagccctgatgtacagcggcgaagtgcccaagactctgaatctcttttgctttttttttttttttttttttttttgagacacagtcttgctctgtcgcccaggctggagtacaatggtgcaatcttggctcactgcaaactccacctcctgggttcaagcgattctactgcctcaggctctgagtagctgggattgcaggccccaccaccactcccggctaatttttggtatttttagtagagacggattttcaccatgttggtcaggctgatctcaaacttgtgacctcaggtgatccacccacctcggcctcccaaagtgctgggattacaggtatgagccacctcacccagcctggactttgtttttgatggagatagaattcatgtactgtactgtatagttcacccgttgaatgtgtacaattcagtggttttagtctgttaatttttaattgtggtaaaatataaaatttgccatttcaaccatttttaagtgtaaattcagtgacattaattatattcataatgctgtatagccatcaccgttatctattttcagaacttttccactaccccaaccaaaaactataccattaatcagtaacttcccactctcctctcccctagcccccaacctctggtaacctctaatgtattttctgtctgtatgaatttgcctgttctagatatttcatatatgtagactcaaacaaactatttgtccttttgtgtctggtttatttcatttaatattttcgaggttcatccatattgtagcatgtatcagaactttttttttttggagacagggtttcactctgacacccaggctggagtgcagtggtgtgatcatagctcactgcagcctcaaactcctgggctcccacctcagcctcccaaacagctgggactacaggcatgcaccaccatactttgcttatttttttaattgtttgtagagattggctcttactgtgttgcccaggctggtcttgaacccccagcctcaagcaatcctcccacctcagcctcccaaagcaccgagattacaggcatgagccacccctcccagcattcattcattttcatgactgaatagtattccactgtatggatacaccatattttctattcattcaccagctgatggacactcgggtcgtttctacctcttggtattttgaatagtgctgcagtgaacattggcttacatgtatctgagtacctgtttccaatcctttgagaatgtacttaggaatggaattgctatagggtaactctgtgtttagctttttgaggaacaagcatatggacatttcacatttaaactgtcataactgggaggtgtgggtctttattaattaaaatttatctactttaagttaacatgaagagccataaatatatgcaaccaattcattcctcaccttcttctgagttcttaacaattatcatctgtacgattcatctgacagttaatcacggaggctttgtgacatccattattctctctaactggttattttaaagcttttactatttaacttgtcatgttgttatacagtcctccactgagattttaatctcctcgagggcagagacacatatttctttgtataggtattccctgtagtaccccgcgtagatctccgagatatcatgagttttaattttctttgatttcaatcttctggtttattcataaactagaaaaaaggaaacttttccagcaagtccttaccctgatagaattctctttgcctaaataagttttttgcaaacctgttttcacatgttaactaaggtaacacaacttgtaagaagaagaagaatagcagctattatggaatacttaccatgtgttgtgtatcattgaaagcacttgtattttctcacttagttctcaaaacaagcctatgatataggtacaattattacctaccttttactgatgaggccactgaatcactgagaggttaaatagctgcccaccgccctgtcaccagcacatgccgaagttagacagctgactccaaggttcgtgttctcacccacgaacacggttaggcaccctgaaccagagaggacagtgtccagccactggaagaattatccagcctagatgtcaggagcgctgggcgttggggagcagggccagcgcctcctggggactgcaccccccagatcccccagccttctgtagctcagcagacaggctctgcttctgtccctsctgcctggctgctgtgggctctggaatttgcccacttccctgctgcctctagggtggtggagatccatcatgggaagagcctggcctggctgtgtggcctcaarcaagatacccgggaggtggctgtgactctatgaggctcygtaaataccagctgcttctctcatccaattagctggaaactgaccagttgcctaggcaatttttatttcttaaaaataaatgatcaatatataaaaatagatgcacattcattttaaagtcttaaataagcacacaataaacaataaatttcacatccatcatgccagcagcctctcactgagtttgaagacaaacagaagtagttcccaaagtaaccacactaacttaaatatctctgaacaaacatgccggccaagagctatccaaagccagtgcctccctattgtatgaagttccacatataagatgaaggccagggcttcagagtggctttcacacagcatcaacctggcaggggccttcccaccaggccccggtgcaataccatctcccccgatcccttggcccaggcagtggaaaagctgcaggtgagcctggctcctgaaaaggggactgcagaggtcgtagtggcctgcacacagcccacagagcacactcaaagtaaggagaggcagagggtgtcaactctagctctgcgttctctgcagcatgtctgcactgtgctgtgtgcatgcagccccctcagagcctcacgctgcatcccattggacattctgctccctcctgcataagctttgccaggccgcaggcaccaaacctaagcttatgacattcttctcccagcgaggtttactcctaacccaggtccccaggttgctgggttcttgctggttctctccttgctcagatgtcccattctggcaggcccacgggggttgtacccagctctgggctgcaggtgcctcccctgcagctctgctgagctctgctgcacaggaagagcccaggccagcccggaagcatctcactccctagtttccagaagcccctgtgggtccagcaccagccccttctccatgtcttcacatgtccccctgctgccggctacacaggggacttttgcatgcccagtctccctatgggggttagggagggcaaaagccctgttcctgccctctcccctctgcctccctcccctgccccagggcatgaagtgctagttgggtgtctcacctcayggccttctcccacctctgacttctccctttgcattttcagcactgtctccaagcaaagaaaaaacgtcatcagctgtgtcacagtccacgactccccctactccgactcctccagcaacaccagcccctactccgtgcagcagcgtgctgggcacaacaatgccaatgcctttgacaccaaggggagcctggagaatcactgcacggggaacccccgaaccatcatcgtgccacccctgaaaacccaggccagcgaagtattggtggagtgtgatagcctggtgccaggtaatttggggccaggacagggmaggaacctctccctggagagtggttttcctgcttttctgctgctagaaatgttgctgtatgggagctagtacaatagaaagtgcccagtgactgcaggcgacccttaccgaggattttattcaagtatccaggggaggcttctgctgaacagcacattgtataagcagcgttttccttctttaatcctgtaatcaatacctctctgcctttacaatggctctgcttccaactaggttgattaatagaaaataaaagcctcctggttctttatgcctgagcctggaagaatacctggtctggggagttcctggctgacatctagcaccactctctgccaggaagccctggtggtcagatgggcttcttgtgtaggaagaacctcctccgagtcttgctagggaagggtgaaattggcccctctcagcccctcctcggaatcagctgctgggcggcgagaccaagccatgtgtgtttctctgctcatgcactgctatcttcagaggactcctcctgtcccgcgaaggcttgtcttgaaaattgggccctggaataaaggctgagaacgtaaccttctgaataaactcagtggctcactgtagattttgtagcatctatttagcgtttcccttgctcatgctcacagtggaagaatgtggggactaaaccagaagaagtctgcgcgtcccgctattccgccacaaaccacacccaagccagcctgcacctgcgtggcggcataactgaaaagggaaggaaagggaacgccaggaagcttttgtctagatgtgagaagctgttacttctcaggaggacctcatgtctgtcacctgaggtcgctacaggaaactggggactcttcctgggtggtgaccacatgtgagacccagtgggcgcaggccccattcaggggctgccactgaggatgaagcgtagaggcaggatggggtcattagggcttttccagcccagtgcctcaggccagcctgcacggtgagggtcagagccctggcacgctctcccaagagctcatggcattgcctgggatggggccccttttgctgagaggctctgcctaaaggggagatggtgacagccacagssttgcgctccccgccacctacttcctaacccaaggcagcatcaccctttccgacatttgcggcgaagctctttttccctgactttggagttaccccagctacctttcctctgaagaaatgcttgtgaaatgcagcttctcagcaccctgctaaaacgtctccttttgcaagtcctggtctgtccccaacagtaccgtcatgacgatgcagcctccaagcagctttgacatcagagccagcgctcctgtgggcctgggggcagggggtcgtggtgcctacagcgagaaagacacacaagcagcacgcagctcgcgctgtgctctctcggaagaaggagaccttaccttcaggaaaaatagagccacagcagtgccacatgccagggcgagcattctggttgacaggggccaggctgtacttgctgctagggtctggtgacctggggccagagaagcaggctggagccctcccaaaattaggcatctctgtgaggaaaagaaaatgaagctgtcccttccacaaggctacaaggacatctctctccaaaaaccatctttttccacccgggcaaatgttttggtggaaaccctgccaggaagcaacattctctagcagtaaccaaagggccctgggaggcacccgaagtcattcccgggagccaggattccttaaagagagctgcatacttttcagctcagctatcctttaaatattgtttaagggtatatgcagcacacatttttaagtttaaatatttgcaaaggatagaatttgtcttgtatcattatttaagttccttaaatatatgtttgtgcaaacctcgaagctgcagactgaactcataccatatgcgggagtgctgcctgtgccctcacgagcaggggcattcctcgtctggtgcctgcccttccccagccagtggcgttcaataccgatacacacctttagctgtagaacccacctaggcttggaaaagtcgggaaagcagccttcctcagctccctggagcccagtgatgcatacaggccaaggtacagccagttaacagctcccccagctacagcacccagagcatgggagagttcagcgctcccccagccctcttaggccaggatatgcactgctgtttccccgccatactcaccccctcctgtggctctcagtctttcagtccttctcaggttggggttagtgaagtttcttttggaagcaacagaatgaactctacactggcttaagacaaacaacttattggaaggatgcagggctaagggaaagttcaacaactaagtcccaggcagggcaggagccagaaccccggggacctgagccctgggggccagatgcctgctctctgaagctgccttcacccgactcaccgacagcagctcccaggctcctggtgtcccatttccaggagaccagaattgattgtcccagcttggagagacacttgtcgttgcttttttttccggagaggagtctcgctgtgtcacccaggctggagtgcagtggcgcgatctcggcttactgcaacctctacttcccgggttcaagcaattctgctgtctcagcctcccaaatagctgggactaccggcatgcaccaccacgcccggctaactttttgtatttcggtagagatggggtttcaccgcgttagccaggctggtctcgaactcctgagttcaggcaatccacccgcctcagcctcccaaagtgmtgggattacaggcataagccaccatgcccggccaagacacctttttttgagcctcagctttaaccaggagacagagttcaataatgacaccaacaatagctaacactaagtacgtaaatgccagatactcaatacttaagcccttagatgccagatactaagcattctacacttgttaactcatttaatcctcatcacagccctacatggagctgccatgatcttcccagtttcccaggttaaaaatggaggcacagaggggttgaccagccttcccagagccatgtggctgggcctcccagaggtctggccctggagcttatctgtgctgtaagcacccctgccaactcacctagtgtagacagggccactgtggctgttctcaggacaggagatcacggagagtagctggacaaggcatgactggaaaactctagaatgtttcctcactgttccaaagtatacattaggaggttgaccagcattagcccattgtcgctttgtccatcgccacaggaggagttactgttatactttaatctcttggtccccttcaggacgtcctcccttactcggggctctcgtcctctgagagcttggcaagctctgactcaacccccatctcctgtccccatgatgatggtagcatcagggctgcattacgcccatttcatctaacattccctaaccccttcactgatccctcgagctcagtgtttctccctcaaatatcattaccacaaaatgcccaggaagttggaatagaagaagtaggtgacatgcacagcggggcccagcacagtctgtgacccgccgcagagcaagaaggaggcttcccccaacacagccacattgtggctgcagaaggcaagaagcaggctctgcagagccaatgtttgcagctttctatttttcttttctacattgagtccacaaaaatccctccatccctcaggttttgggggacctttgagtctaatgggtttggcttgggcacagtgttgggtcgcaaggccctgattcccaaatgcaggtctgttcagccagggccaggaggctctggtgtcctgggaagcttgctaagaatactgattccggatctcccgtacctactcgagggattccgattcagtggatggggtgggaggggccccaggcgcaaatgcacggttggatttgcggcctctgaatagcacccactgcccccatccccactgcggcagctcacccttcacttagggcagggggctctgagttttgrggtcaggaaggcccccttccacctgtagtgagcaccagaaacttctgtccccaggtttccggttttcctttgaccttcttgagaggctgagacctctagaggcacatttctctcttcatcaacaattaatcagcattctttcttgctggctccagcctcaggcgtctcctctttgactttgatttcatcgccctgggatttgtaatagaattgatccaaycgaattcaatcaagggcctggtcgtttccatgcatggctcattaatatttagcacctctgccccaagaatgaccagattctctccttttacactaaccacccataggatacttcattgagacagtatgagccttccagttcacctaagatgctcaggccccaaaatgaatgctccgaattcttgcttctgaacgtgaggtgtagatctgtctttggacatcttgcaatatgttcttgctgcctctcccttcatatgaaacattttacctgattcgtcctttgaacacccctactttgggcaccttcctcaaatgtggactgctttagagttggggctctgtggaacaatagcaccgyattttggcgaatgactggattccctggccaaagctctttcccatactcagttatttcatctttcctctcctagggcttccttacgcttttcagtgtcaccaggcagtaatcctaaagtccagcaaggtttccaaaaaatataaatcacagaaatatagctgtccggcacggtggctcacgcctataatcccagcactttgggaggccaagggtggggcagatcacctgagatcaggagttcgagaccagcctggccaacatggcaaaaccccatctctactaaaaaatacaaaaaatagccaggtttggtggcacacacctgtaatcccagctactcggaaggctgaggctggaggatcacttgaacctgggaggcagaggttgcagtgagtcgagattgcaccactgcactccaacctgagcgacagagcaagactccacctcaaaataaaaaaaggaatttagctgtcctccatagaaagtcaaggtgataaaaatatttcaagcacattccagaaacttaatgaagaaaaataactgagtacaagatacaacacatgaagtgctcaaatcaacaaaggatggcggaaaggaggttactcattacctttctctctwaaaatgcgctccctttttcctgggcaaagtcttcctcagtctggttcttagactaagaatcagtaccatggctgggcacagtggctcacgcctgtaatcccaacactttgggaggctgaggcaggcaaatcacttgaggtcaggagttcacgaccagcctggctaacatggtcaaactctgtctctaccaaaaatacaaaaattagcagctgggcgcggtggctcatgcctataatcccagcagtttgggaggccaaggcaggtggatcacaaggtcaggaattcgagaccagcctggccaatatggtgaaaccccgtctctactaaaaatacaaaaattagctgggtgtggcagtgggcgcctgtagtcccagctactcgggaggctgaggcaggagaatcacttgaacccgggaggcggaggctgcagtgagctgagatcacgccaccgtactccagcctgggcgacagagcgagactctgtctcaaaaaaaaaattagctgggcgtggtggtgcatgcctgtaatcccagctacttgggaggttgaggcacgagaatcacttaaacctgggaggcagaggttgcagtgagccaagatcacaccactgcgctccagcctgggagacagagcaagactccatctcaaaaaaaaaaatcagtattgtttctgtgcacatctcaccccagcaggactggttgcccaaggaggcaggacagcccccagccccagcgccaggctcttgttcattccctggtctgccctgcccttcttggtgggggaccatctgcctgtctttccacctggaagatgttttcttctccattaactctactgttctttagcgtttaaggaacagaagcaatgcttgttgtaactatggtttctaactatacaacacaaaccacacagtcttcaggctgctttgtcgtagccttcacttactaaacccctctttttctgcttccgttgtcattgaagttagagaaaggtatctggaattttctgcctcccacactttcctaggccattatgcagtttgctcctaaagaagcccagtgttggcccagcgcggtggctcacgcctgtaatcccagcactttgggaggccaagggcaggtggatcacctgaggtcaggagtttgagaccagcctggccaacatggtgaaaccctgtctctactaaaaatacaaaaaagttagccaggcgtggtgccgggtgcctgtaatcccagctacttgggaggctgaggcaggagaatcacttgaacctgagaggcagaggttgcagtgagccgagatcgcaccattgcactccagcctgggcaacaagagtgaaactccatctcaaaaaaaaaaaaaaaaaaaaaaaaaggaagcccagtatcttctcactagtctgggtctgtttgttgcttttgccattacaaaagtgcttgcatttaatgaatggctatgactggtgcatctgggtgcatttgattggaaatttcatttaggtgtgtattaatactgcactgtgtgttaggcagccctctcctggaggagagctgaggcacagggacatggggggctagtaaagcatctcttctgcttttatcaaggggtgatggtcctgtctgcagaactccccaagctggggtggggagatggcccccactcggcagcagagctcccgccctctggggctcttgcccctgctgggctggacactcatgccctgtcctgccctgtcctgttccatcagccttcttggacttgggctgtccctgactgtcagcgtcttcatctggtttatcctctggcctcgccacctcatctgcgtgatctgtgatgcctcctccttattcacgctctcagccttctccctgccacccccgtccctggtggtacacagtcaccgtccttagcacagggcaggagctcagaaaatacttggatgagttaaaaccactgggctctgaagaggctcctggctcccctggctctctggctgggtaacatggaagccatccagctcagggtttaacccacctctctcagagcccctggctactcagagcgtggtcccccaagcagcagcactggcaccccctgggagcttgtcagaaatgcaggtgctcgggccccccagagctgctggccagagtctgcactgaacaagatgcaggaattacatttgagaactgttgatggagccacctgctgaccatgaggtcacctctggagggttgcagtgttttttccactcttcagcccccttggcaataacatggaggcagttttgtgcttggccatgtttggctcacagggccattccccggatgatttagtctcatcctgcctagaggcaggtaactggaccaggtgactctgagggttattttagcttctagtagtttattaggtcccaccacagacactgtctcctctgatactcatagtcacccatggtggggaccaagcagggatcctgtcttagtctattttgtgttgctgtaacagagtacctgagactgggtaatttataatcaatagaagtttatttggctcacgattctgaagactggaagtccaagaacaggatgccagcatctggcaaggacctttgtgctgcatcttcctagcacaggaggcagaaggacaaaagagcatgagggtgagggggccagacttgttttcatcaaaaaagccaatctctcaatagctaacccactcccgagataatattaatgcactgatgaactcatacactcatgagggctctgccctcaggacctaacatcccttactggccccaccctaaacacttgcactggggactaagtttctaacacaagaactttggggaacacattcaaattatagcagatctctcctacccattttccagatgctgaaartaacacctcccagaggaacggcactgggcctggccttaggccaccagcccaccttgcctctcctgattcttttccgctttcccttgcttcattccctcatgcagccccgaccaccctcccagccgagggagtgagccagagccccactgcatccagagtcaaggcaaagtcctagtgggtccgggggagatgaggctgatttgttactgcccggcctcaggcacatgtttcttcctggaagaccactgttctctggtggggtagcatcttctgggcagctgggaccctgccactgatctgacctctttctcctcccgccrcagtcaacaccagtcaccactcgtcctcctacaagtccaagtcctccagcaacgtgacctccaccagcggtcactcttcagggagctcatctggagccatcacctaccggcagcagcggccgggccyccacttccagcagcagcagccactcaatctcagccaggtaagccccacagctggcgccccaggccaggcagggcccccatcccctcatccttccgcttcagagaggattgctgtggcggcccctcacccacctcacagggctgcagtcctggccacgggtggcagcacatgcccttggtgacctctggtggctttttctaccacaggtcacccttggggaagttgatatcaccagtgcacagagtgctggcccaaagcaaagcgacttgtctaatgttacaaagcccttagtgacatggtgccagagcttaaaaataggatggcccacatactgctgtttcaacccagcaaagggtagagcactgtgtcccggccctgtcggcctgggacatcagggacagacctgcatccgactcattgcagggagggcccgcacaccacagcccccaagtcaagggtaagatttgtcccaggacctggaggaaggggggtgggttgaggtgaaatgtgagtgacctgagtttctgtgggtgcagggctgtctgtgtcaagggctcggcatcaggcctgactcacgtggtggactcagggccctgtttctctagaaacaaagtgagataaatggggtgtttgtgttcagagcccctcatctgaagtgctgccccaggtcatcagtggagcccgtgtctctgtcacgtgacttaggttcaccaggtagaagagggctattttatttggactgacagaacttcaaacagcaacgcttctgagagccaactttttttttttaagacagggtcttgttctgtcacccaggctcaagtgcagtggcactgtcatggctctcactgcagcctctgcctcctggactcaagtaatcctccaccttagcctcccgagtagctgagactacaggcatgagccaccacacccagctaattttcaaaattttttgtagagatgttgtgagakccaataattttgagaacaagattttacagtgagtaagaaagcaactgctgctcaaagagaktgtcctggccgggtgcggtggctcacgcctgtagtcccagcttctcgggagcccaaggcggggggatcattctaggccaggagttcaaggctacagtgagctaggttcatgccactgcactccagcctggggcatcctgatacttcacagcttctgtacgtccttgggagaaatatgttctcctataactttgcagctggctttatccgtgtatcatcccagcccagtgagtggcaggccaagtcgggattttctcagtccaagtaaattttttttttttttttgagacagagtttcactctgtcacccaggctggagtgcactcgcgtgatctcagctcactgcaacctctacctcccaggttcaagtgattcttgtgcctcagcccaccgaatagctgggactacagacaaggcacgtgccaccrtgcccggctaatttttttgtattttagtagagacggggtttcaccatattggccaggctggtctcgaactctagacctcaggtgatccgcccacctctgcctcccaaagtgctgagattacaggcgtgagccactgcgccaggtcccaagtaaatttttactttctcaacacacagagggaagccccttctattacttctggagtctttcccttctcttcctcctccctgccctcctgcccctcctcccattccttcctccccatgtgtcggcccctgacgtctctcttggtgcctctcctccccaggctcagcagcacatcaccacggaccgcactgggagccaccgaaggcagcaggcctacatcactcccaccatggcccaggctccgtactccttcccgcacaacagccccagccacggcactgtgcacccgcatctggctgcagccgctgccgctgcccacctccccacccagccccacctctacacctacactgcgccggcggccctgggctccaccggcaccgtggcccacctggtggcctcgcaaggctctgcgcgccacaccgtgcagcacactgcctacccagccagcatcgtccaccaggtccccgtgagcatgggcccccgggtcctgccctcgcccaccatccacccgagtcagtatccagcccaatttgcccaccagacctacatcagcgcctcgccagcctccaccgtctacactggatacccactgagccccgccaaggtcaaccagtacccttacatataaacactggaggggagggagggagggagggagggagagaatggcccgagggaggagggagagaaggagggaggcgctcctgggaccgtgggcgctggccttttatactgaagatgccgcacacaaacaatgcaaacggggcaggggcggggggggggggggcagagggcagggggacgggtcgggacaccagtgaaacttgaaccgggaagtgggaggacgtagagcagagaagagaacatttttaaaaggaagggattaaagagggtgggaaatctatggtttttattttaaaaaagaaaaaggaaaaaaaaaaagtcaataacaaaaaacccagctcaagaacccattctacgccaaactggaaaggagaagagagcaacaggaagattccagaaacggggggccccagtttttgaagaactttatgaacttttcaaagattattttcatatggcagcaagtgatacggaagactgctgtcagggacacctgatatggaaatcaaatagatttttaattaattgaacataagatttagggatttttccagaactcgaaagggtcaacagccctccagaatgtcgggctgcagcctgaggaggctgatgtttggagctggtgtgggattggcgaagcccagtccgggctccctagtcaggaaagacgggggacggccaggctgctggaaggcccccgggggcgcggggcgagttttctttttctgagcactctggataaatccctaagcaacgttgtttctcaaatgtcattaataatgtgtgttgcaaactttaggtttttttcttttctgaaaatgtattttctctttgaatccacccctagtcgcgtagcgtagggctagcggtcgtcacagacaccctagtagaatgtagcactcagcacccttgtctcctaccttgtgttcaactccaatgataccaatagaatattcctcaatgtaattgcacaaaaaaaagcgatataacataggcatgtaaccaatgtggcggtgcaggtgtgcgggtgagcgagcacgtgtgggtgtgcacgcgccgccctccccgcgtggccctcggcgccgccaccctagctggcgcagtcttgacactgcatccttccctcctagtgccttaccgagcgacagacgcggcgtgagggtttacttccactggtactccaagaaactgaggctagtcagacacaatctcagctcttctgttgtgctgttgtaacagtttacgctggccttttttttttctttttctttttctttttaaaatgttaatgcccgttgtctttcctgggctgtttgctagcggaaggatgccagggaagccagcaggagctaggagagagtccgtggatctcgaaagaaatatgggagacagatgcccggcgggtgcgtctggagatggggacggcgggagttgagttgtggcagtagttgagttgtaatttgtgggcggaggcccagagagactccccacccttcacccctgccccactctgtccccagttccgccatttgtgaggccagaggtttccggactgttggcctcgccaggcagccgtctcccgccccaggcggcatcccccagtccctcccgcctccacgagagcctggagctctcagcctcgcccggggctccactctctcctccggctccctgggctgttttgctctaacgatcttgccagatccctccctctgtagacaaccaccaacctctgtttgctgttgaattctctcctcacattacccaggtctgctcaagacatgattttggttttggtttctgagggttctagtgggcagaaggttggagggacacttatgagggtggccgggggtctgacgctgcactttggaaaaactcacacagttgaatttccaaagaaatctgccctttgccctctttgcacctttgatacattctggaagttttctcaggctttggacacttctggggatggaggtgtggagaagtggggagttccctctcttcatagtaaataactctgaaatatgtgaatgtgaatggcaggagaatctggccaaggatggggccgaaaagggtggttctaattgtttgcttctgatgttgagtctttagctgaccccacaggcaggtttccaaggtgcaaagagatctttcccgagtcagcggccccatcctcatcctccctccctttacttcctcactgtgcagtctccctcaaggatctactgtgaaaggtgtgtttgtagtgatatccaacctaactcagtaacgaagtcgttacttagctcttagctgtgaaataactctggaaacttccccaccccaaccataaattcttacttataaagaaacaggtccccaaactggaaacagcttagtccaggcctcagcgagaaggaaggacaccatgactgctccatgctgggcacagccgggcagtcttgccaagtgcctgctggaggctgtgccggcaagaggcctgcagcaaggagattcccttccctcgggccattatcaatactgtctttatctggaggtggggaagcgcagccctctgagacagcaggacaatggtcagttcagagagggtgagggcagcaaacgcttcagaggacacagaagccagaggacccccccccgccccacagctgggtcagcctggaaaatccatctattagggactttttggcagccagatggcagcaatagcccattaggtctcatcccgagttccaagtcttggctgcaaatgagcctcagttcgccttactggagagcacccccagattcctgggcacagttcatttccagccctttctagatctgatcttttagggggaaagacagcttaaaatgttcttttcattttaaagaaaattattctgtctgcttaagttggaggctacttactctttcacctgacattttctttccttttattcttccagatcaggaatgaaatttccatgctgctcataaagataatattattgtactaattatttttattaccattgtaattatgatcattatgttgatattttagtcagggttttaaatgcacatttattccaagtatctttgtgttttctctttaatatttaaacttattctctctgtgagtatataagtagactggagggacatccagatgtccagttttgtcaggcaaaaaaaaaaaggaaagacttaggaagtaggaaaattgtttctgtcatctctatcccaacaagagacgtcaagaaagatccaccacagaacaaaagtttaaagaagaatcaaagccttgattgggcttctgacaacatggtcaccatcaaggttgtcattttctagatcccagaggcctgggatgcgacgtcaggtggcatctcatgggctcggggaatgtcgagtcactgactgtccagcccttagccagcttctctcccacatcctcagagctctcctgtgcttctgaaatctgttaactaaatctttggcttgcctctggtatttaagcaagaaaattccctcccagaggtgaccccatccgcttccccacaatccatccttttgccatcggcgcacctggggcgtggcttaggttcttcaatgcagggacatttgccccctcccagaagctgctgggcacagtgaggtggcgtaagagtgactggcaggtggtaccttccccaggaaatttcaccacaccacccagttcctcagcctgccccctccccctgtgatgcatgcccccagcacccaattctagccagctggaagtgggtggagggacagcaggaggccagagaaaccctgaacaaagctgggcggctgctcaggcatcacaggctgcaccccctctgaaagcatccccactgggctccggccacatcttcagtgcactgtgctgtgtgcgctgggtgctcacacgctgtccccagacccacaaagtgctaggccccagttgaagaaaggggtgaaatagccagcttcaccgaagggaagggaagggaagtattgggcgatgccagccccacagacgctcagcaaacattagtgcacattctcctagtcctcacccaatggcctcctctacccccatgcatggagctgccacatcagaagccccaagagaagctccctgcaggagaggccagctccctggatgcccaattgcatacctggccgaatctgccattgagtcaccttagcaaataggctgctgtcactaggaccaagctctcaagcagagggatgccaacctagtccttacttagcccacgaatcatctagagcatcctctagtcttttgtgggctccctccttcccatttgaagagacattgttcagaggaagaggggaagatttgaaatgtcaggtcacggaggagtgtttaactggagcctggtgaaccgcagggcaatttgcttctgctcactgggttctgactggcccgtctggacgtgggcccccatgtctctgtgcttagggcctcttcatgatgttttggatgtttccaagggaagtgggtgagcagatcaaggggtgggagagtcgaggcttgatgccagttaatactgtgaagtggagcgtgcggtcagtggaattcagaggaaaaagaagggttggagcaaagcggcattcatctcctggactgttagcctttctagtcttcctggtggctgaggtgttcacgggctgggggagccagctgacctttgtcctcttcaacctagaagactcagcccgcccagacaccaacgtgtgagacggatggacatcaggaagggaaggggagattagcccaactgctgacagaacgatttcccttggttggaccttgggaatggcaaacactcatattggaacaagcttggggtggaagatttaggccgtgtgagcatgtgtgagtgagtggaacaaactttcttggaaactggagggaggagatgaggaggcttcgggaagtattactgatggctcatggttgagagagcgacgtggggacccagctcgccccagcttttgtcccaggttctctttgtctgatgctgagggcagggtggggtgtgggaccaccactcttgttggcctgtcaagtagaccctaggacagaaaatggaaagaaggaaatggctcggtgctctcaactagcagagagaattgaggagaggtaagggttccttctgcaggccagcctgggactccacagcgccagcaggagtgacttggccacaagacattccagccccagggactttgcaggcttcattccctgtctgtgtcttttccttctggtgtgttttacagacttctgatggggaagcttcaaacttgagcaggccagagatgtccttaccaaattggaaaggaaggtgaaactgttcctttctttagccaaagaacccttctcaaagacgcctccagaaatggacaaaatggccttcccttcgttcctttccaggcaataatgacatcattagtgatgcaattctatttgtctttctctttcctctctgtccttttttttaaaaaaaaaaaatgcatttatttcaaaactgtgctattcttttaagaggagtggaggtgaccccttcgatgctgctgctatcgggagacaaggtgccataccaatacgtgggcttgactaatcccaggccaccatgggagagagcaaagcagggctgccaggagttcagttgcatcaagggcgtagagcacgcgggggctgggctcggaatagcagtacttttccactttgatgccttagaactctcacttctcatctccacagaccagactcagtaaaatctcaggccactagagaatggaaggcggtgaaacaggatttaaatgcaaaaaaaacctattggaggcttttggcaccgtggctcactagagggacccagcatagtagaggtttctcttgttgcagcttctgaaaagttcaaaaaagaactccaggccgttcttccctcaaacccagtgagagtttgcagagaagtgccccctgcagggctcccgtcccagaacaccagcaccagagagggtcttcccgatgccccccgctggacttgcccaagcctctgggagcccctcatctcagatccctgtgttgaacatgacactgactgtcccttatttgttaaaatttgcaatatctctcaagtaaataatagccaacatttgttgaatgctttcatgactcccgggctaaggcctttatgagcgttgtctcaaggggccccaacagccatcccacagggagggggataacagcccccatttatagataagggagctgaccggatgctctgagaagtggcaggtgttgaaggaaggataaagcagtgatgggccagaatccccaaggttcccttttttgttcatcaggcccttcctgagatgtgatttttaatcttttaactttttttaattaatagcaatgcgtggcctcatatttctatgaaccatttagtgatactcccgcttcctgcatgccacacactgtgctgggaattgctcatgggttgtcctgtttcatcttctccgtagccctgtgagatcggcaatattagtccccctacagccaaggaaactgcccagagccacacaactcttgaggggcgaggagggcttgaacctgagtctgcccagctccagaactgagcttgcagccattagccacagctgtctcctgcatgtctgagcaaagaaaggcctttacacagcatcaccctgtgccatcccatgcaccgtgggactcagctaaaggactgtgcaaagagggggctcctgagttggatttaggcaaaaggggcagaattcgtttgatttttagagaaaatctctggagagtttcttttgattcatagaattccttttagatttctttccagcataccaactagctttagtagtgctgctacaaccagctcttataagtaagagtgaaaaagtattcttttcttctttaaaaaataagtttttcttgcttatagttaattctagaaaggcaatactaaaggtatatat

SEQ ID NO: 5728 - DNA, 27403 bp, Homo sapiens
actcctttaatgtccatctactaaactcatctgtgtgcttgcttgcttgctttttttttttttttttttgagacagagtctcactctgtcattcaggctggagtgcactggcaccatcatgactcactgcagccatcatggctcacagcagccttaacctcccaggctcaagctatcctcccacctcagcctcccaagtagctgagaccacaggaacgcaccaccatgcctggctaatttttaaaaatttttatagaaatggggtctcggccaggcgcagtggctcatgcctataatcccagcactttgggaggccgaggcaggcgcatcacgaggtcaggagttccagaccagcctaaccaacatggtgaaaccccgtctctactaaaaatacaaaaaaattaaaaaaattagcagggggtggtggtgcgtgcctgtaatcccagctacttaggaggctgaggcaggagaatggcttgaacccgggaggcggaggttgcagtgagatgagattgcaccattgcactccagcctgggtgacagagcaagactccacctcaaaaaaaaaagaactgaggtctccctttgttgcccaggctggtgtcaaactcctggcaccgaggatccacctgcttctccttccaaaagcattgggattacagacatgagccaccatgcccggcctgtgtgcttttcagaatatcatagtcaacactgaattgtgtgtgatactgagaaagaggtgaagtatcataactgaaaatgcaaatgatgcagaaataacatctgctgcaaacttgtatcaatggcaggagaaacttcagtgccatttgtagatgatgacactatggccctgagctcccacatggagccagtgaatttcagtggtctcacttccatcccattcctactttccctctttacgttcgaaaatgtgtttattatacatgtatctgttattctaaaaaatttccttcaaatagaataagaaatcaaactcaaaacagctgcaggagatggaggtgtatctggtgtttctctccatctcccttctcccagaggaggacctcaggacctgtagctctctccagcttctcccaggagaaaggaggatattaaaggagtggttgcaagagggcttcccagcaccaacattaaacaagggaaatgcagtcccatgccaaggctgtaatcatacacagcaggagcaacctggtgaagaccaagcaggcagggtctggcaaagtagctaggccatcaggcagagtgcagatccacccccaggatacagaagagaccctgtcacaagaccccacattcacattaagacagctaagatgcagacttctgctgcctttgaaccaaaccaaaccaaaccaaacccactcccagctgagcacacccactattagaagcatccccacactcactgtgagccccactgacctccagggatttgggctgtgggtgtctgtggaacccgagtggaacctctgctccagcagctggggctttgtttcacttaatcaaatctttaaatgttatagagatgagacaattattatatttgctttctcacccttttctaccctcagttccactcaccccaccctgaaaactagtttttattcaagataaaacttacattctttgttttctatccataccatttcttcagaatccattttggtcaaaaataatttaaactccactggttgcaccagacacatttcaatataacttcccaattttaaaactttactatcaacaaattcaattttctttagaaaaggagatttttaaaattctacttagactgggcacagtggctcatacctataatccaaggggatttaggaggccaaaacaagtaaattccttgggcccaggagtttgacaccagcctgggcaaaatagtgagactccatgtctaaaataaaaaatttttttttagttagacaagcaagatggcacattcctgtggtcccagctactcaggaggctgagattagaaggatcgtttgggaagctgaggctgtagtaagccatgatcacagtattgcacttcaatctaggtgacagagaaaaactctatcttgaaaaaaaaagtgtattaattaataaaataccatatcaatatacgaaataatgacaatttagaagggttagtgattgcttgggtggtaactgaaactgactttggaaatctcactctcaagtcacacacgtgcttttcttttgctttcagttcctccttactccaccctggttttctacctcattgaggcttccagtccctaaactctatttttctaaagacttatttttcaactctctctcagtttcagtctttcatgttatcaaactgcaacacacacttatcacccactgaccatggtttcattggagctttccaacctcctcatcatttttgctaacttgaatcattctccaacctggaactggagaacatttacagaaataagctaatagtttagttgtctcccctcactgaataccaccttccccccagaaagccctcttatcactatattatggacagagaacctcagaggagctactccatttgcccaagtcctcctctaggaaagggtagaactggaatttgaaccccactacatgcactggcccttgcctcccacctcctcggctcctgtccaggtttgacagcaagtctggaggaaatacaggaacaaagcacttaactgcactgggcattgccatcgccacctgattgccttaacctggctcctctctctttccattcctagtcctagaaacttttaaaggatcctctgagtgtctgacaatcaccagggcccatagagctcagaaaatgccctcccatgactccacttctgcaaatcctccaaagctgcttctttggaataagctacaaggttaacaaactattgttttttcagaaataggattataaaatgtgagaacacaatgcactattttgaaacattgaaaataccatatctggcccggcacggtggctcactcttgtaatcccagcactttgggaggctgaggcaggtggatcacttgaggtcaggagttcgagaacagcctggccaatatggtgaaaccccgtctctactaaaaatacaaaaattagccgggcgtggtggcacgcacttgtagtcccaactactcgggaggctgagacaggagaattgcttgaacccaggaggcagaggttgcagtgagtgaagatcatgccattgcactccagcctgggcattacagcaaaatgctgtcaaaaaaaaaaaaaggagagagagagaaaagagaaagaaagagagagagaaagaaagaaagagaaagagaaagaaagaaagaaagaaagaaagaaagaaagaaagaaagaaagaaagaaagaaagaaaagagaaagaaagaaagagaaagaaagaaagaaaataccatatctaagggatatacatctctgctgctaattcaagttggtttatagaatatgtgtttctgggccaggcgtggtggcttacgtctgtaatcccaacattttgggaggctaaagctcgcagatcacttgaggtcaggaggtcgagaccagcctggccaacacagtgaaaccccatctctactaaacatacaaaaataagccaggcatggtggtacacacctgtaatcccagctacttgggatgctgaggcaggagaatcacttgaacccaggaggcagaggttgcagtaagccaagatcgtgccactgcactccagcctaggccacagagcaacactctgtctcaaaaaaaaaaaaagaaaagaaaagaaaagaaaagaaaaagaatatgtatttctagggtaattacagtttctggttcactcatcactctgtatttatttccattctacaataaattctggcaaacaagaggcttctccattgtcattaatttctcaggggatatcttagaaatatcctacaagtagaaacagactttggttttgaaatttgtcaggaataactgtcagaactgtaagagtccaagcagtgcatgtggcaccttacaattatcttcatattcttctagaaaaccacagcaattaaataactttcacagagtccaaagagacatgccacagaggtcaaggcacctgtcatctgacttcaggctcctggatctccaaacctcttcctgcgcaaactccacagccaaaagaacacaggtaccccacgtggcacaagcagccttcttctaaaagatttcagaaaattaaataagcactagcatcatacctgtaggctaactacatgcccttcatgcaaatacaatctaactttatttttttgaggcagcatctccatctgtcaccttggctggagtgatgtggctcactgcagcctcagcttcctgggctcaagctatcctctctcttcagcttaccaaattgttgggactacaggtgcacaccaccacatccagctaatttttaattttttatagagacagggtcttgctaattgcccaggctggtcttgaacttctggactcaagcaatcctcccatcttggcctcccaaatttctcggattacaggcataaaccactcactcaaaccacaatctaattttttgctctacaggcttccattctactcagttactttctacttagcactttagatgtttttatcctcatttttacaactatcccttgatattttctatgtatgtttcaaaggccacaaagaggttaatgtaaccattctcccaggctcccctgataaagctgaactttaaatttaggttttctgaaggccaagtccaaggaaatcttctacataggaaaaaaacaatcaacccaagaagaaaggtgtaaaacatcagccaggaaggacgtccagcctttcccatgccattgtccctgttgttcttgggggaacctccctccgcattagcagaatatgatcagctattctagcttcccaggaagtgtgcatgaggcctttctaattaatgtacttgttaaaaacataaactcattaaatggtactacttattctgaatttgtgttaattactcaaactatagctcattaataaagacagtttattatagacctaatccttatttttcaactgctgtcaatcccacatttcaaatcagaaagtgggatttgtagccaccattgcatctgtctactttgctactttcagttcaccatccacgtctaccctcattttaactggacttacaataggtaaagatgagaaaggagattcaatgctgaattacacaaaagtttagaaaaatggtttaaacattgcagctttgttctatattctaggaatctcgttccattatgaatatccaaaccacctcccctcaggccataatgccttgcacctaacaggtgcttaaatatgtatatttgtgcaacaaaacccaaaatgaacccaatttttgttttttctttttctttttctttttttttttttttttttttttttttgagacagagtctcactctgtcacccaggctggaatacagtggcaagatctcagctcactgcagcctcctcctccctggttcaaacaattcttatgcctcagctgggactacaggcgcacaccaccactcctgactaatttttgtatttttagtagagaaaacgcttcaccattttggccaggctggtcttgaactcctgacctcaggtgatctgcccgcctcggcctcccaaagtgctgggattacaggcgtgagccactgcgcctgactccaattttctaaatctgaaaaattgctctgaaattagttaacctgggaggcctatcttatttgaggagctctcaaccaaggagaaacctcaagtcactctacacttgatcctgagatctcatatggctccctagtgtattctagaacagttgcttctcaaattctgatgtgaacaagagttgccttggaatcctgcctactgcagattacagtgctgcaggtctggagtggggctgagacttcgcgtcttaacaagctgctctcagttgatgctgatcctcatggtaccttggttcccagaccccattttaagcagcaaggctgcagaaaayagatgccctaggttaaatatgggggagtcctctccatggccaggcctggtaccagcgcccacaccaattctggatagctctttcccatctgttatcttcttttcacacgtggaaaaaaccttgcgccatggatctgaggatgcagcacacaatcctctgtagggaagctccaaattagacccctagtggaggaaaatttagatcaacagggacaggacccacctcagtgtggagttaggtttaaccacaaagtcttagacatttattattcatttcactttactttgaggaaggactcgttattggttgctctgtacatgttaaaagtcaaggatggggccaggtatggtggctcacgcctgtaatcccarcactttgggaagccaaggcaggtrgatcacaaagtcaggagttcgagaccagcctggccaacrtggtgaaaccctgtcactactaaaaatacaaaaattagccaggcatggtggcaggtgcctgtaatcccagctacttgggaggctgagggaggagaatcgcttgaacacgggaggcagaggttgcagtgagctgagatcgcgccattgcactccagcctgggcaacagagcaagactctgcctcaagaaaaaaacctcaaggatgggtaacgatcaatgactttgcacagaatcaagggcccataatggcacactgtttctttgtttaaaatatcaggacccagaggagaaagagagctcatgtaccatttggcatgggmtacacagtgatccatagtaccttctaatgtggatgcagaacttttaacatataagactttgacatgatgttggaatcatggtctgttaaaatatgaagctaaattggtgttccaggcattgtatgggttgcatacatattggcatgcacacacatacacacaatgcacacactattaaacttctggcaarcaatgacttttgacccaagcagagagaatttggaaactgaaaggaggcaagagagggtgagtcacagttaacatcaatcaaaggtccagtgtcaagccaggctcaacagcaaagtctacatatttggctccaggacaaaacatgatacttgatctcaacttcttttctgttgacctcaaataaagttttcagtttccgaacattggaatactccctctgagtctaccagtctatgttggacagacaagaacacctgtttagttctaattttttctttctttctttctttyttttttttttttttttgagaygaagtttcactcttgttgcccaggctggagtgcaatggcgatcttggctcactgcaacctccaccttccaggtacaaacaattctcctgactcagcctcccgagtagctgggactacaggcacacgccaccaccatgcccgcctaatttttgtatttttagtagagatggggtttcgccatgttgaccagtctggtctcaaactcctgacctcagatgatccacccacctcggcctcccaaagtgctgggattacaggcgtgagtcaccacacccagcctagttctaatttttacatagaagaagacttcttaaaataattacgggtttttatttcattcaaaagcactaagaggccaggagcggtggctcacgcctataattccagaacttttggaggctgaggcgggcrggtcacttgaggccaggagtttgagaccagcccagccaacatggcaaaaccccgtctctactaaaaatacaaaaattagccaggcgtggtggtgcacacctgtaatcccagttacttaggaggctaaggcaggaggatctcttgaacccaggaggcggaggttgcagtgagccaagatcatgccactgcactccagcctgggtgagagagagagagagagagagagagagaaagagaaaggaaggaaggaaggaaggaaggaaggaaggaaggaaggaaggaaggaaggaactaagagaactcaatagcactctgtcagagcatcattatccaaggaaacaatcaaagtgactacataagatatgtgaacgtgacttacgcacctttgtttttctcctactagagttagttttatgtaaaaacttaaatgatcaaagatattaggtatcctgcattcacaattacttacaaaaactgtgcctgggaaaggagcccagtgatcacttgttcactgtgtgtgtctgggaaaaagtacatagataatatataagtactatataaataawtttttttttttttttgagatggaatatcgctctgtcacccaggctggagtgcagtggcgcgatcttggctcactgcaagttctgcctccctggttcatgccattctcctgcctcagcctcctgagtagctgggactacaagtgcctgccaccacgcccagctaattttttgtatttttagtagagacggggtttcaccgtgttagccaggatggtctccatctcctgacctcatgatccacccrccttggcctcccaaagtgctgggattacaagtgtgagccaccacacccagccaataaatgctttcttaaagcaatttacagaattctattttayagtaaaaatgaattttcagcagtacagtgttcacagtgagattggattttattaaattatatatgatagaaaaaatgttacttatakgtataaagtaaaataaacgtgattggcatttttaaacaaaatttttaaaataaaggtatacaatatgcccagattacataattcaaaaagtgcatgccactcaacaatgctggcacttaaaagactattttggaaaatgtaaggttatacctgtgtgacaacgatctgtgggcatggctttatcctccgactcttcagctgtgaaagatgttgtcacttgtgtattggcacaaatccatcctgggttagtcgttgactactccaacacccacttcaggctttatagccaagggcaactttaaataaacatttaaacatccyaagtggtcaattcaatgacacccctcacaggtccaatgtatgacaatgctgttgaatgtgcctcttcatttcagcacactgccttcaggcaggtaagtgttttattagatctttttccagaactgcaaccactcctgctctctcatcaccctttaacacaatcctcacgtcctcctctcgccrcaagcacatgggagaatgggaggaattacagaaaacaggaaggcaagctcactgcctcacaaaagattccttggtggaagactttcccagttcccttcygcagaaacaatgaaggtctgaggacatggggttatcatcaatctcttcattacagtcactcatctcagagaccagcattgcaactggagggcagctgctcccattcgagagtcacctggggcgaccaggaccccagaactctgctagagtctcacagtgctcacaatggcacttagccttggctgccatcagccttccaggctccttatgcagttcagaaacatgtgtttggaagtaagaaaggcactagggccgggcgtggtggctcacacttgtaatcccaacactttgggaggctgaggcaggtggatcacgaggtcaggagttcaagaccagcctggccaatgtggtgaaaccctgtctgtactaaaaatgcaaaaattagccgggtgtggtgccgggcacttgtagtcccagctactcaagagactgaggcaggagaatcacctgaacccaggaggcagaggttgcagtaaaccaagatcgtgccactgccctccagtctgggcaacagggcaagacttcgaaagaaagaaaagaaagaaagaaagaaagaaagaaagaaagaaagaaagaaagaaagaaagaaagaaagaaagaaagaaagaaagaaagaaagaaagaaagaaagaaagaaagaaagaaagaaagaaagaaagaaagaaagaaggaaagaaggaaggaaggaaggaaggaaggaaggaaggaaggaaggaaggaaagcaagcaagcaagcgagagagagagaaagaaagaaacaaacaaagaaacaaagaagaaagaaagaaagagaagaaagtgagaaagagaagaaagagagaaaggaaggaaggatggaaggaaggaaggagagagagagagaaagaaagaagaaggaaagaaagaaagaaagaaaggaaagaaggagggaaggcaggcaggcaggcactgacacctggtttcaggtgactttaaaaggracctattctgagagactccgtttcacaggagcttctttcagtgtggccagggccctctaggatctcaytgccctttcctccgtctcctcccagcctccctgcacttgctgtcctccagccattccttgccatttcttttcaaaggcacgcycctrcctcagggcctttgcacttactgtcttcccccacaaatagccctgttgctcactcccctcatatcstctggtctctgctcagatgctgccctatcagagagaatctcctgacacaaccactctcccctttccttttctttcagggaatgggccactcctggcaycctgcacattttagcatttgtttcctgtctctccccactagaatgcawgctgcagaggaattgtatccrtagcacctggtaagtgctcaatgaccactttttcaaggaccacatttccataatattaaaatgtattatgagagggaagagcagtgaattttcctgttatctgcactggccacgtgttgcctgagcatgtgcctytatgtgtgtaattgagtctctctgtgcctcactttccttrtctgttaaatgggagttacaatattatcacctccacaaagttatggaaattaaatcacaggtggggattgtgcctggcaggcagcaagcactcggtaagtgttagctatctgatattaactattattttgctatggatatgggtgtggaccatgtaaaaatgcaaggcttcaaaagtagacaacaacctgcttcaaaagtagacaacaacctacttcaaaagtaggtataaacacttggggttcatacctaatgtgccacgagatgggctttggaccttccagatctgagccacctttgggagggtcgcgtgaagggaagctaggcactcctgctcagcatgattggcaaggtccttatgccagcactagtgcccagaaagtgcaggcagttccagctgttgccacaactgctgcctagacaattggcctatcagggcagtgttgggggaccagggrttgcaagagaaccagcttttaaaaacagcattgaagataaaatggcaaataaagactaaaagttttcagaatccttgtctcagaaggttctaggctgatctgaaggttctgaaacacagacatgagtcttgtcttgcttgaacttatcctgtttttcactttccttgacaactagaagttattttatttaccatataaatacttttccaatgctgtctaaaaccatgcttgtaattaatatatctggaaacaacaattaataaatgatgtgtgtattactttaaaataaaaataaaggtttctatgtaatttccgtaattaaggagattaatatcttacttaacagacttacatccagaactgctctcagaactgttgtcctgtcttaaatgaaaacaaaggtcaggaaatgcacacactgaataaagagtagaaatgatttattttaaaaatcatacattttgtaaaasagatccaaactcaattaatttcttttctaaattctccctgagtccacaaccagtctgtttcacatcaaaggagcctgttcrtctttgaaaatggataaaagagaatttaattgtttgaatttgagctcaaatcacaagtctggctttaatactaatttcatttggtgtcacccaagtcctacccagccttgactcggccctgctcctccagtcttacccctctacccacacatctagaaggctsacatgcacgacttcaatgatacaaccttgcagaaagctggagtgggaatgccatttctccattggccttctcgttcttctctgtcatcccacctccarctgctaacgccccaggccycactgcccactcccagcctcctttccacgttgagagcccagggagggcatctaacctactccccaatctgcaaatctaatctccacccccagaagcacccracgtctctcctactcgacctcacaggtgcgccccatgcacagtcctgcccagcacaagcacatggcctcactcccacgtctccttatttccctgacacagcctcaccctccactcaggctcaggattaaatgaggaaatatagggaaagatatgaacactattctcaaatctttccctccctccatataactatagacaaccagaaccaaggatcggcagttgttacatggaggaaggaaaaagatttgaactaatgaaaagaacaataataatagcagctaatagcggcatattttttttcttttttgagacaagatctcactatgttgcccaggctgaactcaaagaactcctgggctcaagagatcctcctgacttagcctcagaagtagctggaactgcaggtgggcaccaccgcacatggctaatagcagatttttgtgagtgcccactatgtggtaggcactgtctatatattctcatatacacatatgactaatatgcatatacttgtgtgtgtctacataagcacaaacacttcgcatatatctcaataatgggggtggggctcagctaaccagttgaaggctttaagagcaaaaattgaggttttagagggaaggaattctgccgcgactttagcatcaattcttgcacatttcctgcctgtcctgyacatttcagacttgccagtccccacaatcacacaggccaattccttgaaatgaatcttttctatatcttacatacaaatgcatatgtttctctagagaaccctgatacatacaggggaaatctgaaaatggattatctgcggcagcaggaggaagaaaaagagaggcacaagtggccctgtgatggttaatattatgtgtcggcttgactggcctgcagcacctgaaccctgccaggcaccaggaggcttcagggagaacacgagcttgctcagataatgaggtcaagtcctctaagcccctctgccctgcaccaggtaaaagatcagaacaggacagtgggaagggcccggagaagcatctgcacctgactccccaggggcaaggtgggctggaggtaggtgacaaggtttggctcccaaacrggcactggccaaaaacaaatggaccagcagggccaagtgacatggcagaagaccaggtgggkgactcggtcamcactttcaaacatccccaaagttatagtaagcatcaagagaccacttactagagtctcactgttaagagtaaaaagagattgtgtatgcaaacaattagaaaaatcagaaataactaatgtttaaacaaaacctaacaccgtaatacttcaagacctttgggctcatagtctgcctgacwcataggaagtggacaggatggctcagagcactgtcaaggacctcacttgacctcctgcaagtcagttcttctcaggacaaagtggacttttccacaagtttgcctttagcaatattataataaactgcacttcaactgtcttgaacaaactcacagctccacaccaatgcagtcttaaaaatgagactggccagtggctcacacctgtcatctcagcactttgcgaggccgaggtgggtggatcacctgaggttgggagttcgagaccagcctgaccaaaatggagaaaccccatctctactaaaaatacaaaattagctgggcatggtggtgcatgcctgtaatcccagctactcaggaggctgaggcaggagaatcgcttgagcccyrgaagcggaggttgcggtgagccaagatcaagccattgcactccagcctgggcaacaagagtaaaactctgtctcaaaaaaaaaaaagagacaggcatcccacatcaatgcttccaaggtgtgtacccttttgatctggcaattctgcctagaaggtcatctgaggaagtggccaggagagcacaaacacacacatttacagatgctcatcacagtgtcactttgagracttaaacagaaactctgtgagttataagatcattgaagagctgtgactttaacctctccaccttacttcctccctagattcctctaggaacagaaaaatacagattcctcaagaactattagaatacatacataaaacttactgacacggaagatgcccacttcatatgcggtgtgcgtcatggccccattgtagagccttctttcattttaaacagcattactggccrggcacggtggctcatgcctgtaatcccagaactttgggaggccaaggcaggtaaatcacctgaggtcaggagttcaagaccagcctgaccaacatggtgaaaccctgtctctactaaaaatataaaaagttggcggggcgcggcggctcacacctgtaatcccagcacattgggaggccgaggcagcggatcacgaggtcaggagattgagaccatcctggctaacatggtgaaaccccgtatttactaaaatacaaaaaattagcgggtgtggtggtgggcgcctgtagtcccagctactcgggaggctgaggcaggagaatggcatgaayccggraagcagagcctgcagtgagccaagatcccgccactgcactccagcctgggggacagagcaagactctgtctcaaaaaaaacaaaacaacaacaacaaaaaagttagccgggcgttgtggtgcatgcctgtaatcccagctactcgggaggctgaggcaggagaattgcttgaatctgggaggcagaggttgcagaaagcggagatcgcaacattggactccagcctggtcaagaagagcaaaactccatctcaaataataataataataataataaaataataaataaamagcattactgtggctggccacacaggagcctcctagaagagtctacagcattgtgaggtgttcattatctttgggcagaaggaatacatgtgatctttattttcttctttcttcttacattactctacattttctgaacttttgcaaatcatataaataacttagaaatcacaataaacaaagctattgttgtgcatctgcaggtgtctcctaaatgttataagccctaagattacccataagggtaattgagagtactgagaggcttcaatatcatcaaattcataattacatcaaacaatatatttatgaatagaygtatttccaaaacaggccccctcaccttttctagagctaagattttgatccataaagacttacttctccattgccttcaattagaccaacctgcagaaaataataataataataagtacaatatctagaagaactgcaaggcaaatgttagcaaaatcatccttgtcaaatgtttctataaaatatcagaagcagatacatgactgacatgcaaactccaccaacaaccagaagaacgcctaagtctttggagcaatgctgaaactgtggttacttccagttaccaaaatgccacactctcctagaaaatggttatgacttggagaatccattaaaaatcaagaaagttttcataacagaggaacattttcaaaaaaatagaatgttaaatgaaaagtagcatatgtttataatacagaatatgaacacatagtcaagcatcctaagaaggaatcttacaggaattgtcagccttatctggcttctccagaaatgcaagaccttccattctgtccctattctaagggaaatgtcagttcccaggggcagggctcttccacggatccacaacctaagaggaagcctcagaggcacaggctctgggagtaccaggtggcagcttcaacccagaagcgcactcgagtgcagtgcrcttgaactctccaggtcaactgtggaaggccccttagctcaggcagtgggatgggtgataggaatgggtttattgacttcatagagtataaaataaacaattcaaatacacccaaatgcactctttcataaaagaaackgaagtaacaaattctgaccccatgatgagaccccagataaacgttaggggtcaccaggggtgaagggaactggcaacaagtcaggtggccaagactcaaagcctgccaagaccactgggcacttttttggacttcctgaaaactccacrtkcctataaaatacgagaaaaacaagagcttcccatgagctcttgactatcccaggatcacacccagtttgggctagaaagacccccatragggatccaccacagygaaaccagttgaactgccctttcctgagcctctctgtgctccaggcactgccccatccctcccacgagacctgaygggaagcgggttaaggtggtttcatgttgaccatgtgtccacaggcttcgcagaccaagagcaagtcggcacaccaggacaggcaytygcatgggtgcccagaagtttcaagatctgaccttggagagaccaggtccgggaggctgccgggaagtctccatcacaccggcctcagccgagtcacaggaacgcaggctctgccatgcccagaagcctgagatgcaacttcaaggacaacgggagccagaacgcttgryctcacacggaaggtgactcctaaccaccaccacacttgacgtagcaccagcacacggagattaggtgagagtgggctctggtgcaaagataacagtgctggggacctgtaagccagtcactgaccaaaggtggatgtggcctgctggataagggcagggggaaaggctggagggaaaggccacaaggttaagagcaggtagtaagaccaggtgactgaggcctggtgtgtgaggctagaaggacagagcacccagttaaggcagggtggttaaagcaaagtgggcaaggccaggagaataagactgggtgagtaggactagggggctgataaggccaagtagaaactctaggtaagtaaggcaaagtggtatggccaaaagctagtgccaggtgagtaaggcctaattgctaaggccaggagatcaaaaccaggtggataataccagrtgggtaagcacaatgggtaagaccatgaggttaagaccaggtgagtaacaccagaaggttaatagaaacaggctggtaaggcaaggaggttaaggccaggtaagtaagaacaggtaggtaagactagggggtaagaccgggggacaaggtcaggaagctatggccagattggtaaaaccagaaggttaaggccactagttgggtaaggaacagtgggtacaaccagaagtggaaagctaaatctgaaggccagatgtaaaggtcaggtgtgtaaagtacgatgaagaccaggtaagtaaactaggaggataatgcaagttggtaaagccatgagaataaagccagcagggaaagcccgatctgtgtagtgtgagtcagagcacacactttagagccagaaggttgggctcagatttcagtttcaccctttcctagatgaagactggagcaagtggagtagcttctcagaggttctttgtccatcacatagtgataaggccaggtgcagtggcccatacctgtaatctcagtgctttgggaggccaaggtgagcagatcatttgagcccagaagtttgagaccagcctgcgcaacatggcaaaaccccatctctaacaacaacaacaacaaactcatagtgataagagggtttgttagggaaatatgttattcagtgaggagaggcagttaaaccactagcttagttctgtaaatgctgagtcatttccagattggagaatgatttaagcaaagatggtgaggaggttagaaagctcttaggaaacggttgtcaacggtaaactcaygtcccagtttgaaacatgaaacactgtgaaactatgagagggcagaaaaataagacttcggaaaaatggaggtgagggtctagaagcctcaatgaagtagtaaaacagggtctggaaggcggggctggtagcaaaagaaaagaaggtgtgtgattccagatgcggattcccaaggtcaaagtttcagttgccactcaagcaatctaacccttctaactgtcatcattttgtatcttgatattgtatattatcaactaatacaactttttaatttaaaaagttttcttaaaggaaactgatattaaggattcacttttaaaattataaagtttgccaggtacagtggctcacacctgtaatcctagcactttagcactttgggagacagaggcagcaggatggcttcagaccaagattcaagaacagcctgggccccctagcaagacctccatctctacaaaaaataaacattagcctggtgtggtggtgtgtacctgtagccagctacttggaaggctgaggcaggatctcttgggcccaggagtttaaggctgcagtgagctatgattgcaccactgcactccagcctgagcaacagagtaagaccctgtctcaaaaaataatacataaaatagttatattgaagtgtatccagagaaaccagtgggaatttaaattacttttggttgaaatggattctgaggaaattatacggacagaaaactgagataatgtaagttgtatcttgaataaaaactctgattttggctgggcatggtcacttacacctgtaatctcagagctttgggaggctgaggcaggaggatcacttgagcccaggggttcaagaccagcctgggcaacatagggagaccctcatgtctaaaaaaatttttaaataaataaactggttttggggtggggtgggtggagctggggacggaggagtaaaaaacataattgtcccatcactatagcatttaaagatttgactaagcaaaacaaaagccccagcttctggagcagaggtgctggcactggttccacaggcacccacagcacaaatccctggaggtcagtggggtgcacagctagtgtgggaacacttcaaatagtcggtgtgctcagccaggagtggaattggtttgctttggtctgttttagcagtgcagaagcttgattgatttgatttcttcatcctttacattttggattatatttcacatctttcccaataagtaacacacacaacccagtattggttatcatatcattctgaaaagcatcacaaggggctaagtagctggacatcaaaggagttttaacccactcttctctttcttctgtcctccagaatttgtttgtttgcttgtttgttttttggagatggagtctcgctctgtcacccagtgcagtggtgctatcttgactcactgtaacctccgtctcccgggttcaagcaattctcctgcctcaacctcctgagtagctgggactacaggcatgcaaaaccactcccggctaattttttgtattttagtagagacagagtttcaccatgttgcccaggctggtcttgaaatcctgagttcaggcaatctgcccacctcggcctcccaaagtgctaggattacacctgtaatcagtgaccgcacccagcccttttctttttttcttttgagacagagtctaactctgtcacccaggctggagtacagtggcgcaatcttagttcactgcaacctctgcctcccgggttcaagcgattcttatgcctcagcttctcaagtagctgggattactggcccgcgtccccaagcccggctaatttttgtatttgtagtagagatgcggtttcaccatgttggccaggctgggcttgaactcctggcctcaagtgatccacctgcctcagcctcctaaagttctgggattacaggcatgagccaccrtgcccggcctctgtcctccagaatttttattttgctgcataaatgtaatgatattagggatctgttaggtattccatacatctacttatctgaataacttttgaatcatttcttaacttgtttctatggtatccatcaggttatatgtggacagatgatctggtaagtactggtaatgatgcagaagaagtgctctgcaccagtcatccattgatgtctgttttccaagacacagaattacgatcattacggatcattatttcccatcatgtgtttatctttcaaaaggaaatggtttttgattttcagttgttttggaattcagcctttcctatggatgtgactgatttttgctctctatattttacccttcaattagcaactttaaaacaggcctgttgggccgcatgtggtggctcacgcctgtaatcccagcactttgggaggctgaggcaggcagatcacctgaggtcgggagttcgagaccagtctgaccaacatggagaaaccccgtctctaataaaaatacaaaattagccgggcatggtggcacatgcctgtaatcccagctatttgggaggctaaggcagggaaatagcttgaacctggcgggtggaggttgcagtgagccaagatggtgccactgcactccagcctgggcaacaagagtgaaactccgtctcaaaaacaaaacaaacaaacaaaaaccaaaaaaccacaacaggcctgtttagtcaagctaaaatttctgatccataaagagtcctagttgggacattgtgttatttttatttatttacttatttttgagatggagtctcgctctgtcgccaggctggagtgcagtggcgtgattttagctcgctgcaacctccccctttggggttcaagtgattctcctgcctcattctcctgagtagctgggactacaggcacccgccaccatacccagctaattgttgtatttttagtagagacggggcttcaccatgttggccaggatggtctcgatctcttgacctcatgatccacccacctcagcctcccaaagtgctgggattacaggcgtaagacactgcgcccggccttagaatcttctttaataattatcagcactgtaagatgtttctggtctccactcttttttcaggcctacaccaatggctaattgagaccatgcatcactattaaggcatcttcagcaaaaggaactatggaagttctgcatgaaacatagacacctgttagaaaaggaactaaatttcaaaccgggaatgtggtgttgaatcacagcaaagtgtccagaaggaactcccaaagtactgttttccaaaatatagaatgatatagaagattgttttaggtggaattcctggaaataaatttttaaatgtttctttttgacttccttttcatatggcaaatgataccaatgttccatttatattagttatgaatttaaagaaatattgaggaaatcacatttcacctggcatatgagtatgggaaaaatcatgacaatggaaggcaaatgacttaagtttgggaaacatttggctgagaggatgtgttggaaagcaagttaaaatcccaaactcagccatgtgcagtggctcatgcttgcaatcccagcattttggaaagctgaggcaggaggatcgcttgagcccaggggttcaagaccagcctgggcaacacagggagacctctgtctatacaaaaataaataagtattgattagccgggcatagtggcacacacttgtggtcccagccactcgggaacttcagcccaggagctcaaggctgcagtgagccatgaccatgccactgcactccagcctgggcaacagagtgagagcctgtctcttaagagaaaaaaagatagattcaaaatctgataacagtaggtttggggatggccccgaggtcttgggcttttcttttctctctctctttttttttttttttttttttgagatggagtcttgctctgtcgccaggctggaatgcgatggtgcaatctcagctcactgcaacctctgcctcccagcttcaagcgattctcctgcctcagactcccgagtagctgggattacaggcacctgccaccacgcccaatttttttttttttttttttgtattttttagtagagacggggttttgccatgttggccaggctcgtcttgaactcctgacttcaggtgatccacccgtctcggtcttccaaagtgctgggattacaggcctgagccaccgcgcccagccaggtcttgggcttttcataggctccctgggcatctttcaaggtgtggaaatttgaaagccaggaacaatctgccatacatcaggaagccactagatggcaggagccatcccttggagcccattcttcagtccaaaaagtggtcagagaggaaacctgtcaagtggggaagaatccaagcacacatgttaaatgcactttaataaatagctggtgcagatgaaagggcaggaagagtttatctcatctcttgcccccctctagtgtcccctcaagtatttgaaatgcttcaaggatccttaaataaaactgcaaccagggagctgtgctaccctgtagcacgaccagctaaggaaaaaactagctcaatgatagggctagtatttatatggggtcaatggcttttactggcagacatatatggccttttgtgcaatataggagataggaaaaacccaaaccaaagcttttttttttattttttttctgctctcaatcaacacagaatacttctgtgaccaaatgtgggcaaggttttccccagacaccaaacaatccgttttccagcaggttctccagtggacactagctgggtgtcctctaattcaactcaattttgacactccctacctaaagacagtgttagatctcataggttcaggggttagtctcacaaaactgtccccaacttcagataccagttgcagatctgagcctctagaacttctgacccaccagctacaaattaaggttgccacatgcccctccccaggttcaattaatttgttagagcagttcacaagaactcagggaaacacatttaccaatttattaacaaagaatataataagggctcacctaactagcctaaaaaaaagaatatgataaaggatacagatgaagagatccatggggtgaagtcagcaagggttctgatcctaggagcttctgtcctcatgaagttggggtacaccaccctcccagcatgtggatgtgttcaccaacccaggaggtctccaaacccagtccttttgaacttttttttttttttttttacagagtcttgctctgtcaccaggctggagtgcagtggcgcgatctcgactcactgcaacctccacctcccgggttcaagtgattctcctgcctcagcctcccaagtagctgggactacaggcctagctaatttttatatttttagtagagacggggttttaccacaccaccatgctcagctaatttttatatttttagtagagacagggttttaccatgttggccaggatggtctccatctcttgatctcgtgatccgcccactcaggcctcccaaagtgctgggattacaggcgtgagccaccacgcctggcctccttttgaatttttatggaagcttccatttgtaggcatgattgattatatcattagccattaacgatcaactcaattttcagccccccttccctccttggaggttggggcctggggctgaatatcttaaccctgtaatcagaacttgatttttcccacaaaaagttcccaccctgaggctatctagaggccctcagcctccagtcacctcattagcacagaagattccaaggattgaaggaaccgtatgtcaggaaaagatgaggaagaccaaatacatatttcacaatatcacaccttccaagtgtatgaccctgtacctaagagataacacatgttaaaatcagatacaaaacagatagtgccatcccgtgatttttctgtagaatgtgcttttcctccaaatgccaggaaatggcataacagagactaaaattcagagtgcttgctcttctttttagtggctactaacgtggtgtcaatgtgtagagctaatatttagataaagacaggtaggcaagggcactatttgagacatatgaattattgttggtgtctgattttgttttattccaacctaattagttctgccttgtaaaatactctcattacctgaattaccactgtgaatattatactctaacaatttattattatagaaatagtacccttcagtttttgaaatagtttagaaagcagtgatactgggggcacttaaatatatttttaaagtggttaggccgggcgctgtggctcatgccagtaatcccagcactttgggaggccaaggcaagtggatcacctgacgtcaggagttcaagaccagcctgcccaacatggtcaaacgccatctctactaaaaatgcaaaaattagctgggtgtggtggtgcacgcctgtaatcccagctacttgagaggctgaggcaagagaatcacttgaacctgggaggtggaagttacagtgagccatgatcatgccactgcactccagcctgggtgacagagcgagactctgtctaaaaaaatattaaataaataaatgtggttaatgtaaccaatcatggtgtacttttttaatttattattattatttttttttttgagacagagtctcactcttgtcatctaggctagagtgcactgacataatcggctcactgcaaccttcacctcccaggtttaagcgattcttgtgcctcagcctcctgagtagctaggattacaggcacctgccaccacacccagctagtttttatatattttagtagagatggggtttcatcatgtggccaggctgatcttgatctcctgacctcaggtgatctgcccatctcagcctcccaaagtgctgggattacaggcatgagccatcacccccagcctacttatttattttttgagatagagtctcgctctgttagccaggctggagtgcagtggcgcgatcttggctcactgcaaactccgcctcccaggttcaagtgattctcctgcctcagcctcccaagtagcagggattacaggcatgcaccatcaggcctagctaattttcctattttcagtagagatggagtttcgccatgttgatcaggttggtctcaaactcctgacctcaggtgatcttttttaagtatgaagaatatattttcattatacttgtctataagtgattgaagtggtcagaggagctactgaattcctcatttacttttagatgaagcaaagactaacatcctgccctcccagccaaatagatactaagttgaatattctttctgggaacctggagaaaaagtggataaaaatcactacttccaggctgggcgtagtggctcacgcctgtaatcccagcactttgggaggccgaggcgggcagatcatgaggtcaggagatcaagaccatccttgctaacacggtgaaaccctgtctctactaaaaatacaaaaaattagctgggcgtggtggcgggtgcctgtagtcccagctacttgggaggctgaggcaggagaatggcgtgaacccaggaggcagagcttgcagtgagccaagatcttgccactgcactccaggctgggcgacagagcaagactccgtctcaaaaaaaaaaaaaaatcactactgccaatgtggcactgtagattagcaatactgattatatctgatggaggacaacagatgttatcatgtgcaaatttaggatgctgaagaagtgacaagaaaaggatcagagccttgccacaacatagaatttatgtaagtgcttgaatgatgtcatctttcttgaagtccaagatgtgctggaaggtgagcaggaaataaacttagtcattttattttgaatcaagctgtatctttgggaataacaaatgcatagtacagaatgtgttgcttggttatttataagcttgggttcagagagttaatgcaaatgcaaaagcaagcaaggggctgctgtcctcttagtaaggatggtgtgtgcagctgagtcagaggaagggttggaagcctagccccagtgctggctagctttgggagtgtaagcaaagtctcaacctaatttgaaggctctctgttcccatctgtgaaatgggtacaaaccccccatgatctgagctgtagtgaaagaaaggaggccatgcacgtcaagatccaggcaggtggtcaggctcagtaagggagaggtcatgtcactctggtacttgagaccgagaccggactggtaacataagccttctgggccttccggggccctgaagcatggatcacggggaccactggttggcgccacagatgctcaaccagcaaagaggggaagggagaaagcagagcccagggagggctggaggggatcgttcctggtgttgatccagaaaaccacagggttccttgtcttggttttcaacaacttctctttctgtgtgtgtgtggatggatgtagcacattgttataaccaagctcaaaataatgcaaaactttgattatatatgttgttaccatggttaacaaatgtattcttccatctgagaatcctcagtagtacagagagaggttttgcatttagaattctatttagactttttattccttgaagcatcaaaagtacataaacaccccaaaaggttatatcagaagtcaaagcattatgatctctctggatgcttttcagacatggtgggtgagcgttctgaatcccaaccccgcccccaatgccccccagccgccacccggccagctttgcctggagagctactgagattttccactatctagtcttgggatgctgaagcctcaagaggttaggaatgaatgcaattctcacccacctgacaatgttggtatgcaagctttggttgctttggttggtatgagaccacctcatcctactggagaagttattttcttgtctttcaccatggaatcatttacttttgtggtgggggaggaatgctactcagaaagagatttcaaagaacgaaggaaaaacttccttatcttcttcttcttctccttattcttcttttttcttttagtagagacagggttttgtcctccaggttgcagcacagtggcaagttatgctcactgtaccctggaactcctgggctcaaggagtcctcaagcctcccaagcagctaggagcacaagtgcatgtcacttcttaaaggagacttgccacagagaataatgggccacactggcttttgttacttggtgaaatgattttgttggtccatatagatactgctactctacggagca

SEQ ID NO: 5729 - DNA, 403035 bp, Homo sapiens
  misc_feature (1)...(403035): n = A,T,C or G, or insertion/deletion polymorphism (see Tables 1-2)
cctcacttcacctcatcgtgcaggtgaatacaaaagggtgaatacaaaacaatattttgagagagaccacattcacataacttttattacactatacttttataactgttctaatttattgttagttactgttaatctcttactgtgcctaacttataagttaaactttatcataaatatgtgtgataggaaaaaacatggtatatatacatagggtttggtactatctgcggttacaggtgcccactgggggtcttggaacacatcctgtgcagatagggtggaaccaccgtaatcatttaatcaaataactcattccacatgaataaactatttgcttagctgtaacaagcaagaaattgggtgaacgtctaaaaagttaattctgctcatcatgagtttgaaactgacctgcaactcctacttgatgtgaagcatatcctggtaatctgctgggcccttctctcagccacagagtcaacgttgatgaatccgattctgcgtggtgaaagcggaagcccagggaagcagcaggggcaataaatcggctttggaggatgggaatgtgcagccatacagctgttctaccttctgatcgccattgctgtactgcagctaaatgcagaagaaaaaagtctaaataatttccaaagagacgagtggaataaattaaaactcacctcagggtttcgcctcctccaggaaaccatctttaagcaaaagaggtccccaaatgtcttgttcacatcgctggcactggaagtaccatgttttatagtaaccaccttgtttatatgatttttccatcagactgaattccttcagaataaagtcattacactgctgacctttatatccataccaccaaagacaatgcttggcacgtaacagatgttctgtagttttagagtggacaaataaaaggatttaaaccgaatcaaataccatttgaatgctgttccttttaacatccttaggtttaatcttaaagacaattatggacttctatttttttcttcctttaggagttctgttataatgtttttaatgtataaatttcaaggtagttaaactttgtttttaaataatgtatgctggttgtagaaattttgaaaataaaaaatatgaagaaatcaaacttcacattttactagcatataggaataaaattctaatttttccttattatagataatatcatggtgaacataattataggttttctatctttgccttctttaaattctctttactacttaagattgagccaggggaaaaagatgctaatatctatttgaaacttactaagttccaagcactttatatatattatctcattaagtgcacaaccatgaaaggtattactaccttaagtttatgggtgaagaaataaatacttcagatttagagtttttagaaaagcttttcagatcactttcttcatccatcatctcacttaatctttataataacgctataaagcgtgtgtgtgtgtctgtctttgggggttgattatatatcaaatagttaattaactttcccttctcttttccctagctctgcaggaagctcctctctttaaggacaatgttctctacctctttgaaagttgctgtgcctagcacagtgacaggcacatggggcctttaataaagacttcctgatttgagttagcatgcagtggaattatgggatcaggtccttctcaccttgctctctttgtctgatgacatcttttaaaaattgaggtaaagtacataaagtgaaatgtacaaatcttaagtgtacatttcatgcgatttgacatatgcatatgcccataacacactttaacattatagaacatttctatcactccatacatttcacatgtgctccttcccaggcaatccttccaatcaaattaaaaggctactttctaaaagcaatgctatttgcttgctgttttatatctacactctgtgtcttggagaatccactctcactgcttcagctgatacatacatgaggatggctgcccagccctgacctcactgaacactaaactttctgttctccagttgctcccagacatttcctgtcctgaaggttaccacttcagacttcacaaagtgtgttcaaaactgaatcttttgttgttgttgttgagacggagtcttgctctgtcaccaggatggagtgcaatggtgcaatctcggctcactgcaacctctgcttcctaggttcaagcgattctcctgtctcagcctcccaagtagctggaattacaggtgcgtgccaccatgcccagctaagttttgtatttttagtaaagacggggtttcatcatattggccaggatggtcttgatctcttgacctcgtgatctgcccgcctcggcctcccaaagtgctgggattataggcgtgacccaccgcgcctggccaaaactgaatcttacaccccaaactagcttcatttataagcttatttatttctggcaccaatgcttgaaaccttagaatcatttttaaattgctttcttcttttccctaataagctttattgctttttcttccctcacctcccattcccattgctaatatctatcctttaaagtccagctcatattccacatctttgaccagtctttcctaaccactgctcatgagctcaccattatgaatttaaagactactatgtctgtacaatttattagaacttattacatatgacctaatgatatctcttccattagctattttttccaatcctatttaatattccatgcatttgcaatcctccagggtaaccctacattatgcactggggctcaatttgtactaatgaaatgactggcttgcctaaagtcacatagctggtgagtggcatagcagggaccagaaccagtgctatttcattactgatgcagatatgttatgtgtgaagctaacaacatattgcctgtttatccctctaacttcagttgttggtaacaaaacatcaatagttcatgttctaaaagaatatgaatagttgacttcttattccaccaagaatatggacttcttagtccataaagactaagaatagcggacttcatgtgtaaatagtctctctttataggcactaccattcagttagttttgttcaattataacaacagaaccagcaggagttcttcaaggtagcatagtgcagtaagaaaggtgtagagccagggcaagtaaatttttctctctgtgcctcactactgttatctttaaaataggaataataatgctatctacctcaaagggttgttaggaggattaattactatttataaagatcctaaaacatctaccattaagtgcaacaaaatttgttttattgaaaaaatataacaagtatttggtacttaagtttacaaattagtttcatctttgatcaacgcatctatccagtaattagagctggcgttattcacaaaaagcaagctaagaagcaaatatttttggtggcaatttgcctaatgcctggctaagcacatggcagaacctggtacttaaacccagaatgtgcatctccaaatcgcacagctttctgctttgtcatgctgactggggtagtgctttgatcacctgtttggtcattgataagtatcagtgggtacaacacctgtgtctacccacacactggaagataaaacgattgattctcctattagtgacactgttgcagtataagcgggcttgtcagcaattactagcaagtaggagagaaaataatgtgaagaggtaagaagtctgggaatgaggatgagtaaacattgaaataactagctcaattatatttacagatatgcttcttgccatattgctcaataggataaagattattttgagtttccagtgtgagagatttttccatagttgaatttgcatgctatgccttcaattagattataaaaccctcagaggccgtttgaaaaactgctgcaccactaaatcgacttctttcaaagtgaaggctcctccatccaagctttcttatcattgggctcaaggttgaaagccagtaaaaagttttcttattgaagactgaaaccacccaccaccgtccctggttaatcataaaagaagcgttattctaaaaaactccagttctcgctgagacagctgttgacccaatttgtatacaaatgtgacactctgaacctctctggtttagtatttgatagcccaacagggtgactatattcaataaagattcaggctgggtgcagtggctcctgcctgtaatcccagcactttgaggggccaaggcgggagaatcagttgagcccgggagactgagaccagcctgggcaacacagtgagacaccgtttctagaaaaaatagaaaaaagccagatgcgcgcctgtagtcctagctacccaggaggctgaggtgggaggattgcttgagctcaggggttggaggctgcagtgaaccctgatcctaccactgcactctagcctgggagacagaatgataccctctctcaaaaaaaaaaaaaaaaaaaaaacaaactgtacatttaaaaataactaagagtaactggattatggttgaatgcttgtggtgatgagtatctcatttaccctgatgtaattattacacatttatacctctatcaaaatagctcatataccccataaacatacacacctactatggacccacaaaaattaaaaataaaaaagaaaagcctctttggtccactcagtccaccacccgtattagaatgtaagagtttttttccttgggaaaagtgtccgacagaaccaaggctcggtaaaggatactaataatgtaataatataatattaacaaacatctactgagctttaaatacgtggcaggcactgtgctgtgcactttatgtgcattatccaaattaactctcagtaattccaggagttcttatcaccggggtctgtggaagaggaaatggtggtttacggcaatttccgaatgtcgcacagtagaaagtggaccagcaaccagggttgcagatcccaaagtccgggatcttcaccatttcacccaaccgccttagagacctcccagcaaaaggtctaagcacgaatgctccagaaaacaggtccaggtcacgcgtgccttctccctttccctctgggctcgacagtggtgcacagagcgactagggagtgggggccgcggttatttcattagaaaagctctggagccccgggagcccttcgtcccaggcgcacttgccctgcaagcccttctggaaggcggcagcgtccaggcggtccagcgcatcgagccgcgccaggcgcaccgagatgcccccgaatctgtccagctcgccctgcagatcgcacgctccaactggcggattccgcacgtaaccctgtgcgcccgaggcccagcggtaacccgccgaaggcccggggccgtaggttcgggcaagcatcgcgcgccagcggccccagctcagcggctgccgcatctccacgccgcttaattcgtccgttgcccaaatgacccctccgcgctccagagcggagatcgcggccgtacattttagaagagtgccatcaataccctcagagttgagctggggttaccactctgcagagctatgccaaggagaccgcgaagtggtccaccagcccttctcagcaatttgccccgctccagttaagcggggaaaacctcctcccccaccgccactcacttattttgtttggtagtttaattcaacagacgttggtttagggatggggaagccgggaggagatgcaaaaacgtcctgtttttcaggaatttacaatctaagtggcagttccgttcctggaacctatcttctttcacagatgccgttacagctgtttcaaagactgctggttttgaaaacgctcagtccctcccaccacgctgtgcactgctgcgctccactcaggggattacggcgcaggggcggaccctcgctgacttctgccccggaagtttttctctcagttgaagcgcgcacattgagtcggcttttctactgcttcggctagggtaccttgtgaccatgtcttccaagaagaatagaaagcggttgaaccaaagcgcggaaaatggttcgtccttgccctctgctgcttcctcttstgcggaggcacgggctccttctgctggatcagacttcgcggcaacctccgggactctgacggtgaccaacttattagaaaagggtaaagaattccgggtgggagactagaggccgagggggcgcaacctgaggggcgggagactcagtgatactgacttggggtgcagagacttttgaaagttgggcgtggcatgggtctgagagcggcacagaagcgtgtaagacttctgtatgtaagaagcatgcaaacgtagccgcgcctgcactggagaagttaggctgaaatggtttatccgtgtccaaggtttctcttttgtaaattattttgaatttttaagttgcacttgaaacgctttgtctcatttaacattaacgacacatttaattgcaaaattgttcataactagcgaacatgggatacttatcctaaaaaactaaataaccaattcagtaaaaatgtggatcactctgcctttaggagtgatgatagcattttcttccagtactacgcaggttatgatatttaataactgctagtaactgcacactagtgttagcagtatatatagctcatctaatttctacagaagccgtgaccgatgggtatagtaatgacagttttatagagggaggaaasttaacgtgattccattcaggctacacaggtgctaagtggcagagccgatatttgagtccagatgtgtttgacttaaaagccattcctagatgacagctcctttgatttgggagaacgtatttatactgaaaagtcttataaattgaattaaaaattgaaaatttatatttgatgtgtaatagctttgaaaaatggaccagactagtggcaaaaacttttatgtctaatcagaccttaaagacaatttagagttcacatggtattttcactctgccttaggtatcagaggacaacttgttctgtcctgaaggttcaacttgtttttgaactagatccttcccattgacatgtaaacatgctcatttctcttccatcttaaatcagaacaaaagctccacattttcttcctgcaaccgtctctctrtccattgccaagcttcttraatggagtggtctctgccgcctcaccacttacatactctccctagcctattcctctttgacttccaccccatcattccatggaaactgttcctggtgtggtctccgagcatctccgtgttgataaaccttacgtgaccacagcaacttttggtattgttgaccattccctccttctcgaaacacttaacttcttatgtgttgtcaaacttgcctggttttcttcatctttgttgatgtttcatcatttttctttgcaggctcgtcctcttcccttgaccattaaatgttgaagttcgtcaattcttagtccaaaaccttttttttcctctcaataaatcctgtctccttggcaagttcatccagtgcccagagtttcccatctatagtctcttcagtgtcagatttatatttgtaaatcttttgtttttgcgccttgatgtggttgccttttagccaaatgcttctcaagctctctgtggtgaagactttaaaatttataataggtcacagatcrgcacttttctaaaatacagtaaaaatgattttctagaaaaataaggaaaaatttttattaaacagatgtgaaattactctgtaaatttcaataaaagcttctatatacttattctcctgttttgtacttgtcatgaagcagtaacaaatcgttgtgggtcatattttgaatagcactgtacaataactcttctcatgagtgtcccaaagatacttcaggactaacttcatgagcccgttatttcctccaacaaaataaacttcaactctgttcagtttttcccgctgcaaaattcagaaacctaagagtcatccatgactctcccccccatatctcacatacctagtccaccactaaatcatgtttattacctaaatattttacatattcctcttctgcatgccattcccactgtttctaccttaatttcagacaccatcatctctcacctggactgctacaacagccttttgactgattttccagcttccaattttgccccttattccttttccattctgcagccagaatgatcttgtaagatgaagatcttgtcatgacattgcttttcatccctttctgggctcccactgctgtcagagtaatgaccagcatcttgatgcagcctattgcactattgtcctgggtggtcttgaccttctttacatggcttccctatgtctccaccactctgcctatactctcctgaggatgcgccatacccccttctgcccaggaactttgtacatgctgtcctctttgctgagaattatctttttcttctcctcatttagttagttcctactcttctttcagacctgatcttaacatcacttcctttgagaaacattctcttatttgaaattaggtcagatcccacatggctctcctggcactctaagtcattttttcattgtattaatcttagtttattattttacagctatccactgattgtttaataactcactcatcctacaaggctataaactctgtgagaccaaggacttgtgaacaaaagtgcctagcatagtatctttcatatagtaggcacatagtacatatttgctgaatgaataaatgaagggtggatggttgtttgaaattatctttactatcttgttagttaatgtgatacttaaggtgctcaataaatgtgaaagtagttaatggggaaattagatgttgacatatttttaaagtattggaggagtgaggtgagaagggaactgtgtggacaacttgagtagacctatatagtgtaagcagagaacacgttggtgatgttttggaaaatgagaccagtggctgggaatttgaacatgattaccattgaaagacaaggtggagaataaatcctgggacatggagaatgtgctggatagggtggaaggagaagaagaaaactaaagtcttgggaaggactgagaacacttgtgtggtaattgtcaagagggaaagatagttcattgaggtttaggaagaaagaggcaggaactgaatattatgagatcatctaacagcagtatgctttactgttaatgaccagcaaacaatgtaagagaactaatgctcattggaaggttgaatttctgtccagcttcttgtattatgcagtatgtgttcatttcgttttatactcagtgctgttcatcttagctctgtgagatgctttgtttttctagatttgcacctcatataagaaggaaaagaaatgtgttggggagttgttttgtagtgacagaataatgtaaatcatatgggtaccttatggttttcctttccttgatttaatttcttttttattacagaatatctgttttctgattattaaggaaaacttaggtagagctctgtgattatggtatatatgtttacaataaattttataatgaagttgtgacatttttaaattctctaagtgtttcatagattttgtgctgaaaagaaaaccattgtatacttatttactacatttattcattttatggctatttattgtgcaactgctatatttaatgcactgtaagcattggagatacagagagaaataggacccaattcctgcttcaaagcagtatacaattaaggagaaagactaaaacaaatgaatattatggtaaatgctattaactggcagcacagagtgctggaggaattagaggagggacacctaactaaatatggagcttggtgggggtggggtggatagaaaggagtggagatgacagcacatcattttcagaggtgttgttaactggcctgaattctggaccccctttttcagccaaaagttgaaatcactagtggtgtgtgttcgtataaggaagacgacttctgttactmtctttacgtattcttggtaatacaaaagaaaaagatctggtgaccataatgtggggcagaagtagaaacataacttaatcctctagagccagatagatgtgccagttcccagttcaatcctttgaatactagtagctgactcaactttgaacttaaagctcagagactctcttttgcaattatgtttacttcttaatgaaattagagactcagaaaaaaagaaaccaatactcaccccataaaacatcttctttttagttaatacttaatatgttgccagtagaccctcaaaagcatttgattttaaatctgttttgttataacaaaagttggaacactagtttctccagggtatggtaagtacattcatgtggttatatggttagagtatttttatttactgcaaaagaaagcatgccttaacttctgttacaaagtagtacaaaaataattttcttttccttcatagtagatgacaaaattcctaaaacattccagaattcccttattcatcttggactcaacactatgaagtctgcaaatatatgtataggtcgaccagtgttgcttactagtttgaacggaaagcaagaggtaagagtctttttcatttccttagtttagaaatacaaactgaacattgcaaatccaagaatctaaactctgaaatgcttttgagtgccatggtagtcaaaggaaatgctcattggaacattttggatttcagatttgggatgcttagccagtaaacataaggcaaatattccaaaatggaaaattcaaaacgctcctggtcccaaacattttggataagggatactcaacctgtgtttgagatgtttctgattttaattttcaacacaagcaggaataaatgaaaaactgtattttaaaagacattaacatgtatattaactctgttcctttgctgtctatgactctgctgggcatagtagcccctaaaatgttatgtagagagaagtgttgcctccggcgatagtgacagtatttctccctgtcagttagttatatttctttataaaaatattattttgggggtaagaaggtcacctgttctgtatataaatattttactattctcccttgtttcagctgtttctccttgctgtcatttttcatacctgagattctaagcctggaacctttcctggatcatttttggcagcttggctttcttttctgctaccagccccttatctttcatggcttcctttgatgcttctctgatttgctggggatcctttggaaatactttgaaattttttgtctgctgatggcacccctcctattcttttcatttttctggcttatgctttaaaggtcctttactgtgtcttttagaagagaggactataaatgtgtgagcttaagctagaaattttcgctcctccctcttaacatttaaatctgataagacccaggttctgacaaagctcttgttctgtgtccctcactatttcctggatgtagtttaatttccaggctggattactttacaagttattttgccttaatatttttgtcattttctcattatcacctgttaatgcctttatcttttttcatatatttttcatatcttctaccgtcttcactgtgggatcattcttgatctttagaaaaagatgtaatatttattaaaaagtttatttttcatgagcccatgtagtatttaaattttttaaaaaatgcaatktatcttattgcaattggtatcagattgtaactctttttgggtaaagactstattttgcatatcttaagtgcttgactgtgcttagcattctaccttataaattgatggtattctatgaatatttattttctaacatttttatttcctctgtctggcaggtgtatacagcctggcctatggcaggatttcctggaggcaaggtcggcctgagtgaaatggcacagaaaaatgtgggtgtgaggcctggtgatgccatccaggtccagcctcttgtgggtgctgtgctacaggctgaggaaatggatgtggcactgaggtttggctcttttctttggtgactatctggatcaaagctgcccagtagaaatataagagtcacaaatgtaaaccacatatgtaattttgcattttcttgtaacattttaaaaagtagagagaaacaggtacaatgaattacaatagtatgttttatttaaccagtatatataaaaatgtattttaacatgtaattataaaaaattaccaataagggctgggcgcggtggcttatgcctgtaatctcagcactttgggaggccgaggtgagtggattacttgagctcaggagttcaagaccaacctgagcaacatggcaaaaccctgtctctacaaaaaatacaaaaaagaaaatttctgggcatggtggtgtgtacctgtagtcccaactatttgggaggctgagacaggaggattgcttgagcctgggaggtggagattgcagtgagctgggatcgcgccactgcactccagcctgggtgacagagtgagactgtgtctcaaagaaaaaaaaaagttaccaataagatattttgcatcctttttttcaagctaagtcttcaaaatcaatgtgtatgttacacttgtagcacatcacagtttggactagccccattttaaacatttgatagctacatgtgctgagtggctagtggccacttgtgttatattagacaacccaagctaaatgagtgctatataatttatagactaaggactttgattttccatgattagagtgtgccctgacattttaggtgagagtaattttcattgatgcatatttagcagtgtttttcaccttgacttgcagtgtaatcagggcttcttattttacagttgtaaagaaaagagtagattactgtgagtcaaacagaaacaagttttaattaagactatgcaagcaaagaacctgattgtatattttaacttgttgattattcgatttagtaaaacaaacsgtcattactatcagattttaaaataatccctcaccacagggtaattgtttgaatctacctatcaaggtagttaaggtatatcatccatcctcctggatattctattatctaataggatatcgacttggtttgcatatacaagtcttctcaaaaatcatttacaaaaagcatctttttatactttaatgtcaccttagtaatagtttgggggatgtgtttacattatatgtgagaattacaaaccattttctagtcatcagcttgattttaatatgttctcttttgctactattgtagattttagacttgagttttggcatattttttcctttataacaggagaatgttttcagagcttatagtaacagtttaatgaacaataaaaagcagaagggacaggagacaatatgttgagtaccggctgtatacagaagctttktatatattgcatgtatgtatacacacacacacakttacccttttctttttaaacagatgaaatagtctgaggagaacttgcctaatattttatgaggtagttaatagtactgttgagattaaactggattattcctcagactatgtcttaaaatggtgctacaggtagcagtaattcgttgactggaattagcatttatgatgacctacaaactagtcagacctcttgagcgcacagcagtcttaggtgagtaatgattgcttattagagaggactggatatgttttaaatgaaagctcaggttttaaaattttgttttaaaaaatcttatgttttaaaaaatcttatgtttaaaaaatcttaagtatagacaagaaagttaacttccagttgggaaaatcagtcattttagtctgcttaaatccttcagttgcaactgtaagattttattattaatagtaatgttagagctccttctagtggaaattattttatgtgcaactattatttttttaaaagcaaaattggtttgatatttttactgtttttacatgtatttgtaaataccttctattcagagtttaacaaaagcaatttaagtataacttggtttagagttccataaacaaaagtaaatgtaagcatttaaggagatacatgcaattttctcattagtttatacatatatttgattcatgaaatttccccctcattgtatttctctcttgttctctcttttatatgaatatatagttgattctcattatttgtggttagttatgttctattaaagttgccttgaacaccgttagcaaatactgaaccatttctcctagagggaaataygtatgtgtgtgtatatacatacatgcaacacacacaatatatgtagcgtatgtatatatataatatatatacatacacacacattttacatagattataaccttaaaactccaaagtaattctttctggtagattttattttctttattttacaaaacagaagaggagatttagaagtgttagaaatgttaagggacttgcctgaggtgctagtgctgggattcacactccctccaactgaccccaggcctggagcttcttcactacactgctgtgtcccctatcacttccattctctggtcatctctgaatgaaagctgaaacaaggcagagtgtcacctcatcctacatggtaacatgggtgttgggtcacccaaattttttgctgctcttccatgtcactaatgagcacaaatgctctgtgagtattgattttggggtacacataagtttttgggagttggtaaatttgcaaatacagcatccacaggtattgaggattgactatattgtattattactgataaaagtgattggaagccagacgcagtggctcacgcctgtaatcccagcactttgggaggctgaggtgggtggatcgcctgaacttaggagttcgagaccagcctgggaaacatggtgaaacaccgcctctacaaaaaatatatatgtataaaaattagctgagcgtggtggtgagcgcctgtgttcccagctactccagaggctgaggtgggaggatcacttgagcctgtgaggtggaggttgcagtgagctgagatcacaccaccgcactccagcctgggtgacagagcgagacctcatctcaaaaaaaaaaaaaagtgattggagaacaaggtattttttgaccagatgggcacacaggcacatgccaccacgtctggctagttttcttttgtattttttgtagagatgaatttttgccatgttgcccaggctggtcttgaactcctgagctcaagcggtccacccacctcagcctcccaaagtgctgggattacaggcatgagccaccatgctcagttccaatcacttacacttccccttgagctaaactgtcccccctccactggtcactgacagaactagacagctgtttgtctcccctcctgatatgggctgcttatgcacaagaggaggaggaaaaatgctcatgttctgagaactcctcaagagcagatttctttataaatgtatgatatttaggtgtgttcacttcctgcacttaagcaactctctggggtgacacagttatcattaggaaggaggggatctcatttttccttggtcatgccctttctccagaaaaaaaccttcattgtaaccattactcctctttttcctacttctgccttttcaagtaacatactgtataggacttaattttcttgaagaaataatttgtaagttatactgagagagtgaagtaagttattaattagagtctttctccaagctaggcaactttataaagggaattattagtttaggtcagcattttaaaaatgtttttgcctatgacaataaaaaatggatttttcatcagattctttgtatatacacatccatagataatagtgctcatatgtgtgcatgtgtgtatgtatgtgttagaagttaatgttttacaaagcagtatttaccctttctatattcagtgtaccctgcatttcttattctattaacaaagtgctgaatgaggctgactgaaatgatttcattacccttgtgttttgaagaacattgatttaggccactaaggcaccagattccaaatgatattttcatggctatatgtttctgaaaaatgcccatcatttcaaaattgtatacattatttattttaaggttgcaggtggattattcttttgaytaagtctatattataacyatatacatgtaattttacatcacagtttagtttctggtgtacctaatgctgatttctgttcccttcttatccttttacagtgacaaagatatggaaattaatgaagaagaactgactggttgtatcctgagaaaactaggtgagacaaatattttaaattgttttcttaagttttaagctgcaaggcatcagcaaataaagtgtctttgagggcttatatatgcatagtagttttcttcaaaatagctttgagaatattcccctcaatgaatgaatatacttttaagatagggatgtgctacttttcctggttaattggcagttgagcagtggaaagaatatatgacttgtctgtgraaagagtcagtggtagaattgagacttttaacctttgcattcttgccctttccagtgacagatgctatcttggagtgttggtttgggtgtgccattttcatttagtttattattgaatatggaatgcctggctatttgttgatgtgattgatagaatctgagatctactgagtgtggaggatttcagagaatcatttccttctgtctccagatggtgttataggggaatattaggtcctcaattttttatgacaattattttattaatactctgtctttgatttagtcttttcagataatagatgaaatatattgctatttaaacattaaactggtaaaaaaaattatgctaacatgtatatttaatatactgttttctagatggcaagattgttttaccaggcaactttctgtattgtacattctatggacgaccgtacaagctgcaagtattgcgagtgaaaggggcagatggcatgatattgggagggcctcagagtgactctgacactgatgcccaaagaatggcctttgaacagtccagcatggaaaccagtagcctggagttatccttacagctaagccagttagatctggaggatacccagatcccaacatcaagaagtactccttataaaccaattgatgacagaattacaaataaagccagtgatgttttgctkgatgttacacagagccctggagatggcagtggacttatgctagaggaagtcacaggtcttaaatgtaattttgaatctgccagagaaggaaatgagcaacttactgaagaagagagactgctaaagttcagcataggagcaaagtgcaatactgatactttttattttatttcttcaacaacaagagtcaattttacagagattgataaaaattcaaaagagcaagacaaccaattcaaagtaacttatgacatgataggaggattaagtagccagctgaaagcaattagagaaataattgaattgcccctcaaacagcctgagcttttcaagagttatggtatgatgtcttcagtttattgcacccaaaaatgttaaattcaaattaaaagacagttgacacttatgtaatgattgctcatcctcttttcctgtttttattttctgagtagtaggtatggtagaagatttcagttgctttgggagatgccagttaaatgggccatttgctatgctttggtatttttaggttgtaatgtgaattagtgacagccttgtctcttctaatagcatatttccacaattacctgtattggatctagaataagtatcttgtcatgctgggtcatctgtaatgactgaagggataaaccattcaaatacattagataaaacttcttaggaaatgtaactgtgtacccatctctttgcactgaagcaggtaattacgggaatggcttgactcaggaaactcagggcttctgctgcattgttattgccaagatcctttgcatatatttgctgtgtctgatctctctgcttttttcctttctcataaatcttatatatacatacatgtatgtatatatatgtatgtgtaaaatgaacccttagattggcattttgctcatacttatgtaccttttatactagcaaacgtatgtactcttcaagatggttagttggaaaaaaactgggattggtggcttgtctacctgtgttgtctgtgcttggtttttcgatcattgatctgtgttgtgtgggatggggcgttgcaacaatgtgggtgtccagttttttttttttttaaccaacatgcttcctctgttctgtggtctacagagagagaaagtcattgctgggtatcagtgtttgggctagttagtacatctttctggagggggagaaaaaactcttgactctttttgtgacgcaaggtaaagttaaattttataactcatgtttgaacttgtatgacaacatttataagaaacctagtaatggtgaatctagtgttttctactttttcttccaggaattcctgcccctagaggagtgttactttatggtcctccaggtactggaaaaacaatgatcgccagggctgttgctaatgaagttggagcctatgtttctgtaattaatggtcctgaaattataagcaagtaagtacatgatttaatagagtaaacttactattaaatatatttctaaaatgtggtttttaaaaatgattgtgtagtattctgtgtgatattttgtacactgaaatattttgcttcttaataaaaattgtttggaaaattctttttgaaagtaattttaagtattatagaaatattgaaaatttaggttagcttttatagacaaagctttaaaaacaataagaaatggtctttaaatgtattttatttgttacagattctatggtgagactgaagcaaagttacgtcagatatttgctgaagccactctacggtactctttatttttaaatgttttggaattaataatcaaggctgtattagtcaaagtgagatactagcaccttatacaaagcataaacagtagtacaaaaattatagtgatagtggtagaagtagattatagatctaatgaaattctatttctatctaatctttaaaagtttgataaatattattaaattacataaagtagaagaattaagacatagtgtttgataagtcatgtgaccttgtttgagcatagaaatccatgactttctttaggtgcttaggtgtttctaatatgcttagcttttctagtagactgtattattgtatgtagctctttatactagaactttgttatgttatactttgcttcaaagggacaaatcttttgcccattaaataatgactctggctgggtgtggtggctcatgcctgtaataccatcactttgggaggccaaggcaggaggattacttgaccccaggagtttgagaccagcctgggcaacatagtgggaccctgtctgtttaaaaataaaaataattggctgggtgcggtggctcacgcctgtaatcccagcactttgggagaccgaggcaggcagatcacctgaggtcaggagtttgagaccagcctggctaacatagtgaaaccccgtctctactaaaaatacaaaaattagccaggtgtggtggcaagtgcttgtaatcccagctactcgggaggctgaggcaagagaatctcttgaacccaggaggtggaggttgcagtcagttgagatcgtgccattgcactccagcatgggggacaagagcgagactttgtctcgaaaaaataaaaataaaaataattagttgggcatggtagcacatgcctgtagtcccacctactaaggaagctgaggcaggaggatcactgagctgggagatcaaggctgtagtgagccatgatttcactgctgcactctagcctgggcaacacacaccccgtctcaaaaacaaacaaacaagcaaaatcaaaacagtggtagagacatagccatattatgagtgacgttacgtttgaccaagttatagaccaatatcctaatactcattacagtgtaacattgaaatctaaattccctgagctcaagtgatcctccccctgtagcctcccaagtagctggaactataggtgagcaccaccatgcccagctaatttttgtatttttttttctagcaacagggtcttgctatgttggccaggctggtcttgaactcctgggctcaagccattctcctgcctcagcctcccaaaatgctggctgtcttggtgtttaatatcataactactgctcttgaatcagaaaacccaccatttttgaagtttatttttttcccgcaatgatagtagatgaagtaagcagtttgtagtcctagtactgtactgaaaatttgaaaactagtggtacaccttattgtttagtatgcttttgttgttgttgtgttcatggcagttgagatttccttctgtgagagaattcacatctgtttatgggagaattgatcatcttgcaagtttttattttaatggtttaaaaataacagggcatttctagtttatgtcctttggtttcaaacctgctccaagggatagtatctctggcctcagcttctgaattgatccagtcataacaacttaatgggcattactggggagagttcttaagagactcttatcttttaagcagcatactctactcaattacccagccttttaatggagggcagatagaatagaatatgaagttagtgaaktagtattttgggctagaatgaatctaaggatttttagcttaacattataatatctttataatattaagtgaattctaaatttgatatgttgcatttcagttaaaaaaattaaaactaagtaaaacttaaaatcaaatatagatgagagatttcattttacttgtttgtttttagacacccatcaattatttttattgatgagctggatgcactttgtccgaaaagagagggggcccagaatgaagtggaaaaaagagttgtggcttcactcttaacactgatggatggcattggttcagtaagtatagcactagtattgattctgtgtagggttaattcttaatacttatgtgtagtggtaaaaactattgaatgtgtcagagtctttggatattttaggataaaggaaaaatattagccatagcaactaggggaaagatctgtaaaataatttgctttagtagattacttagtaactgctaggacaacatcataacctggcaggttttttctagcatataaaatactataccatgatggatttattttgtgataaatgctgttagctttaaaacttgaagcaaagatcagtaaggaagatttagcagttaaattttaggggattttattttatttttatttattattattgtttttgagattgagtcttgccctgtcatccaggctggagtgcagtggcgcagtctcagctaactgcaacctccaccttccaggttcaagcgattctcctgcctcagcctcctgagtagctgggactacaggcatgcaccatcacacctggctaatttttttttaaatcttcttagtagagatggggtttcaccatgttggccaggctggtctcgaactccttaccttgtcatctacccgccttggccttccaaagtgctgggattataggtgtgagccgctacatctggccttaggggtttttattaagaaatgtcatgagtaagtcttattacccatgtacaaatggactctttcaaggctttgtactagggaaatgaaagaaagtgagaataatgcgaaatgttttgtataacatttaaaaaaaaacttattcatattaccagattctctcataggggatatgttctttcttttttttttttttttttttttttttggagacagagtttcgctcttgttgcccaggctggagtgcaatggcacaatctcggctcaccgcaacctctgcctcccaggttcaagcaattctcctgcctcagcctcccgagtagctgggattacaggcatgtaccaccacgcctggctgattttgtatttttagtagagacggggtttctccatgttcaggctggtctcgagctcctgacctcaggtgatccgcccgcctcggcctcccaaagtgctgggattacaggcgtgagccaccgcgcccagccgggatatgttcttttattaataaaaactatatgctaattatggaaggaacattcataggactaataagagaataggcatgaacaaaaattttctaagactcctgacatccattaattagaaaaatacacttttcatgctggattatgaataagtaaagtttttagaatcataatatgttagaaccacaataaattttagaaattatgtagtatcaagcctcttttgcacattaaaaagctggtcatttagaatttttttttttttatactttaagttttagggtacatgtgcacaatgtgcaggttagttacatatgtatacatgtgccatgatggtgtgctgcacccattaactcgtcgtttagcattagttatatctcctaatgctatccctcgcccctcccccaactccacaacaggccccagagtgtgatggtccccttcctgtgtccatgtgttctcattgttcaattcccatctatgagtgagaacatgcagtgtttggttttttgtccttgcgatagtttgctgagaatgatgatttccagtttcatccatgtccctgtaaaggacatgaactcatcattttttatggctgcatagtattccatggtgtatatgtgccacattttcttaatccagtctgtcattgtgggacatttgggttggttccaagtctttgctattgtgaatagtgccgcaataaacatacgtgtgcatgtgtctttatagcagcatgatttatagtcctttgagtatatacccagtaatgggatggctgggtcaaatggtatttctagttctagatccctgaggaatcgccacactgacttccacaatggttgaactagtttacagtcccaccaacagtgtaaaagtgttcctatttctccacatcctctctagcacctgttgtttcctgactttttaatgattgccattctaactggtgtgagatggtatctcattgtggttttgatttgcatttctctgatggccagtgatgatgagcattttttcatgtgtcttttgactgcataaatgtcttcttctgagaagtgtctgttcatatcctttgcccactttttgatggggttgtttgtttttttcttgtaaatttgtttgagttcattgtagattctggatattagccctttgtcagatgagtaggttgcgaaaattttctcccattctgtagcttccctgttcactctgatggtagtttcttttgctgtgcagaagctccttagtttaattagatcccatttgtcaattttggcttttgttgccattgcttttggtgttttagacatgaagtccttacccatgcctatgtcctgaatggtaatgcctaggttttcttctagggtttttatggttttaggtctaacgtttaagtctttaatccatcttgaattaatttttgtataaggtgtaaggaagggatccagtttcagctttctacatatggctagccagttttcccagcaccatttattaaatagggaatcctttccccattgcttgtttttgtcaggtttgtccaaagatcagatagttgtagatatgtggcattatttctgagggctctgttctgttccattgatctatatctctgttttggtaccagtaccatgctgtttggttactgtagccttgtagtatagtttgaagtcaggtagcatgatgcctccagctttgttcttttggcttaggattgacttggtgatgcgggctcttttttggttccatatgaactttaaagtmgttttttccaattctgtgaagaaagtcattggtagcttgatggggatggcattgaatctataaattaccttgggcagtgtggccattttcacgatattgattcttcctacccatgagcatggaatgttcttccatttctttgtatcctcttttatttcattgagcagtagtttgtagttctccttgaagaggtccttcacgtcccttgtaagttggattcctaggtattttattctctttgaagcaattgtgaatgggagttcactcatgatttggctctctgtttgtctgttatcggtgtataagaatgcttgtgatttttgtacattgattttgtatcctgggactttgctgaagttgcttatcagcttaaggaagttttgggctgagacagtggggttttctagatatacagtcatgttgtctgcaaacagggacaatttgacttcctcttttcctaactgaataccctttatttccttctcctgcctcattgccctggccagaacttccaacactatattgaataggagtgttgagagagggcatccctgtcttgtgccagttttcaaagggaatgcttccagtttttgcccattcagtatgatactggctgtgggtttgtcatagatagctcttattattttgagatatgtcccatcaatacctaatttattgagagtttttagcatgaaggttgttgaattttgtcaaaggccttttctgcatctattgagataatcatgtggtttttgtctttggttctgtttatatgctggattacatttattgatttgcatatattgaaccagccttgcatcccagggatgaagcccgcttgatcatggtggannnnnnnnnnnnnnnnnnnnnnnnnnnnnnnnnnnnnnnnnnnnnnnnnnnnnnnnnnnnnnnnnnnnnnnnnnnnnnnnnnnnnnnnnnnnnnnnnnnnnnnnnnnnnnnnnnnnnnnnnnnnnnnnnnnnnnnnnnnnnnnnnnnnnnnnnnnnnnnnnnnnnnnnnnnnnnnnnnnnnnnnnnnnnnnnnnnnnnnnnnnnnnnnnnnnnnnntaaaattctcttttttggttgtgtctctgcccggctttggtatcaggatgatgctggcctcataaaatgagttagggaggattccctctttttctattgattggaatagtttcagaaggaacggtaccagttcctccttgtacctctggtagaattcggctgtgaatccatgtggtcctggactctttttggttggtaagctattgattattgccacaatttcagatcctgttattggtctattcagagattcaacttcttcctggtttagtcttgggagggtgtatgtgtcgaggaatgtatccatttcttctagattttctagtttatttgcgtagaggtgtttgtagtattctctgatggtagtttgtatttctgtgggatcggtgctgatatcccctttatcattttttattgcgtctatttgattcttctctctttttttctttattagtcttgctagcggtctatcaattttgttcatccttccaaaaaaccagctcctgggttcattaatgttttgaagggtttttttatgtctctatttccttcagttctgctctgatcttagttatttcttgccttctgctagcttttgaatgtgtttgctcttgcttttctagttcttttaattgtgttgttagggtgtcaattttggatctttcctgctttctcttgtgggcatttagtgctataaatttccctctacacactgctttgaatgtgtcccagagattctggtatgttgtgtctttgttctcgttggtttcaaagaacatctttatttctgccttcatttcgttatgtacccagtagtcattcaggagcaggttgttcagtttccatgtagttgagcagttttgagtgagtttcttaatcctgagttgtagtttgattgcactgtggtctgagagacagtttgttataatttctgttcttttacatttgctgaggagagctttacttccaactatgtggtcaattatggaataggtgtggtgtggtgctgaaaagaatgtatattctgttgatctggggtggagagttgtgtaggtgtctattaggtccacttgttgcagagctgagttcaattcctgggtatccttgttaactttctgtcttgttgatctgtctaatgttgacagtggggtgtgaaagtctcccattattattgtgtgggcgtctaagtctctttgtaggtcactcaggacttgctttatgaatctgggtgctcctgttttgggtgcatatatatttaggatagttagctcttcgtgttgaattgatccctttaccattatgtaatggccttctttgtctcttttgatctttgttggtttaaagtctgttttatcagagactaggattgcaagccctgcctttttttgttttccatttgcttggtagatctccctccatccttttattttgagcctatgtgtgtctctgcacgtgagatgggtttcctgaatacagcacactgatgggtcttgactctttatccagtttgccagtctgtgtcttttaattggagcatttagtccatttacatttaaagttaatatcgttatgtgtgaatttgatcctgtcattatgatgttagctggttattttgctcattagttgatgcagtttcttcctagtctcaatggtctttacatttttgcatgattttgcagcagctggtaccggttgttcttttccatgtttagtgtttccttcaggagctcttttagggcasgcctggtggtgacaaaatctctcagcatttgcttgtctgtaaagtattttatttctccttcacttatgaagcttagtttggctggatatgaaattctgggttgaaaattcttttctttaagaatgttgaatattggcccccactctcttctggcttgtagagtttctgccgagagatccgctgttagtctgatgggcttccctttgtgggtaacctgacctttctctctggctgctcttaacattttttccttcattttaactttggtgaatctgacaattatgtgtcttggaattgctcttctcraggagtatctttgtggcgttctctgtatttcctgaatctgaatgttggcctgcctcgctagattggggaagttctctttgataatatcctgcagagtgttttccaacttggttccattctccccgtcactttcaggtacaccaatcagacgtagatttggtcttttcacatagtcccatatttcttggaggctttgtttgtttctttttattcttttttctctaaacttcccttcttgcttcatttcattcatgtcatcttccatcactgataccctttcttccagttgatcgcatcggctcctgaggcttttgcattcttcacgtagttctcgagccttggctttcagctccatcagctcctttaagcacttctctgtattggttattctagttatacattcgcctaaatttttttcaaagttttcaacttctttgcctttggtttgaatttcctcccgtagctcggagtagtttgatcgtctgaagccttcctctctcaacttgtcaaagtcattctccgtccagctttgttctgttgctggtgaggaactgcgttcctttggaagaggagaggcgctctsctttttagagtttccagtttttctgctctgttttttccccatctttgtggttttatgtttgtttggtctttgatgatggtgatgtacaggtgggtttttggtgtggatgtcctttctgtttgttagttttccttctaacagacagggccctcagctgcaggtctgttagagtttgctagaggtccactccagaccctgtttgcctgggtatcaacagcggtgtctgcagaacagtggattttcatgaaccgcgaatgctgctgtctgatcgttcctctggaagttttgtctcagaggaatacccggccgtgtgaggtgtcagtctgcccctactgggggtgcctcccagttaggctgctcgggtgtcaggggtcagggacccacttgaggaggcagtctgcctgttctcagatctccagctgcgtgctgggagaaccacggctctcttcaaagctgtcagacagggacatttaagtctgcagaggttactgctgtctttttgtttgtctgtgccctgcccccagaggtggagcctacagaggcaggcaggcttccttgagctgtggtgggctccacccagttcaagcttccgggctgcggctgctttgtttactgaagcaagcctgggcaatggcgggcgcccctcccccagcctcactgccgccttgcagtttgatctcagactgctgtgctagcamtcagcgagactccgtgggcgtaggaccctccgagccaggtgcgggatataatctcctggtgcaccgtttcctaagcccatcggaaaagcgcggtattagggtgggagtgacccgatattccaggtgctgtctgtcacccctttccttgaccagcaaagggaactccctgaccccttgcacttcccgagtgaggcaatgcctcaccctgcttcggctcgcacacggtgcgctgcacccactgtcctgcacccactttctggcactccctagtgagatgaacctggtacctcagatggaaatacagaaatcacctgtcttctgtgttgctcacgctgggagctgtagaccggagctgttcctgttcggccatcttggctcctccccgaactttttgttttttactgtctagtggcagaaagtaaatatgtgaaaataatataaaggtttggcactaagtcacttatatactaacgtgttagtaattttaagagtctgtaagagaagggttgtcacctggtggaggctgcctgactaactggttctcagtcttggaacagtacctaggagtgattttcatgtcccaggttgattctcaggttataaagttgaagaattcagtgttattagtaggctggagatgatagagttgtgaggacagactgacccatgataataacacttacaagagaatcatgtataaaatagtgtcctagtttgtccatttacagtaagagatgtgactgttaagcagaccaaatgtttgtgtttatggatgaccatattttcaccttgatggcaaatatagagagctgtcttataattacaagggttcttggtaggtaggaaatcagatgaaaggcttagtgttggagaatcttaattatttcaatctgctgtctctttctctgccactgggataagcctgttgtggattagtattcttgcctttgggcaaggaatggaaacatgtgatactgatgttttagtctgaatatttttaagggtctgtttttgtacttctaaacttataattcatagattcgctgtagtccatgcattgtctgttggcacattcagtataattgattaggtttgagctttttttaaatttttttttttaacataaattgcattccagttatgcttgtctctgggtcatctgaatagaatattggataatttctacaggtggctgatcatgatcatagttctttattatttggttttcctaatttcattttcagagagtaaaaatacctatatattcaaatgtggctgatacttggatattggttatattgttgactcttattttcaggaatttaaaaatgtatccatattaaaaaaactagtctataagcgaagactttttagataactttctaatagaatcttgttctatttgagtattatatgtgtcagaatcctgactttcaagtaggggaaaaggactgtttaaaacaattaaaacaattatatggtacatattatatatatgttattttttatgagaatgatacagttaagatgtgagaagtaagagagatgtcatagtagatggagaggtgagtattgtaaaactttctacaggaggaagcatttaggctgaacactgaaaaatgtataataaaagtaataaatgtataataaaaatgtattactaataaaagtaattgataggtaatgaaagcgtaagaaataggacttagtatcctggacagttagatgtttcatccttgtctatacagccagtgtgtgcctctcacttttttttttctaactttcagaaaaataaatttattttcattttattttgttaggaagtaagtgaaggacaagtgttggttcttggggccacaaatcgccctcatgccttggatgctgctctccgaagacctgggcgatttgataaagagattgagattggagttcccaatgctcaggaccggctagatattctccagaaactgcttcgaagggtaccccatttgctcactgaggctgagctgctgcagctggcaaatagtgctcatggatacgttggagcagacttgaaagtcttgtgtaatgaagcaggtgagtgtggtttgctatggtgagtctctattgatgcacttatctccagtttacttacatacaaataatttatattttacagatttcttaatggaagtagctttgtttctaattataaaatgtgtaatttttatttgaaaaaatttttattggaaaaacctagatgattcagaagactataaaaaaaaataaaaatcactcaatcctacctctaaaggataaccaccattatagtgtatacagtcagccctccatatccttgggctcagcatctgaggagtcaaccaactgtggtctgaaaatattcaggaaaaaaaagttaaaacagtaaaaaataataaaaacttaaaaaatatagtatcacaactacagttgacccttgaactatgagggcttgaactgcatgggtccacttatatatgaatatttttcaataaatatattggaaaattttttggagatttgcaacaatttgaaaaagcttgctttttctttagcttactttattgtaagaatacagcatataatacatataaaaaatatggttaatcagctgtktatattattggcaaggcttcaggtcaacaataggctattagtagttagtttttgggggagtcagaagttatgcatagttttttgactgcacagggattggtgtccctgacccccaagttgttgaggggtcaactgtatttacatagcatttacatgggatcaggtaaaagtaatctagagattatttaaattatacgggaggatgtgtgtagtctatatgcaagtactatgccattaacgggcttgagcagtccttagattttggtatcttaggggtcctggaacaaatactccatagatactaagggatgactatatcctactagacttctccagagtatacacacacacacacacacacacacacacacacacacacacacacacacacacggacatgtaatcagatccattggtggcggtattgatgatgacaatatttattgatatattgtgctgtgctgtggaaatcagggagaagtgtaaactggagaatcacaattttccttaaaattgagtgtcatgctggacccctattaacttcagtgggatggtaccaagtttgagaggccaaagaagggacccagagccaataaatgaaacttagggcttatttggcagaacttacttacagggcggcccagtggtgatgggctggacaggagaactgcaatcacttgcaaaaagcatgcagcttgtatagcattttcacttagcatcctccccccagcaacttccacatggcaacctcctttcttaagttattgctttcaggtgcatctgccatatactccgcaccagcatacccttgcgtggccctcacattcttatgcctttctgtcatgagatccctggggccaggtatgtggaggagcattgcagccagatgctgcagtagcaatataaactacaataacaaaaaagaataacaaatataataacaatcatactgtatagaaagtttttcaagggcttaggagttgattaaaacacgtggttatagggttttaagacttagattctgtagtggaaatatgggtatttaaggcctgcatggcctgggttagatcgtgagagtcatcaggaatacatacacaacaggttttaattaatccataggttccgcccttgtgggggcagttaagatgtccagggccatgcaattttacaaagaagggtgcatgacacactatctctgtctcactgctgtcatccactctagcccatcattgtgtacagcctacctacagtggggagtgacattaacttgctcctttaccaggcggaaaatatgccatctcatgttgttggtggtgggaaacttgctgcatgaggtgctgttgtcgctgaaggggaataggtgaaggtcactataccaagtatcgaagtggccccaggtactcatgttaactgccttggtgtggcatggcaggcccacagcggaggagagggggagctctccgcagacccagcagtctgttttcttctggagagagataaccatctgcacccagtcagcaaagaggtttgcggcacaccatctatgggcaaaaggtgagttgtttagtgggtacaagaaaggacaagtcctggccatttaacaagacatggggagttgtgtcattctgagagagcaccacccctggcagcagcctgatgcctggtttacaataccaaatggactggctcccctctgtaatgtgttgcaggaggccagaggaagacagtggaggtatagtgtttcatgagaggatgttcatccccttgcacaagggaggactaggattcattattttagaattacagtggagagtatggtatgaaataggtgtgacatatatatcctgttctaggcccttcccccatggagcagaaaaactgaaccatcgggctggtttgccatttcccagaaccacgtaatgatgtgctccccagtaggttggtcctgtggcaagggccatagcagattactttgtgtcccaggttgggggcaaaggtctgctgtcccttaccctgtctacctgtatcctgatggtcgtatcacatccttgtgttagaagagtatacatgatggggtgatgagaatgtgcatatttattcagtttgtgcacggctgctggtaagcagcgtgtccacagagccaactcctataggagttgtttcaacagtccattcaatttgttcagtcagccccactgctgtagggttgtacggcaggtgaaaatgccagtggatatccagggcctctgcctattcttgtactttatatctggtaaagtacgagccctagtcattgttaattttttttttttttttgagatggagtttcgctcttgttgcccagactggagcgcaatggcgcgatctcggctcactgcaacctccgcctcctgagttcaagcaattctcctgcctcagcctcctgagtagctgggattacaggtgtgtaccaccacacctggctaattttttgtatttttagtagagacaggtttcactatgttgggcaggctggtctcaaactcctgacctcaggtgatccacccgcctcagcctcccaaagtggtgggattacaggcgtgagccactgtgtctggcccattgtcactattgatggagacgctgtaggctgcacacatctgttctggtccttttatggtggcatgcttgctgggttatgctcgttgtagccctgtgcaggtttctgcacaagttaaggcatagtggcagccatccaataggggcaaagatcctatgtagtctacctgccaccattgtgctgggctctggccctgggtgatctttctggtatcaggtggcaagggcctggggtgttcctgtgcatgggtaagacattgctgacagatgtgtactgtgtctttgtatcatagtggcaggctccaattctttgctatggcccaaagggtaagttgtcccctatgtcctgtcttcttttgtaaccagttgaccacatcgtctgtggggactcccttgaggagacgaatgcaggttaatttgtctgcctgttgatttccaggttggtgtagatgcagtgtggggatccacatggtagatcattttatgcatcccccagatgcaatggggaatgtccttctacatgtcagggcaccaaaggaggtgacctgctactgtctagtcctgtgcttcccattgtagtagccacatggtgagtccctttacattggattaggtaaaagtaatctagagattatttaaattatatgggaggatgtacataggctacatgcaaatactgtgccattttatataagaggcttgagctgtccttagattttggtatcttaggggtcctggaaccgataccccatagatactaagggatgactgtatcctatcagacttttccaaagtacacacacacacacacacacacacacacacamgcacgcacacacatgtaatcagatgcattgttggcagtattgatgaagacaatatttattgatatatcgtgctgtggaaatcagggagaaatgtgtactggagaatcacaattttccttaaggaatgtcatgccggatgcctgttaacttcagacagcccacctgtgagtacacaggactgctgggtctggcttatagaggaggaccatcctggcagcttgcagctcagctcattggctgctatgtccttggcctgtatcatcaatccagatcctgtcagtggatggctggatggctatgcctgctcaagtgcaaggattgcctcgtgacaagctgtttgtgtaccaggcctggtcagtcattgggcggtcagacattgggccctgtctatcctgtatgaaggagagcatctgtggaggctcagcagcctccctaaaagactatgtgacagttgttacatagatgacagggccaagcactgaatggagctctgagctcaaggggctattaatgtgctcctttgttgcaggtatgtaagccatttggccacagtctgtgtctgggcattcccagacttcagtttctggaagataccctttagccaacctgctttggggtactggctgcatactagcatcaggaccccttttgtaatgtcctctacttgttgtaaggcataatgtatagcacagagttgttgttccatcacactgtatctaactgcaccctttttccgtagctgggaccagaatcctaaaggcgcatatgtatgtctctgcctttgccacgggcctcacccaaacccctcaaggtaactggctacatctagttcacaggctgtctctgcacctgaactcacaaggcttgtatttatttcactgtgacttcagctggttcaaaggcctcatccttcttcgtggattagtctcagtgggcccccttcttgactaaacagtataggggtctaaggagttgggccaaatgaggaataaaatgatgcccataccctaggagtcctaagaagatttatagctgctttggtgtcacacgatgtgagtaggcctgcaccctatccataatggcagactcaagtatttggctgataagcctggactctggatttttgtctgtgtttatagctcatcctgtttgccagatgaggcagcaaggtgtgagggcgcagtttgaaagctggaaaaagactcagaagttagcacgatatcatcactgtaatggaaaatgtgtaccccttccaggacctccatggctatataaatatccctggggcaagatggtaaaagtctattgttcttcccaggtgaatgcaaattggtcttgactctctgcggcaatggggatgctgaagaaggcattggttaaatcaataacagagtggtagtggtatgtgtccagtgcctctcccrccctctttagaagggaggtgatattgggaacatgtgcatacrttggggggactgccttacttaattcccagtaatctagtgtcattgtccatgtcccatcaggcttccacatgggccgtacatggctgttgtatgggctgtgcactggccttgtaatgcctccytgggctaactccttaacaatccctgtggtttcattatgtccccccagcaggcagtattgcctcagtgctactacttgctgtgtggggttggcaactatactggtgtccatttcgcattccccttggtcacatgcttcaccactctcagtcagaactccccagcagttgtttggagggtcaagcctgataagatatccattctcaagatgtattccaagatgggagctatacatactaaatagggttttggtggcagtctctcaacttgtaatactcagacagttcaacctttctgatccccatccataaccatcttttgccattttagccccttggaaccaacgaatgtcaccatatatgaaagtgcatttggctctagtatccactagggcacgcacagtgtgtttattcttaggcgaccaatatatagttagttctacatgtggcctctggtccccaggtaccctggccaccattactcttatcagggttctggggccttggctttcatccagtctaacagggttgacacttgctatccctctgcaggaagggtggcgggctgaacctgaggctccttagtgaagcactcttctggtgtgagcttctgccacagtctgaccagaacagcattaggctgtttatctgttttcatagtagctgttcctgccactaccaggttgtgccacatttgttggtcagtcaccctgatgggccccttggccgtctcctttcctttggcgcccttgtctttcatcccagcagcacgtaccctttgcctatgcagtttctccatttctcataagttggtggctgcttgggccacctgagacactggctgtcctactagggggctctgggtagacactagcacaccataccattggttgagtgcagactaagatggtgtctttcatgttggcagtgaaaagctctttgttggaccttggtgatgttcagcatagatagcatgtttcatccctaatttccagatgatgtcctgcaattcctccatagtctgccatcacaaaggagatatggggatactgccctcatctggccacgcttcattgcagcccacaaccacccagctaaggaggggcatggcctgatcctcattgttggcaccatagaggtgctgcctcagggctgggtggcatgcgatgtatgccattccactcatcttgagtctggagagtataacaccctccatccccgtgtcccatagacagagaagccacctctcaatcaactgtctctcttcctgaacccaccttctgcccagctccactagttccatagtggtgtagtgctgcattgtggtatgctaccatctttcaggcagagacaagttttgtgggtctactccctgcaggcaccattggtctgactttatcttggtagagagaacaggacctctatgggcttatcccagtcctcactctgctcctcactagagctctccactgggtccctggacttaggaagatttagtcatatagtcctaacttggcatgggagctggcgacccttcaaacaggctacctgacaagctgggatttccattttgtcatcctgtttctgcaggtaggacagtagggtctctgatgttttaggttgagctagtctggcatctctttctactcatagttcttcctataacagacaacccctggcctgtgctgggagctcagcctcagtggctgctgggagcacagtcaagaatggccagccattgtggctgccacagctcaggcatctaacttttgcttagttagatccacccccctgcaacagctcttccagacccttcggtgtttttggggtgttctgtactcatacattgggtcccatccatcaaggatagtggcttttgggcaccacataaatgtgatggtcagcccgggacccccccttggatttcccctttcctgatcttacggtctcggtgctcatgaaatttttctccaccttcctgctgggttcaccagttgtggtactgagtccgtgttaacttctgtaaggatggcaccaggttcaagaggcaaaagagacctggagctagcaaacaagacatagggttttattagggagaactaacatacagggacagtccagtggtggtggactagacaggagaacctcaactgcttgcaaaaagcatgcagcttatatagcacttttatttggcaccctccgtgcagcagccttcacgtggcaaccctcctttcttaagttattgctctcaggtgcatttgccatacacccactcccaccgtaatggcattaatccattcctgaggattaatgttgttacggtctcatggcctaatcgcctcccagtggtcctacctcttaatacmataaaaatatcaattaaatttcaacatgagttgtggaagggacattcaaaccattgcagttattttagagctttagttcagaaatacaaatgcaataacttttacctccaaatcattgactcatagttgtctaatttagtaggctttgaagaccctgcctttagtctttttgaccttttatctggactgatatatgtagggaaagaggctcaagaaggaaaaacagttaggaaaagaaaacttggaagagatatttaggaatctttgaatatcttactgttggtggagaaaatcgtttttctttcattttatttgatcattaccacaatttctaggttataggaatcacagttgggagagactgcaggttatgtagactatcaaggcaaatacaaacattcttttggtacattttgctctaggactgggtctcactctgtctagtttctgtgaagctgcttctagcgtcacagggattagtgggcctggtcgtagaaatggattacctagggatcaaaaagcagaagtatcagtagatagctttgcttctttcattgcataaggtggtaatgaagagtctggattgctgtgtaggtgttgctctgtaggacttgccatgttcagcatgccttactagagactttttgactttctaatacattttatgcactctagaaggctctggaatttttgctgtccagaaatacactgtctgatgaaggaaagagatttgtaaacaactacaaatataatgataaactactcataaaaatgtaaaaatgtagtgacttctgtgaggaaagcaaatactgtggttaaatagaaaaaatgacatctaagaagaagcttagagtaggagttctacagtgagaaagtgagaaaaggaaaacattatttgattgaatcctcctaccaaccctgtgatagaagtatcagacagactcaagaaaggcctcagagcgagtatccagcagagctgggatttaaagccaaggtcatcttacttcaacttcatgctcttaattaaaactaataaaaggtggatcttgtttagaggggtataagactttataatttaattttagcgtatgatactaaggagagcatcagttgataaagtagaaaatatgcaggtgttgaactgatctattttcccctaatctagcaatgaatcagattatgaagagtagttttatttatgtatttatttattttgagatggagtcttgctctgtcgcccaggctggagtgcagtggcgtgatctcggctcactgcaagctccgcctatgaggagtagtttttaaaaagattagtgttctaattacagaatccagtagggaaaatatgtttggttttgtgtatactgtcccaaatactagtgtatgttgtattatgtagtatcattttcttaactttatatagcagaataaaatttgaaaacagtatgctggaatttttgcaagagaattttctaatgaggcagggtggtatagtgtagaataggttttgagagttggacagacttgcttttaaaatcaggcttgtgatcttagacaggttctatgccttatctgagcctcagttttctccatttgtaaattgaggagattggagtagatgatattttagtgtcataatgcattatgacattccctggacgtaagggagaacaagaaaaaaatggaagaaaaagaaggataggaagaattagaaaaaggaaagggagaaagaaggtaaagaaaaagccctaagcctcttcaggcctcatcggctattttcagtgctcttctcttttgtatctgtgtgaatgacttacacttatgtagttagggttttcccatggtgttcttagaaacagtgctataaagcagactaatgttggttgtgaagtgcactgcattttctcattggaacagttttataatttctgactaaagacagagtaaattaccagtttgattagtagtgtgacttagaaagctgaaacaattgggaaactataagcatttgaagtagtaggactatgttccaagtgctatagaataggcataagtgtatcccacttatcgaacataacagcagcattcctgtttactatgatgtgtgcattgagcatagggaaaaacattcattctgcatggtagatttgaactactctcttagctttaaataaaaagaattggacatttggtgttgcattccacctcaggttacagcagttattagggaataatttgagttgctctcagtcctttgaaataactgcctacacaagtttgaactcacatctgttttttgttgttgttgttgttgttaaacatgataagtttccttgggcaggtgcaagcagtcacaatcattacactgatcttagaattacccagaaagttagaataattgtttttttaaagagtcatggtaatatcttaatatttggaggcaatattaatgacttctggtatattataggtgctcaataagtatttgattagttgaagaataatttgagaaatatgtgtgaaatctaggagacataattattaccctatacacccttgataaaggaatagtgtttattaattttagagttgagcttagttttgtttgtaaacaccttgggaatcatctctttttttccactctttgttgccttcagaaatctctgctttgcgctgaggaaagaactctgaagtggttattcctgcctttataagtagcaatgagcaagttatatgttctgtgtaatcttcaaaaatgtaggacagtgaggctgctttaaataactggttttagtccatttttgccttcccactgacagatttccaagctttggctctgatacggcctttaactacatttgtttaaaacaagtgcttttcaggaggtgttttcattgttcaccagttgtgctatgtttaaatggagtgcttgtaaatggccactggcatatatgggtagttaaggcatcttgaccagattcgtgagtttgacactaagagactccatctccagatgtatttctgggtatgtaggttaaatctatctctttctattatttattcttccccacggaattcaggtttgtttcacatgtttttaattcaggaccaatcacttagagcaaagagtcttaaacattattatatgagaatcacctgtagaatttactaaactmggttactgaatccccctgacaagagtttctgattcagtaggtctgagctggtgcctgagaatgctaacaagttcccaggtgatgctaatgctggtgctaatgcggctgatctggagaccacactttgagagctattgacctatagggcattagttcctaaacctcattatgcatcaggctcacctgggaaactacacattcactcatgctcacagtcacattcccactcataattaagtgtttaagggagttaggaagctggaggcaggatctataatgttttccaagtgattttgaagcagccagtcttgcccttgtctgtgattggacatttgattcgctgatttaggcaagtggttctccaacctatgtaagaagcatttgtagagctcgtgaaaacacagttctggggtctatcctgctgattcctstaggtccagaaggtccaagtggggccccagatttgcatttctaacaagcttgcaggtatgtcattgctgctggtccaagaactgtactttgagaatcactgatctagggcaaccaactacccagtttttggagattctctaactgatttaaataactggattaaatttagggattgaaattctttgaccgtctctaatagtgttgttgcgtttcctcccagaagttttttgtgatagtaatgtgctcttccaaactatcatttaactttgccactcaagagaaaatgaatgtcttaagtttttcagttatgtataatggttccgaataaaactttaaaagtggcaaataattctgaaaaaaagtcacaagtaaaacagttaattaacaattcagaatacaagtaagagtacagacatgtgtatttcctagttaagattgtggacctgcatgtttgtgctttttatatgttgtgtctctgatgattttccctcttctggactgccgcatagtgaaggaagctctgtactttttaacaaaagttgtgcacgtatgtctagtaatggcatgaattgaagtgattcagaatttcttagaacatagtgagctatgcttcctgattgtttctgtaatctaaaggttattgtttgtaggatatgaatacaaaacctctgtagtgtttgtgtagattgtacatgccttttcagaggatagaaggtttacaatccatactttgtgagagtgataatgcgtcttttacagtgtgcttactctcaacatctctaatcttttattccaggttactaagtattttccatatcttttaactttgttcccataatgaatatgaaaattggaagcactacaataggaagtgttgctttcaacccttagatctcacattatctgagcagataacaacgtttggtgtttgtgattgggtgtgaagcttattttcaaaagttatattttctttataattaattttttagctagagtgtggtttgatatgtcgtgacttgtccaaagagctaatgttttgtagttcacctttttaaagcaaagagcagctgcattttgaaatgttttatctcaaatgggcaagttgtttacaagctagactctaacacatcctgacatttagtgtctgtgtttgtattcctgctgggattaggctgcctttctaattaattagttgcatagccttttattaattccctcaaaatttataatgttttaaattaacaacatagataagcatactgcattttttgggaaaacatgaaatrttaattatgtagcagtgacataagtttcgtaaactctgttgaatgttagaagatgcttacaacaatgttttccaaatatagggatttattataaacttatccttctaaggctgcctgtgccatttcaggagagtgaatataaatagatcttgatttcttcaagaagtggacttagtcattttgtttatggtgaaaggaagtatttgctttgcgtctctaagaattgtctttagcatccttgttaattacacatcatttcaacatgttcttaccaaattctcaggccttgataaggtagcataacagaacaggaagaattaaaactcatatttaaataattattttgttattacagcacttaaatctgtctagtagcaatacygaatctaataattgtaactttttctgagatggaaaattttatctcttgtccagtgttctgagatatttttagctcatttgtccctccacccccaactagcttactttaacagggatttatggagcatctgctatgtatgtaatagtccaactcttatgaaaggttctgtttctaatattttttactattttttcaattctgtcaacgttgttttctaagttagaattaaaatattgatactgtagaaatttgatattttaaaataaagtccagggaaataatgggacttattgcaaagcttatggtgagctctacattcagatgctatcattatactttatcagctgataaacattgagcaagctrttcaacctcttgggttttayatcctcaccagctaagtagggataacactatatggttttaagagttcttatgaggtttagtaatatagcctggcagcagtggtgatggtttatataggcccttgataagtgtcacttaatttctccttttcttctttagcctctggaaaattgatatttaaacattttctaaaaattgtattttacgtatatttatgcatttctctggtagaagcttgtttggattttggcaatttttctgatatgaagtgttcttgattatcctagtataaaagatagggaamtctggcagaatcctttgctttgctaaagtagtgattttcactgaatctgaatcagtaaaaatcttgccygtcagtaagaatatgcagactagagatatggcttgtttttgggtagcctccttgacagattttctttctttttgagacggagtcttacgctttttgcccaggccggagtgcagtggcgcagtcttggctcactgcaacctctgcctcctgggttcaaatgattctccttcctcagactcctgmgtagctgggattacaggcatgcactacaacgcctggctaatttttgtatttttaatagagacggggttccaccatgttgaccagtttggtcctgaattcctgacctcaagtgatctgctcacttcagcctcccaaagtgctgggattacaagcatgaaccactgttctggctgacagattttcttgctgaactttgggtcatcccagatgtgagttcgctgtaggcgtgtcatagagcaacagtagtaggaatacaagttaaattgatgtatatgtcatgataatcagtccaattcagtggtccccaacctttctggcaccagggaccggttttgtggaagacagtttttccatggacctggggtgagagggtggggatgatatccggatgaaactgttccacctcagatcatcaggcattagattctcataaggagcagacaacctatttccctcacgtgcacaattcacagtggagttcacactcctaggagaattaatgctactgctgatctgataggaggcggagctcaggtagtaatgcttgctcgcctgctgcccacctcctgctgtgaagcccagttcctaataggctagtaccagcccatgggccattggttggggacccctgctctaattaatgcattttacaagggacgtattattgtagctagataaataagcagtaattttgcagcatatttcataaggcaatgaattttctcctctgttttataattctaaaatgtagttatagaatgttatatttgtgatattgggatttgtcctactgtgtaaatattatggatattatatagagatggaattatttttatcagtgaagtgggtattttagtattacttttgctactcatttgagatgactggaactgaatggtttgtttcagaaaaagaggtggtagttttgattctgtttaagctctaaatgacatatactatttactttgctagtagaagattttctgggttgttttgccaagactataaaaatataaaacttgaggaaaggttttctttctaattaaaacaatcacaaaaataaaaccaggctatctaaataaaagttatttctgagagttattcttgattcttttttctcttactctttttttatctaatcctgtcagctctgttttcatacttattcagaatttgacctcttaaaaaaattaactactttcactgctataccacagttcacaccatcatcagctcttgtctggactattgaaataccttcttcctgcctactgtttctttttcacctctcatctatctttattttttacattgtctaacttggaagactttgaattataggttttgaagatgaggacaggtctaggttagagatatggacttgggagttgttagtagttaacatggtgaagctgtagaaagaatgaaatcactaacagaaggtgagtagagttccttcactcattgagccaggtactgcactagatggtggggctacctcaatgaataagatagacttgggctctctcctcatgaaactaagactcacagggaaatggaacagtatataagataagtacaatacagtgtgttgggtgttatgtgaatgatcagggtgcattcagaatgctaatacagtagaaaggtcttgggaaatactgtcattcaaaggttgggttgttaaaaaatatttggtataggaaactgaggagtggctagagagatgggaagagaacccaaagaagtggtgactcagatgaaatgaggtaagcactcagtgaggaaataatgggtattggttcacactcattgagtacttggattatgtcaaccactgtttgaagcaccttgtatgtactracacatttcttcctcacagcagctctctgaggttctctttattttgtagttgaggaaacttatgtcagattaaggaaatttcccaagatcacacaggtaataaatagtggaactaggatcaacagtgttgatcacagtagagaccacagttacataaagtgcttagttccctacttgggaggtcatgggagtgtggaagagagacattctagtggtgtcttgtgcctagctgctggattgcaataaattgaagggtgattgattgagagttgaagaagcagatatagtgattgtcaatttcttttttagttttgttgatgtattattattaatatttagagtttttatgctttccataaaagagggataaatatagttagtcctccctccttgtcatccctccctgtctccagtaaaaaccaaatctaactatatttctttattattttcctggttactcttctcttacctgggccctgacttagtctacccagctgtgaatcttcagcttctcttggcatacaaattgtactctaatcaccttttttcaaataacaaaaacaaaaacaaaactcagtattttagtaaggttgttaagccaggtaggtaaataatgaaatatgaaaaatttgaaaatggaaactgtatttagggcagtttgaaacctaggactggtgaagtgaattaatcttgatgttttacaactataggttggtgcaaaagtaattgcggctgggcatagtggctcacacctgtaatcccagcacttcgggaggctgaggcgggtggaccacttgaggtcaggagttcgagaccagtgtggccaacatggtgaaaccccgtctctactaaaaatgcaaaaattagccgggtgtggtggcacatgcctgtagtcccagctgcttgggaggctgaggcacaagaattgcttgaacccaggaggaggaagttgcagtcagccaaaatcatggcactgcacttcagcctgggcaacagagcaagactgtctcaaaaaaaaaaaaaaaagtaattgcaaaaactgcaactagaatagaataatcgactactctttcagagataatttagtacattcccttatttcacagatgaggagagactatgtgatacatttaaactcaagcagttagtgagaaataagccttggctcaaggttcagatctggagacaaatgtgccttccacagtgccattacctttaaaagcaacttttgaaagtgatagagggtttggaatagactggctcctttgatcagtttaagttacagcagtcacttataatataaataaggtgagaactacaataacctttaaggatattctatttgattttttaaaaatttatttattaatgggcagtgagaaatgaaactttcctagtggtacagcaagtgatacttagcaccttgtctatacttaatacagagttgagggagaataaagactccaaataaaacaaattttttagagttctgatattttgaggaaagtacattttaaaaaaaggagacttagatttttgttatacttgctttgttttcatatatgtgagtatatcattagcaaattttatgctcaacttttagaatttaaatatgagatccagatgtccaagttttatgttaccttttcatataattaagtttctgtaggcaggtagtaattctaaaagggattgttaacttctctgatcagtttaattttattgttagtttctaatgaaggagcttaattgtgatctcaaaaataacatataacttagcaagcactgagtataaaattgtaggattttataaacatggggacaagatgatgtttgttgtttgcatctggagcagatggttttgaagagcatgggtttagaataattgctcttgtccagaattggttatattgaaatattgatgtagagcttgaggtggagcaagtcatatacaagtcatacgttggaaacagtgtgttgacatttggctctctaaagcattttgccttttcttcccttcaaggtatcttgttttccagtcttaaaaattttaagagcactggaaaataaaataatgaaaagaagatgatacattttttgttgaattagccacacctcttttttatttcaaaattgtgtttcttaacatagcagtattgcttctgcatttgcttacatttttaaaaaattaactccaaagttagtgagaagaggaaatgttgatggcttactttcaaccatattccttgatgtacatgtgtccatttgttcttctagttaattgtcttcaggtttctaaaaatatatgtatttttaaaaatttaatctttcattatgggttccagtatggccttattagaaatggtgatggccaataatttaaacttagcatcatagaattttaagttatttaaatttgaataattagacaaaatacattttaatcttttcatttaataaatgaggtaactgatggccaaaagggctaagtcttatttaaagttgtgcctgagctagttaatggcagacctagagccatggaggattggttgcattagtattatagctccaaggatctttaatttctgtaagctcttgataatatatttaacatttaattcatacaaattctgtttttcaacttacatgttattttcaagaatagcatttgttgtgtaaaataggatacgtttatatagagtccagaatcaatacttcagagtgggaaagaatctgaaggcctgtggcaggggtctccaggatctctyacgtttttatagcttttgcaaatcagtaaacttacctattgttcttttctcctttctaacaatscaccatactttatatcctcacatacctacaaacgaagtaatagagttggatgtaggtttatttaaacatgttctttcatatgtataagactgaactctggagacttaggattttatcttttattattctatagggcctcctaatctctaaagygctatgctcattcttgtctctatttatatgctgttccccctgcttggaatagtcggctgcctctttggccccaattcccattttatcaggttaacatcgattcacttttcagggctaattacttgaacttagatatatgtttcagtttttcatttgtgaaataaaggaatgtactaaatgatttctgtgagagtcattaggtaaactaatccttcctgaaactgagttcgatgttcctgacgtgtttttgtgccactttgttctttccatgtcacagtacttggcatagtttataataactacgcgttatgatgtatctctcctattagactgttagctgtgagagattgatttgccttcttgtgtaccctcatatgtaagagctcagtacaattgtttaatgaagtaattatgtctaggaggttcttgttgaatattttgagtgaatagatgagttaatattgaaaagagtgcccatgaaagagtaactcctgtggtcaatgaatatatcttctcagtggctttatgatataataatactttaattgctttcctttaacatgaattgtaactgaattggcaagaaatacaagaacaggggttccattactgagaactatttttaaaaaatattttcaaaaccagttcggtgcagtggctcacacctgcaatcctagcactttgggaggccaggccaggagaataatttgaggccaggagtttgagaccagcctgggcaatgtagcaagactctgtctctaagagaaataaaattagccggtggtggtagtgtgtgtctgtagtcctagctacttgggaggctgaagtgggaggattgcttgagtctaggagttgaggctgcagtcagctatgattgtaccactgcactccagcctgggtaatagagcaagaccttgtctcttaaaaaaaaaatcagagtaacggcatgtaaaaaatgctgttctctctcctcaagttttgtttttcttctttagtcaccctgcctttcataccaaccatattcgtttgtataaaatattctggcaaatcaaaactctttgtgaatactttaaatcatataatctatattttgtattctagtatattttgcacactagtcagcttataaatatgtcctgcaatgattctgagcctgatcaggatttctgtatagaaaattcccaaaactgtttttattatttttttaaagaggtagggtcttgcagtattgccgagactggtcttaaactcgtggcctcaagtgatcctcccaccttggcctcctgaagtgctgggattataggtgtgagtcactgcattcagccccaaaaccttttttatggatttattttcctagatcatcatgtttttaattattctgattagaaagtactctaaataaagatattttcctgttttagtaataaaatattaaggaataaacttcattgtatatgtacatatggatacttagaactgagttttttcattttattaaaatttttttaaattaatagactttttttagagcagttttaggtttacagaagaataaagcagaaagtacagataatttccatgtaacttcccttttttccagcttctcccattattactgtcttgagttagtgtggtacctttgttataattgatgagctaatattgatacaatgatatttcattttaaactgcagtttataatttctaaaactaccatccctcaatgttatttaaaccagctctgtgttgttgctttatttatagtttttttttacttgcgccacactttttacatacttttttaaaataaacttctttctcaatgtattgcatgtatacataagagagcataagctaaaatatccatgtgttttccaaagtgaacacacttgtgtaaccaccactcagatcaagatacagagcattactagcttcctggtacctctctcagaccctttcccagccctacatgctcacctcaacccaaaaggcaaccactctcctggcttcgaatgccatagatcagttttgcctgttttgccttctcttctttcacttgttttatggtttgggagcttcatcattttattctgcatagcaggagttcatttttattgctgaattygattgtttaagtattatgagtaatgccatgaacattcttgcacatgccttttgctgcacaaatgtatgcatttctgtctattatttgtctaagagtggaattattgggttataggattcttgttactaaatactgccaaaacgtttttgtagtgattttaccaatttacctttctacctgttgtgcgtgaaaattccagtttcttctcgtgggtgctgacatggagtttatagcagtatttcattgtggttttagttccctgatgactgagtctgagtactttttatatttgaattgaccatttagatgtctttctttgtgatgtgcctgtcaagtatctattcaatttttctgtagggttactttttaaaaatatattgatttgtggaagttattaatatagcttagttgtgagacctttgttagatatatgtattttaaatatcttctactctgtggcttacatttttattctctgtagtatctttttgaggaacagaaagtttataattatatatttattataatatatattgatataaaggatccagttcatcagtcttttycttcgtggctggtgatttttgtagctagcttaagaaatctyggtcaaatctactgttaggtatattttctcttaccttcttgatgcttttattgtttttcctttcatgttgctatctttaattgcttcactttttttcatatagatgtgttataccagttattgaaatgaccatcaatttctgccttgcttctgtgttacctttgttgtacataaatcaagggtttgtgttcattttagattctctgctctgcctcaatggtcttttatccttgtccacaatactgaaatgtcttcaatactttcagccttataaaaagtcataatttctggagggtaagtgatatttttttaaaaaaatggtcatcaaaattttcttgactattgttggcactttgcattcccatagaagttttaaaatcaatgtgtcgggttcttccttctccccacmcagtaaactggcttgcattttgattggaattattaagtctttcaatcaatttggagagatttgggaagttaataccttgtaatccatgaacttcttagattccttcattttattttagattttccttaatttccctccaggtagtttggtagttttatgtgaaaagtcttgcatactgttaattagatttattcttaggtactttggttttttgaatgcacttatgaatggcattttgtaaagtttcacttgtaattattttatgttagtatagtcacggactgcataacgatgttttagtcaaggatgaatggtatatactacagtggctctgtaagattataatggacctgaaaaattcctatcatccagtgacatcataaccattgtaaagtagtagtgtaattagtattattatttttaaatttggtgtagcctaagtggatagtgtttacagtagagtatagtaatgtcctgggccttcacatttgctcagcacatactcactgacttacccagagcaacttccagtcctataagcctcattcatggtaagtgcccacacaggtataacattttttaatcttttatactatatttttactgtaccttttctttttctatgtttagatacacaaatacttaccattgtgttatagttacctatggtactgagtatagtaacatgccttacaggtttgtagccttgctgtatagtaggccataccatctagattttcataagtagactctttgatgtttgcacaatgataaratcacataaagacacatctctcagaatgtatccctgtcattaagcaatgcatggctgtatctagaaaaagtaaaaaaaaaatttttttttttttttgagacggaatctcactttgtcacccaggctggagtgcagtggcacgatctttgtaaatcttttatactgtatttttactgtaccttttctttttctatgtttaggtatacaaataccattgtgttacggttacctacagtattgagtatagtaacttgctgcacaggtttgtagcttagaagcaataggctataccatatagcctagatgtatagtaggccataccatctagatttgtataagtatactctataatgtttgcacaatgacaaaatcgcataaagacacatctcttagaacgtatccctgtcattaagcaacgcatgtctgtatctagaagaagtaaaaaaaaatttttttttgagacggagtcttgctttgtcacccaggctggagtgcagtggcactatctcagctcactgcaacctctgcctcccgggttcaagcaattcttgtgcctcagcctcccaagtagcttagtagrgacagggtttcactatgttggcaaggctggtcatgaactcctgacctcaagtgatccacttgctttggcctcccaatagaaaaagtaattttttttgtattgactgtgtctacctaccttgccaaatgcacttattaattttaatagtgtgggccaggcacagtggcttatacctataactccagcacattgggaggccaaggtgggaggatcccttaagcccaggagcttgagacgagcctgggcaacatagtgggacaccatctctacagaaaatttacagaatagctgagcgtggtggtatgcacctgtagtcccagctacttgtgaggctgaggtaggaggattacttgagtgtgggaggttgaggctataatgagctgagattgcaccactacactccagactgggtgacagagtgagaccctgtctcaaaaaaaccacaaaaaacaaaattttagtagtgtgtatgtaagttcttttgagttttttatctatcaattatgttatagttttctatgtatacatttcaaataatgagttttaaattttattttgttcaactctacacctattctttgtcttccttgacttactatactacataggacctctgacagtatttaatagaagtggtaacaatagtaatccttatctcattcttgatttaatagaaagtttacaaactgttacttaatattaagaattttttttgttgtatgcgtgataaggaggtttgtatctattcctagcttttaaaaaaatataattaatgatattttatcacatttctacatttattgagatagtcatatgaactctttattctattaatgggaagaatgatgttgattgatttttaaatgttacatgaatctggcattcctgtaatagagccaagttgtcacaattttgtaattctttttaatgtattgatcttttggctgatgttttgtttaagatatttgcacctatgttcatgagagattgacctgtaattttttttccttgtaatgtccctttaagatttgaggagcaagattatgctacccttgtgaatcaagttgggaattattttttctctggaacaattttttaaaaattaatgtcatattcatccttaagtatttggtgacatttatcagtgaagccatctgtacttagaattttctctgtaggaaaggttttaattatagatttaatttctttaatatctattgaaatattcaaattgtatagtttgtttgtatattagttttggtaaatttttttcccctagaaacttgttcattttatctacatttcaaattatttggcataaagttattcctactatcctcttatctttttaatggcagtaggttttgtaatgatgtctgctttttcattcctagtattggaaatgtgtctcttctctcattttcagacaaccaacctttggctttactggttactttttttaattgtgcatttgttttcttcattatttccctccttcttttttcttttaggtttaatttcttctttttctaatttcttaagatgaatgcctcactgactgtcagtctttttttttttttatctacattaagcctaccagtgtccccttcagtactgcagtagcagcatcctacagattttcatattatatttgtattattattcagttgaaaaaattcagttttcattgtgattttttttgagccatgagttatttagaaatgaattaactgattttcaaatatttgtgtatttcttagcatttttttgttactgattttgttattcattctcctgaggtcagagaactatactttatgatttcaatccttgagttacatggagagttgctttgtgtcctagcatagggtcagttttggtagatattccaggtatgctggaaaacagagttattttattattttgatgttgttttttaatatataccaattaggataagtgagttaactttgtttttcgtatcttctggtatcttctatatattctttttaaaaattttggctaataagggaagtatgttaaaacctgcaggcaaggtctgtttctccatttagttctgtttacttttgttttatgtattttgaattttgttatcaggcatgtattaatttagaattttgtatattcttggtgaattgacccttttattaccccgagtgtctggtgatgcctcttacttaatgcctatttgatagtagatataggtgcrctgttatccttccatgtatatttcattctgtgtatatttgcatagtattccttttattcttttactttcaacctttgtatattcttatatttcagatacatcacttgtatgcagggtaaattggggttttatttttttaatccatctgctgttgtcattgtttaaattcaagtacttaatacatttatatttagggtaatatcttaaaatacttaggtttaatgtasttccttatttgccccacttgtatgttttttttcctgttttttttttcattcttttggaataggcaagtatttttattatttcatcctcttcccattgtctttttagttaaacattttaacttggcctttagtgaatatcctatgtttgtctccttggcttattaggggctagtatgcattgcaaacattgcaacagatgtttacttattatttgggtacattaagttgtgctatgtttattacaraatcagtctttgtactttacttttttggagacagggtctcacctgtcacccaagtttagtgactgagtgcagcagcatgatgatggctcactgcggtcttgacttcctgggctcaaacagtcattgcgtgtagctaggactataggcacatgccacgaagcctggctaatttttgaaatttttttagagatgaagacacacagtgttgcccaggctagtctcggactcctggatgcaagctctccgcccgtctcagcctcccaaagtgttgggattacaagtgtgagccaccgtgcccaacttgtactttactattttttaacttttgaaaaattccatgtttctcttgcctttgttttcctcctgtgagttactattttctttctatgttcagaggagtggagattttatccagcttaaattctgtagtttgtattagaaataatagagattttgttattttataaatatgtttatattataatattaaatatacttttaaaaaccacatattgcctgtgttttctagaccccttccttaaatgaaaataatgtatcatttagtgtcagattttatgtttgcatgatattaaaaaaaagtggcaggaaaattactagaccattttccctgtttcagtttttctgtctcagtagggtgatgtatctggtccaaattagaaatattggcaagtattgccagatactatctggcattgaagtattttgattacatccatttatgttagatattttaggaacagcttaaattttcccaggccacaaggtactgtttgatacaacatggcactgcatagatactcctcaacttatgatggggttatgtcctgaaaaaactagtgagtcaaaatatgtgtgtggctgacttggaactgtagcttgctgtggctgcccagcgttgcaagaaaattactgaattcatattgcttttgtaccattgtaaagtggaaaactcttttttttttgagacggagttttgctattattgcccaggctggagtgcaatggtgcgatctcggctcaccgcagcctctgcctcctgggttcaagcgattctcctgcctcagcctcccaagcagctaggattacaggcatgcaccaccacacccggctaattttgtatttttagtagagacgtggtttctccatgttggtcaggctggtctcgaactcttgatctcaggtgatccgcttgccttggcctccyaaagtggtgggattacaggcatgagccaccacacctggccataaagttgaaaagtcttaagttgaatcctaagtcagggactgtctttatcactgaatattttttaatgcttctgctccatttaactaatgaggatgtcgagtagtaaatcgacccaatttatcatcgtcttagtccagtttctgctgctataacaaaataccacatacttggtaatttacaaagaacagaaatttatttctcacagttctggaggctggaaagtccaagatcaaggtgctggcaggtttgggctcagtctctttgcatccaagatggtgccttgaatgccatattctctaaaggrgaggaacgttgtgtcctcacatagcagaagggtaagaaaaagggcaagcctttcttatagctgtattaatccattcatgaggctggagacacctctcattaggcctcacctcccatcagtgtgtcattagggattaagttttaacatgagttttggaggagacaaaaacattcataccatagcaaacataaacatgtcaagaattgtaaagggtctgagattttactctacttttactctattctaacaaattttgtgagtggctgcagaagagtcaaaggaaagaatattgcagcaacataattagctagagtagcagcatttgcaccagttcctgagcctcagttttcacggagtgatacagagggctacctgacacctgagcctttataggcttgcatcacagtaggggagccttgaattgtagaacctgaatcttttataatggacagtaagcatgtctatcctttgctttggagagagacactttcttttcctgcataccaacatcctttaaaagatagtcttgaacagaggcagtcagtgattttactctcaagcagaagtgcaagagatgtgaagaaccatctttcagcattttggaaggcagataaagcaagtgggtatttgtaagatgtcctaaagaagtgacttgctgtctttaggaagcaggggatctatttttggwgtatgtttgtactattcactgctttttcttggtagagaaagatactcaaccctctgttttgtggagttttgtatcttctttttattaatgcttctgtttatatataaaagttcaaataagtgaaaacaaaatgatggagtggtatcattttaatttagtaaaaatgtattgaggtatagtgttttgaacaagaaaggttaaaaaatcatgggagctagctggtgttccaggataactttagatattcagactggatttctgagagatctctgagattaaactccttcaaagtggaattttattaaacactcttaacacaaagagcatatagtgacttactgtcttctagactaaaggtcgtcacagatcaaagggctctaaatctcacagcctgatggagaggacattcactcttgtcaatgtttaaatttcaagcaaatagcaaagacaaagaacttagtatctaacttctcaagtcagcatggtatctttgaatttattttggatctctctaaatttgactttgttgactatcttcctggctgctttagtaccttttattctacgtcatcctagtttttctttcccttttaaaacatcgtttctttttatgctattcaattgatgggctttcctaagattgagccttctacacttattcctccatccctgacccctcactagcctccccttttagatctctcccttgctataatatcaaatcttacatgtatgcacatcactctgaagtttgcttcactcttgtatttcaaaatcacatttccaactgccacctgaatgtttgcttgcaggtgttttcccagtaccttaaaactttgtaattctagtttgaatgtatttaccaaaagggcaggggcaaaagcatgttttaattttaatattttactcttttaaaagaagttccccaaacaaattattttgataaatctttttggctttttttatggatgttgttttgtaaattctattttatatttgtaaataatgctttctcatattaagtatttgtcatattttcattgccaaaactaagtgcttggatttttacatttattcttcacattcttccacctctcttccaacctctcatcccctcccctacaaggacaaaatgttttaaatgctgtaatcttgcatggggtttgggttttttaatatttttattggtgataattctgtcacaggatccttagggtgtcacttttccagccagaaacctctgtggccggtggcacctctgcccgagttatatcctcgggcccactgggcttgttctgcccacttggtccagcaggctgtacttggcttgtgctattgacctggatcctacacctgccaagggtgagccaggcgcagagcagtgaagggggtgtgagtgagcccgaggtccggccactgcacacagccaggcatgctggctgcagtggagtggacagccccaggtgcaggcacaggcaccggctctgtgtgaggatgtggctggaccaggcataccacaagtgttttccaccgtgggcaccaggtaacgtggtggtacctggaagcttggagatgttggaaacagcagagccccaaagagagtgtcacagctctggtatcacagctctgatcacagcccttgcatctgggctccccagagggccacagctcctcttcttctcattgcccaaaatgtggtgaccagtgggcgtgtttcagtcctgtttgtgttacagctctttcagtcctgccatttggaaggtyctgagttcttgtscagcctttaggaagaatgaggtatgtggacagctggagggtgagcaaggcagagaggagcttcattgagcaagagaacagctctcaggagacctgaagtgggtaggtccttctgccatcaggtcgtcctgatgagcgtccagctctcagcagagaggatacctggagggggtagctgctgtccacaggcaggccatcctcacaaatgtctagctttccgcagagaggacacctggagtgggtagctcctttctgcaggtaggtcatcctgatgagtgtcctgctgtcagtggagaggagacccagagtgggtagcttctttctgtaggcaggttgtcccagtgcatgtccagctctcagtggagaggagaccagaatgggtagctcctatctggcatcccagctagtgtccagttctcagcggagaggagacccagagtgagtagctcctgtcctcaagctggtcagcctgatgagtgtccagctctcagcagagaggagacctggagtgggtggctcctttctgcaggcaggttgccccaacgagtgtctacttctcagcggagaggagacccggagtgggtagctcctttccataggcagggtgtcccagtgaatgtcctgctcttagtggtgaggagacccagggtgggtagctccttctcacagctggtagtcctgacatcccagtgagtctggctgagtcgggtttttatgggcttcagaagggaggaagtgcatgctgattggtccatgggtggccatgggcaggcccagaaaaagcaccataagttcttggtctcagctgcagactctacccagctctgacagcctgccctccatgcttcaggctgtccctggcttaaaggtggggcttcaccagggactcactcctttctgcccaggagcctctctgcctcctgctgccatcaatcatgtcgtccatggtgctggggctgttcatgctgaggggcgcttgcaggactgcgccaagacaccctcagcctccctcacatactcattggcacccaaagtctggaggggaccaaggtggaagggagctggactgtcagtgccaccttgagcacatgaacacctaggtgggtcatgacagtggcttggctcagccttaactttggtctgaaatcagagcaggcaaaaagtttttctgggactggggagaggccaggcagtagaagcaggcacttcggagcctgttggggcagggggtgcttcctgggttctcgagagtggagggatacctgggtccacagccatggctgggcagctgcagctgtgcctgggtgagtggggctcacaccccaccaacttggaaaagagcagggctcctgcctgttcccagctcccactggcttcgtggagtatgcagccctggccacgcctcccccactgcagccagtgtcttcactgttgccactccagatgggccaccggagccatcaattcagtctgtatttatgaaggaaaagacaaatcttgtgttactttcctctctttataggtctctgtgccttgcggagaatcctgaaaaaacagcctaacctccctgatgtcaaggtggctggactggtgaagattactctgaaggatttcttgcaggcaatgaatgatatcagacccagtgccatgagggaaatagcaattgatgtcccaaatgtaagtcatttatgtcccacactagctacactgtttgaattaaactctgaaaaaaatttagagttcagggagactgacttcctaggctaaactttaaaaaaatatttttcttaattgaaagttttattgagatagctgtaaattcagtgcagttatacgaagtaatgtagggagattctgtgtatcctatacccagtttcctccagtggcaacattttgcaaaactgaagtacaggctgggtgcagtggctcatggctgcaatcccagcactttgggaggctgaggtgggcggatcacttgagcccaggagtttgagaccagcctggttaacatggtaaaaccccatctctacaaaaagtacaaattagttgagtgtggtggtgtacacctgtagtcccagctacagctgaggtgggaggatcatctgagccctggggaatgttgaggctgcagtgagccatggttgtgccactgcacttcagcctgggtgacagagcgagaccctgtctcaaaaacaaaaaacaaaacacccaaaaaactatattacaatactaaaaccaggatacccctattgatacaatccattgatcttactcatattttttcagttttacttgtgtgtatgtgtttatttagttttatacaattttatctcatgaaaaggtttgcgtattcatcacagatactaagtaattccatcaccacaaagatccctcatgttgtcttttataatcacacccacctcattcctcccctcatttctaaatttttatttcagaacctttatataaatggaatcatactgtatacaaccttttggaattagcttttttcacatatgagtaagatcttttgtctttctgtgtaccttaacttatttcagtaggcataatgttccccagattcatccatgttattataaatgacagtattttcttctttttataaggccaaataatattccattatgccacatttctttgtaccattataccacattttctttctctgttcatctgttgagggacacttagattgattccctatcttggatgttgtgaataatgctgtagtgaacatgagagtgcagatatcgctttgagatacttcatttccttttgatatgtacccagtagtaggattgctgaatcttttggtaacttaatattttgaggaaccaccataccatttttccataatgtctgtaccactttacattcccaccaacagtgtacaagggtttctttttctccatatccttggcaacacttatctttcatctttttggtaatggccttcctaacagatgtgaggtgatatctcattatagttttgatttgtattaccctgatgattagtggtattgaacatattttcatataccagttagccatttgtacgtcttcttttaacaaatgttactcagatcctttgcccatttttaatcagattgtttgtttttttttgcttttgagttgtttgagtttcttaatatatattttagtattttggatagcagccccttacctcatatatggttcacacatattttctcccattccataggttgtctctttactctgtttcctttgctgtgcagaactttctggtttgatgcagtcctgtttgtcagtttttgtttttcttgcctctgcttttggagtgtatccaaaaattcattgccctggacccatgccataaggcttttccttatgttttcttctagtagttttacagttctagatattatgtttaaatatttaatccattttgaactgattttttgtatgtggtgtgagaagactggccagtttcatgtgtggacatacagtttatcatatggatatcatgtggatatacagttttcctgacaccattttttaaagagattgtgctttcgtcattgcgtgttcttcggtacctttgtagatcaattgactgtacatgcgtggatttatttctgggctctctatttgtttcatttatttatatgtctgtttttatgccagtatattgctgtcttgattatcatagctttgtagtatattttgaaatcagatagtgtgatgcctacagcttttttttttttttttgcttgagattactttgactatatggtgacttttatgtttccttatgaattttagggttgcttttcatattttagagaaaaatgccattggaattttggtagtggttacattaaatctgtagacaattttgggtagtatgaatattttaatagtgttaatttttaaaattcatgaacattagacattattctatgtatttgtgtcttctatttcatcagtattttatagttttcagtgtacaggtctttcaccgtcttggttaagttttttcggtatatttaaaaaatactattgtaaatgggattttctttttttaattttttggatagttgttagagtatagaaatgctactgacttttgttgtcgattttgtatcctgccaatttactgaattcatttattggttttaatcttttttttttggtggaatatttagggtttcctttatataagattatgtcatctgcaaacagacaatttttttcttctttttcaattcggatgctttttatttctttttcttgcctaatttccctggctatgactttcagtactatattaaatagaagttgcgagagtgagcattttgtcttgctcttcatcgtagaggaaaagtttttagcttttcattgttgggtatgatgttagccgtgagcttgtcatacatatagcgttatgatgttgagatacattctgtctaatgtattgagagtgtttatcatgaaaggatgttgaattttgtcaaatgctttttctgtatctattgatatgattttatgatttttattcttcgtccttttaaggtggcgtatcatgtttattgatttgcatatgttgaaccagcagccttgcatcctagggatgaatctcattggatcatggtgtatgatccttttaatgtgctattgaatttggtttgcaaatattttgttgagaatatttccatctatgttcaccaaggatattggcctgtaattttctattcttacagcattcttgtatcacattaatgctggcctcataaagtgagtttggaagtgttccttcctcttcagtttattggaagttttgtgaattctactaagaatttaaagaagtgatgctaatgcttgagaagcataacttctcgggtcttggagttttctttgttagggagctttttgattattggtttattcccctcactcattattggcctgttcagattttctttatgattcatttttggtaggttgtatgtttctgggaatttctttctttcttcttggttggccaaattgttgccatgtaattgttcatattagtctcttatgattgtatttttgtggtatcaattgtagtgtctcctgtttcatttctcagtttatttactttaatcttcttcttttttttttttttttttttttgagacggagtctcgctctgttacccaggctggagtgcaatggcaccatcttggctcackgcaacctccgcctcctgggttcaagtgattctcctgcctcaacctcctgagtagctgggattacaggcacccgccacaacgcccagctaatttttgtatttttagtagagacggggtttcaccatgttggtcaggctggtctcaaactcctgacctcatgatccgcccacctcagcctcccaaagtgctaggattacaggtgtgagcaccrcgcccagcctactttaatcttctttcttttttttatagtagtctaggcaaagatttgtcaattttgcttatcttttgaaaaaacaactaatgttgatctttttatattcttacattgatcttttaaattatttttctagtctccatttcatttatttctgctctgatctttagtatttccttccttctgctaactctgaacttattttgttctttttctatttctttgttgtgtaaaattaggttgttcatttgagatatttcttttttcttaatataggtatttattgctataaactttcctcatagaactacttttgctgtatcaaagttttggtatgttgtgtttctatttccatttgtcttaagacttttttttatttttcttttgatttcatctttgacccattgattgttcaggagtatgttgtttaatttccagatatttgtggattttccaatttttttttcctgttattcttttctggtttgtatgattatggacagaaaagatacgtgatatgattttagtcttcttaaactttttagacttgttttgtggtctaagatatgatctatccttcagaatgtgtcatgtgcacttgaaaagaatatgtatttgagagccccatagatggttcacatcacaggactctgtacrgacaacccccagtaccaacccagagctgggtagacttgctgggtggctagacctagaagacagacaacaatcactgcagttaggctcacaggaagacacatccataggaaaagtggggagagtactacatcaacggaatatcccatgggacaaagggattcgaacaacaaccttcagccctagaccttcttctgacagagcctacccaatgagaaagagccagaaaaccaaccctggtaacatgccaaaacaaggctcttcaacacccctcaaaaatcacactagggatgtgtttccatttgtgtcgtgtatttctttcagttgtgttttgtagttttccttgtagaggtctttcgactccttggttaggtgtattcctaagtatttttttttgcagctattgtaaaagggttgagttattgatttgatactctgcttggttgctgttggtgtatagaaagctactgatttgtatacattagtcttgtatctggaaactttgctgaatgctttcaacagttctaggagctttactcctaaggaggagtccttagggttttcaaggtaaatgatcatatcgtcagcagtgacagtttttcctctttactgatttggatgcctttcatttctttctattgtctgattgctctggctaggacttccaatactatgatgaagaggagtggtgagagtgagcatccttgtcttgttccagttctcagaggaatgttttcaacttttcccccattcagtattacattggctgtgggtttgtcatagatggcttttattacattaaggtatgtcccatgtataccagttttgctgacagttttaatcataaagggatgctgaattttgttgagtactttttctgcatctgttgagatgattgtgtgattgtgtttttaattctgtttatgtggtgtatcacatttattgacttgcatatgttaaaccatccctgcatccctggtatgaaacccacttgatcatkgtggattatctttttagtatgttgttggatttggttagctagtagttttttaagtaaggattttagcatcagtgttcatcaaggatattggtctgtagttttctttttttggttatatccttttctggttttggtagtagggtgatgctggcttcataaaatgacttagggagggttccttctttctctgtcttgtggagtagtgtcaaaaggattgaaggattggtaccagttcttctttgaatgtctagtagaattccgctgtgaatccatctagtcttggacttctttttgttggaaaattttttttttcttttttttttttttgagacggagtagttttgctcttgttgaccagactggagtgcaatggtgcaatctcggctcatcgcaacctctgcctctcagattcaagcgattctcctccctcagcctcccaagtagctgggtgggattataagcatgtgccatcacgcctggctaatttcgtatttttagtagagatggggtttctccatgttggtcaggcttgtctctaactcttgacctcaagtgatccaccggcctcggcctctgaatgtgctgggattataggtgtgagccaccgtgcctggctggtaatttttaaattaccatttcaatctcactggttgttattggtctgttcagggtactaattcttcctgatttaagctaggagggttgtatttttccaggaatttattcatctcttctaggttttctaatttatgtgcatacaggtgttcatagtagccttgaatgatcttttgtatttcagtggtatcagttgtaatatctcctgttttgtttcttagtgaggttatttagattttctctcttcttttcttggttaatctttctaattgtctattttatcttttcaaagaatcagctttttgtttcatttatcttttgtatttttttttttcaattttatttctttctgctctgatcttggtaatttcctttcttctgcttggtttggggttcggtttgttcttgtttctctaattccttgaggtgtgaccttagaatgtcagtttgtgctctttcagaccttccaatgtaggtgctttgggctatgaactttcctcttagcactgcctttgctgtatcccagaggttttgatagactgtatcattattgtcattcagttcgaagaattttttaattttcatcttgattttgtttttgacccagcgctcattcaggagcaggttatttaattttcatgtatttgcatggttctgaaggttccttttggagtcggtttccaattttgtcccatggtggtctgagagagtgcttgatataatttcaattttcttaaatttattgaggctcgttttatggcctatcacgtggtctgttttggagaaagttccatgtgctgttgaatagaaggtgtattctgcaattgttggatgaaatgttctgtgtatatcagttaagtccatttgttccaaggtatagttgaaatccatggtttctttgttgactttccgtcttgatgacctgtctagtgctgtcagtggagtactgaagtcccgtactattattgtgttgctgtctatctcatttcttaggtctcttagtaattgttttatacatttgggaactccaatgttaggtgcatattattctaagtgaagtaactcaggaatggaaaaacaaacatcatatgttctcactgatatgtgggagctaaggtatgaggacacaaagtcataagaatataatggacttcagggacttggcgggaagaatgggaggggggtgagggataaaagactacaaataaggtgcagtgtacactgctcgggtgatgactgcaccaaaatgtcacaaatcaccactaaggaacttactcatgtaaccaaataccacctgtacccccaataacttgtggaaaaattaaaaatactaataattaaaaaaagagaaaataacgtgtattctgcggccattggttgtagtgttctgtatatgtctgttaggtccatttagtctatagtgctcttcaagtctgctgtttccttattgattttctatcttgatgatttgccattgttgaaagtgggttattgaagtctcttactgttcctgtatagctgtatgttactcccttcggttcttttaaaattttctttatgtatttagatgctccagtgttcagtgcatatatatttacaatcactatatccagttaatgaattgactcttatcattatatgatgaccttgtctttttttgacagtttttgacttagtctattttgtctaatataagtatagccacccctgctctattttgattgctatttgcatgaaaattgctatgaaatagcatgattgctatttatgcaaatagcaatcaaaatagagctgaagactctattttgaaagtcttcagactctttaagaacacatatagaatactttcacttcagctttaacaatgcatatagaatactttaaattaaaatctttaaattagagtctcttatgggtagcataattttkaatcttgttgtttaatccattcagccactctgtcttttgactggagaatttaatgttccatttgaagtaattattgataggtaagggcttactagagctattttattgttttctgttttgtagtacctttgttcctttcttcttctcttgctgtcttcctttgtgatgtgattttttttttttagtgatattctttgattcttttctctttatcctttgtgtatctattacatgatttttctttgtgattactctgaggcttacataaaacaccttctagttgaaacagtctattttaagctgttaataacttaacattggtcccacacacagactctactctttaatttctcctgcccccatattttatgttactgatgtcacgttttgcatcttttatatgttgtgtatcccctaacaaattattgtggctattgctatttgtaatttttttttaacttttacacttgtagctaaaaatgatttatgtgctagtactatactattacagtattctgggtttgtattcttacctttacagggggttttgtactttcatatgctttcatattagttagcatcctttcattttaacttgatgaactggctctagtggtgctgaatacccacatttttatttggttatgtctttattgctctcttattttttaaggccagccttttctggtatagtattctttgttggcagttttttttttccctttttcttttagcactttcaatatatcatcttactctctcctggcccgcaatggattgtctgagaaatctggtcgtagtctgatgatggtttccttatttgtaatgagttgcttttttcttgctgctttcaaaatttgttgacttttgagaatatgattataacatatcttggtgaagctctctttgttttaatctatttggagttctttaggctttatggatttagatttgaatccataaagcctaaagaactccaaatacactaaaacaaattatattcatttccctctccagatttgggaaattttctgtcattctttcttttttttttttttttgagacagaatctcactctgtcaccaggctggagggtagtagtgtgatcttggctcactgcaacctctgactccctggttcaagggattctcctgcctcagcctcctgagtagctggcattacaggcacacgccaccacaccaagctaatttctgtatttttagtagagacggagtttcatatgtggccaggatggtcttgatttcctgacctcgtgatccacccgcctcagcctcctaaagtgctggggttacaggcctgagccaccgtgcccagcccattatttctttaagtaaattttctgcccctttctctgcttcttctgggtctgttgtaatgtgtacactggttcgcttaatgttgcgttctaagtccctgttaggcttttttcactcttcattcttttttctttttgtttttgtgacaagataatttcagaagatctgtgtttgagtttgctgattcttctgttgtattgtctgctgttgaagttttccattgaatatttaattcactcattgaattcttcagttccagaatttctgtttggttcttttttatactctctatctctttcttgaattcttcatttttttcatgcattgttttcctggattcatgttatttgaattctcttgtagctaagatgattattttttatacttatctggcagtttatgtatcatcagtcgtttagtgtctgctactggtgcttaattttgttcctttggtgtcctgtttctctaattattagtgatttttgtggacttgtgttattgtctgtgcatgtgaaaaagtaaacaacacttcttgtctttacagattggtttctgtagggaaagcccttcactagtcagcttgtctagtagttcttggtaggctgtcttgctgctggagtccttgggtatcttggtttgttgtctgggtcagcaggtggatggtcttggtgtctaggtccaaggagggcagtcttagtgctgggatggggctggagcctgaggccacagggacagttctggagcctctgtccactggggctgacctggagcctgtgtctatgggggtgatcctgaaggctgagttcatggatgccacctggcactgaggtgggccttgaattcaggaccatagtggtgggtctagagcctgagaccagcctgggtctacagwggctggttcggaatttggggctgcaggtccaagcctggctcttgtgtaggcctagagcctaagtctgcagggatccatcctgggctgtgggggctgaycttgggctgggatagggcaagtactggaatctgtggggagagctggatgcttatgtcatccttcttccatgtggacagtatttctctccacattgtgctgccagaggttgggggtgggatgaagcatttagtgagaaactttacttcctagattcttcaatgcatgttttcttatttatttattattttttgagacgaaatctctctttgttgcccaggctagagtgcagtggtgcgacacggctcactgcagcttcagtctcctgagtttagttgatcctcccacctcagtcacctgaatagctaggactacaggtgtacgccaccacacccagctaattttttgttttactttattttttgtagacgtgggttttctctgtgttgcccagagtagtcatgaattcctaggctcaagcagtcttctcacctgggcatcccaaattgccgggattacagatgtgagctactgtgcctggcctgtttccttatttttgttctccacccaggtactctaatctctcacttggattccttagctgttgtgaaggtattttcaagtgtgggcaattgttcaagctgatatttctgtgaggaaagagcagtagaaaactcctattctgccacctttccatcatcagtttcatcacagttgtactctttcttgcaaaaactctaccattagaattatttgaaaacttagagccttgttagagagtctggcctagttgyatcctttacctcactgtgtataggcgtttcagtatccatagttctcttggtcattaactaatgtttttaaattgttagctaaaaataaaacaaaaaacaaaacaaaggaaactaaaatgatattagataaatgaagtagacaatgtggaatgataaggatttgttttcaattttttttttttaaagaggcaggagctctctctgtcttccaggctggagtgcaatggtgcagtcctagctcacttcactgtagcgtcaaatttctctgctcaaacgatcctcctgactcagccttctgagcagttggaatagcaggcacatgccattgcaccttattaaattttttattttttgtagagacgaggtcttgctttgttgcgcagactggtctggaactcgtggcttcaaatgatcctcctgcctcagcctcccaaagtgctaaaattgccggcgcaagccaccatgctggacctgttttcccttttaaaagtgactatattcctcgaacaatgtgttttgtggtcatataagttttgggattgttggtttaaataaaaccaatagtttcttttctgctggactcctcagagtcttttaatatgcaaatatttatcattatgaagtgatcaaaaggatttcttatggaaacttagttgccatggcttggggagcagcgactttttgtattttgcaatgtgaatgcaataaatgaccacaagttctttccatcactgtgtgtttgcccttttgtgtgcagttttgtactcctatgataaaagaaatggaatcagtttttgcaggctttaagtctgtgcctggccctgttactttctttggccagtgtgatgtcagcaatcatgatgcacacaggcttgaaagtgcttgaggcttgccttcccttgctgctcttttaaatcctaccttatctatattaagaaatatttactagcttcctggaggatgagagaccctgtggaacagaatgagcccccttagctgagaatccttctacccagctgtcctgccaattaccagacatgtgacatcatgctggactatcctgtcccaattgaagtttgtccacacccagttaactctcagaactgtcagaaataatatatgtctgttgttttaagtcgctaatttttggggtaattaactatcaaaagctaaaggatgcatatacttgttaactttttatataatgcagttgttttgyaaatttaggctgagaaacagtgctctatgggtaggaatattctctaaggacttattggtagcttaggttacttagtgtggttttgaattctttttgagacattttcaaatttactattgaattttaacttaatttccaaaaatttctatagcagaacatgctcatttaatgtaaataatttgacaaatggaattatgtaataatggatgattgatgttgggctagtagaaactttctctagaatcgatgttataaaaccttggctgattattatgagtttttttttatctgcaatatttatctgtattttattgcatactgttgcataaaataatgggtcaggtagatgcccagtcatcaaatgccacatgtcagaatttcaggtgatagttacaaactacatcaatcaaaaacactttctagtttaaaacaatttggaactacagaacatacagtaacattttgaatttaaaattactgccaatggggaatgtgtttaaacagcatccactcttggaattgctaaactgatttattcatcataggaactggtactacaactgcatatttaattgctctaatgaaagattttttttctttattttcctgtaatacagtatttacaatccatggacttgtgccattttccatttggcactttattatttggcctaaggccatggtgtgctgtgatgttactcatgagctctggagtgattaacactggtgaaagtactttcttatactgcattttatgcttgcttcagataataaaaattttcctgagaagtcaacatttctgtaattagattcctaaaaattcagtttcctgatttctggcaattacatctacaaaaatttctccagattatttctgcagatggttaatacttattttggtatagaaaacctgtttcaaatggctagttaattatcaacatttaaaaaatagtatagtgggcatttagcatgttttcagaaaagattttagtgcataaagttaaaatttccaaatcacacttgcctagttatatttaagtttgcaagaaaggtgctaggatggaaatattgccagtgaaaatataaatgttaatacattactaattttaggagaccacaagtgttagccacttacttaaatgtaatgtttccttcttttggagcttctgaatggtgattacagtgacattaaggtcaaatgygttttctttacagcatgaatccttacaatctaggaatatgctaatattcattgtgaaattccaattttcttatccagagataacagctgttaacattttgttatagttcctgtaagatttgtgtgtgtgtgtgtgtgtgtgtgtgtgtgtgtgtgtatgtgtgtgtgtgtgtatgtatattagagatggagtctcactctgtcgcctatgctggagtgcagcagcacgatctcagcttactgcagccttcacctaccaggttcaagtgattctcctgcctcagcctcccaagtagcttagagtacaggcacgtgccaccatgcctggctgatttttgtgctttttttttttagtagagatgaggttttaccatgttggccaggctggtctcgaactcctgacctcaggtgatctactctcttcagtctcctggagtactgggattacgggtgtgaaccacagcgcctagccgtctttgtatattttaatgtagttaatcttaagatatatgtagttttatattctgcttttttcacttaaaattatgtagtaaacattttacattagaatttgttggcaaaactttttaaatgactacaccaaagacttttatrtggataaactgtaattggtygatccttctttagtctcaaatatttaggcttttgtctatttttccataccattgttataaagatatttgtgtgtaaatctttgcatttatgatttttagaaataaaagtataagactaaaatgtattatttttaaagcttgtgacaaatatcaagcttttgttttcagaaaggttattctaatttatgatatatgacaaaaatttaaaattataacaaccttaagcaggaactcaattttcactttggttattttctttttacttttcactagagtttatttttttaacttttggaaagatctttattgtcagaaattgatattgaataatctttagataaatacagattttaaaaagaaaatgaaaaataattattaattatatatcttctcctttctataaaagtgttaaatttttagataaaagggtatagctgggccattacttttaatgtattttacagtacatgacagcaggttcttaccttttatttatatccttagtacttagcatatgaatagcacatagtagatacccaatcaatatttgttgagtgagtgaatgaataactgtaattttcatgaataaaccccatattaaatgataaatttcagatatatgtgaaaatgaatttctcatctttcttctttaccaaagtacaatagtctattattaacctcatgaagcacctttagattttccatattttataaagcagctgatttcttctatgatttttaatccatgttcagtgaatttaacatttttagaataaaaatgcctataatagtactgtgctatctactctggaaagatataaagaagtcctttatgttttctgcagaaacattttgctgcttttatctactattaaaaattcttattttagtaaggtaaacaaaaaatagtgcttttaatatttgtattcatatattatcrttgtgataagtttctctatgtacaccataacaattttcagtgataagtggcattcttaaccaaatatatacaaatggagtatcatcaagtttaattcttttatgcatctaaacctgcctctcctcacctccatgctttctctgtttcattttatgtagcattttaggttgttccttattatttggaagtaattcatctttatactttttgatcttgcctttggattctagttttcagaatttggacatttggttcacaatgagctaatgtataaaccattagagaggtagtactccattttcttgtgaacgcagttttgtaaagtgaactgcagccagagcctcaggactaattgtataacccaaaccccttagtaaactccgatccaggttaaacttagaggtcgttggctatcaaattgagtgtataccacatatcattagttaaataaacatttatttactcccattttaaaatgtagcagttttcttaattatatgaataatcaactgtctctttcactaattatatatttaaaatttactactatattttcacctggcaccttttcagatgagcctagaacatcagaatgtgacagtcagttgagtttcataggatgagctcattagcagtacatttctggtgcaaaggtttgagtgaagtagtttaattgrctataattatatttcattcttcatatccccttaggataattagaagaaattcattttagtttttattctttaaatacagtactgcattttatattttatttttttacaggctcaaagattgagggtttctatgatgctttattaaataaaagattgctttttttggaataaatagtataacctgtggaaatgctattaattccatattggttcttggcagggcttttaaatttggtttcttttgatttgcttcttgttgtctagacagaaaagtgtcttctatcactcccaagatcccagtctttcttgccagcttctcttgtgcatttttatagttttaagtaatagcaattgaacaggaaagcacatttgggaaagtagattactttttaccaggaaatagtgccagaatcaagattgtagttttaatctccttaaatatttcagaaggttaactctttcatttcacttttctttttataccttacttttgttgggcttttataaaggaggaaaaatgggagagatagcaaaagttactggaaggatcatcaatttctatcctcagctctgatcctgattaacttttggtgaaatcaaatagccttcctctcagactctaaatggaaaatttaatttgcaatttctgatggttatcttgttctgtatttagaaataatgttgaagttgtgatagaggcattatgctacgcttctttgtatatttgatcagtgctctttaaatacttcatgagtgtttgctacagttacatattttcagacagagtaaaggagataataattcgcataaagactagtacccactagtagggttaacgtggttcttttgtggtaccacacttcatcactttactatatacagatatgaagtaattgtatactcatttatctcgccctttagttcattggtcccattacttcatagtgtgatctttccaaaataaattactaatatagcttaaaatctatcagcctaactgcctattgatcatctctagtatgaaatctgtgctcattagcctccttttccacttgcatctcactttatgctctagtcttgttgaaccacttcatatttttgcacatgctgtcctcccatctgcctgaaaagttattttatgacctctcagttaccaaagatcctgtaatgtgtacacctcatgccttccatacacatggactccaaatacacatatatgctttgtggacataattgtgtcttgtgtacctttgtatccctagtgcttggcaaataaaaacaactaacttaattttagttgaatggctgagtggatattttgtgaagcagtttatggtagttcctattttttcagaaatagttcttttgcctttacatatgtattagtcaagattctcaagagaaacaaccaatgggatggatggatggatagatgggtggatggatggatgggtaggtaggtaaagaggtagctaggtagatagctaggtaggtaggcagatagatagatagatagatagatagatagatagatagatagatagatagataggagaggagatttattaggggaattggctcacacaattatggacgctgagaagtccctcataggctgcctgcaagctggagatgtagggaagcctgtagaaggtagtgtgactcagtccaagtcccagggtctcataatcaaggaagccagtggtgtaattctcagtgagactgaaggcctgagaacccagggggctgctggtataagtcccagagtccaaaggctggagaacgtagagtcccaatatccaaggacaggtaaagaagggtattctagttccaggaaaaagagcaaattttgcctttttactgccttttaattttgtctggactcttagctgattggatggtgcctgcccacattgagggctgatctttcctaatgagtccattgactcacaccattctctggaaacatcctcacagatacacccagaaataatgctttactagctattacatatccctttattcagtcaagttgacacctaaaattagccatcacaccaaatgtttttgttgggtaacagctttatttagatgtaattcacataccaaacaatttattcatttaaagggtacaattccatggtctttagtatatctatggaatcaagtaaccatctccacagtcaatttttaaagattttcaccacctaaaaagaaaccctgtgccctgtacttactacctcccaacctgcccatctcacttagataatcactttgatttgcctgttctgtacattttctataaatggaatcataaaatatgtggctctttgtgactggattattttatttagcataggttttccaggttcatgcatgttgcagcatgtatcagtatttaattttttttaactgccagatcatattccattgtgttgatatagcccatttgatttatcagttcatcagttgatggacaattgggttgtttctactttttggctattatgataatcctgctgtgaacattcatgtacaagttttcgtgtgaatacttgcttttaattctttaaggtacatatctggaagtggaattgctgagtcatatggtaactttgtgttttaaccttttgagggtcttctagatattttccaaagtatctgtaccattttacattcttaccagtaatatatagagagttcccattttttccacttctttgctaacacttgttattatttatctttttgattatagctatcctagtgggtgtaaagtattatctcattgtggttttgactttcatttcctaaatgactaatgatgttgagcatcttttcatttgcttattgaccatttctattgcatctgctttagggaaatgtctagtcagatcctttcccattcttaattcggtgatttgtctttgtattattgagttgtgacagttctttatgtattctagatatgattcctttatcagatatgttatttgcacatttatttttccagttagttgtctctttcactttcttgatagggtcctttgaagcacaaaagtttaaaaaaaatttttgattaagtccagtatctttttgttgttgttgttgaatgtacctttggtgtcacatttgaagaactgttgtcaaatccaagggctttaaggtttactctgttttttcttctaagagttttataattttaactcttacatttagatctttgattcatttttttaaattttattattattatactttaagttttaggatacatgtgcacaatgtgcaggttagttaaatatgtatacatgtgccatgctggtgtgctgcacccattaactcgtcatttagcattaggtatatctcctaatgctatccctcccccctctccccaccccacaacagtccccagagtgtgatgtttcccttcctgtgtccatgtgttctcattattcaattcccacctatgagtgagaacatgcggtgtttggttttttctccttgtgatagtttactgagaatgatgatttccagtttcatccatgtccttaaaaaggacatgaactcatcattttttatggctgcatagtattccatggtgtatatgtgccatattttcttaatcctgtctatcattgttggacatttgggttggttccaagtctttgctattgtgaatagtgccgcaataaacatatgtgtgcatgtgtctttatagcagcatgatttatagtcctttgggtgtatacccagtaatgggatggttgggtcaaatggtatttctagttctagatccctgaggaattgccacactgacttccacaatggttgaactggtttatagtcccaccaacagtgtaaaagtgttcctatttctccacatcctctccagcacctgttgtttcctgactttttaatgatcgccattctaactggtgtgagatggtatctcattgtggttttgatttgcatttctctgatggccagtgatggtgagcattttttcatgtgtcttttggctgcataaatgtcttcttttgagaagtgtctgttcatatcctttgcccacttgttgatggggttgtttgtttttttcttgtaaatttgtttgagttcattgtagattctggatattagccctttgtcagatgagtaggttgtgaaaattttctcccattttgtaggttgcctgctcactctgctggtaatttcttttgctgtgcagaagttctttggtttaattagatcccatttgtcaattttggcttttgttgccattgcttttggtgttttagacatgaagtccttgcccatgcctatgtcctgcatggtaatgcctaggttttcttctagggtttttatggttttaggtatagcgtttaagtctttaatccatcttgaattaatttttgtataaggtgtaaggaagggatccagtttcagctttctacatatggctagccagtttttccagcaccatttattaaatagggaatcctttccccattgcttgtttttctcaggtttgtcaaagatcagatagttgtagatatgtggcattatttctgagggctctgttctgttccattgatctatatctctgttttggtaccagcaccatgctgtttggttactgtagccttgtagtattgtttgaagtcaggtagcatgatgcctccagctttgttcttttggcttaggattgacttggcgatgcgggctcttttttggttccatatgaactttaaagtagttttctccaattctgtgaagaaagtcattggtagcttgatggggatggcattgaatctataaattaccttgggcagtatggccattttcacgatattgattcttcctacccatgagcatggaatgttcttccatttctttgtatctttatttccttgagcagtggtttgtagttctccttgaagaggtccttcacgtcccttgtaagttggattcctaggtattttattctctttgaagcaattgtgaatgggagttcactcatgatttggctctctgtttgtctgttatcggtgtataagaatgcttgtgatttttgtacattgattttgtatcctgggactttgctgaagttgcttatcagcttaaggaagttttgggctgagacagtggggttttctagatatacaatcatgttgtctgcaaacagggacaatttgacttcctcttttcctaactgaataccctttatttccttctcctgcctaattgccctgggcagaacttccaacactatgttgaataggagtgttgagagagggcatccctgtcttgtgccagttttcaaagggaatgcttccagtttttgtccattcagtatgatactggctgtgggtttgtcatagatagctcttattattttgagatacgtcccatcaatacctaatttattgagagtttttagcatgaaggttgctgaattttgtcaaaggccttttctgcatctattgagataatcatgtggtttttgtcwttggttctgtttatatgctggattacatttattgatttgcatatattgaaccagccttgcatcccagggatgaagcccacttgatcatggtggataagctttttgatgtgctgctggattcggtttgccagtattttattgaggatttttgcatcaatgttcatcaaggagattggtctaaaattctcttttttggttgtgtctctgcccggctttggtatcaggatgatgctggcctcataaaatgagttagggaggattccctctttttctattgattggaatagtttcagaaggaatggtaccagttcctccttgtacctctggtagaattcggctgtgaatccatctggtcctggactctttttggttggtaagctattgattattgccacaatttcagatcctgttattggtctattcagagattcaacttcttcctggtttagtcttgggagggtgtatgtgtcgaggaatttatccatttcttctagattttctagtttatttgcgtagaggtgtttgtagtattctctgatggtagtttgtatttctgtgggatcggtgctgatatcccctttatcattttttattgcgtctatttgattcttctctctttttttctttattagtcttgctagcggtttatcaattttgttcatccttccaaaaaccagctcctggattcattaatgttttgaagggttttttgtgtgtctatttccttcagttctgctctgatcttagttatttcttgccttctgctagcttttgaatgtgtttgctgttgcttttctagttcttctaattgtgatgttagggtgtcaattttggatctttcctgctttctcttgtgggcatttagtgctataaatttccctctacacactgctttgaatgtgtcccagagattctggtatgttgtgtctttgttctcgttggtttcaaagaacatctttatttctgccttcatttcgttatgtacccagtagtcattcaggagcaggttgttcagtttccatgtagttgagcagttttgagtgagtttcttaatcctgagttgtagtttgattgcactgtggtctgagagacagtttgttataatttctgttcttttacatttgctgaggagagctttacttccaactatgtggtcaattttggaataggtatggtgtggtgctgagaagaatgtatattctgttgatttggggtggagagttctgtagatgtctattaggtctgcttggtgcagagctgagttcaattcctgggtatccttgttaactttctgtcttgttgatctgtctaatgttgacagtggggtgttaaagtctcccattattactgtgtgggtgtctaagtctctttgtaggtcactcaggacttgctttatgaatctgggtgctcttgtaatgggttcatatatatttaggatagttagctcttcttgttgaattgatccctttaccattatgtaatggccttctttgtctcttttgatctttgttggtttaaagtctgttttatcagagactaggattgcaagccctgcctttttttgttttccatttgcttggtagatcttcctccatccttttattttgagcctgtgtgtgtctctgcatgtgagatgggtttcctgaatacagcacactgatgggtcttgactctttatccaatttgccagtctgtgtcttttaattggagcatttagtccatttacatttaaagttaatatcgttatgtgtgaatttgatcctgtcattatgatgttagctggttattttgctcattagttgatgcagtttcttcctagtctcaatggtctttacattttggcatgattttgcagcggctggtaccggttgtgcctttccatgtttagtgcttccttcaggagctcttttagggcaggcctggtggtgacaaaatctctcagcatttgcttgtctgtaaagtgttttatttctccttcacttatgaagcttagtttggctggatatgaaattctgggttgaaaattcttttctttaagaatgttgaatattggcctccactctcttctggcttgtagagtttctgccgagagatccgctgttagtctgatgggcttccctttgtgggtaacctgacctttctctctggctgcccttaacattttttccttcattttaactttggtgaatctgacaattatgtgtcttggagttgctcttctcgaggagtatctttgttttgttgtctgtatttcctgaatctgaatgttgtcctgccttgctggattggggaagttctcctggataatatcctgcagagtgttttccaacttggtttcattctccccatcactttcaggtacaccaatcagatgcagatttggtcttttcacatagtcccatatttcttggaggctttgttcatttctttttattcttttttctctaaacttcccttcttgcttcatttcattcatctcatcttccatcactgataccctttcttccagttgatcgcatcggctcctgaggcttctgcattcttcacgtagttctcgagccttggctttcagcttcatcagctcctttaagcacttctctatattggttattctagttatacattcgtctaaagttttttcaaagttttcaacttctttgcctttggtttgaatttcctcctgtagctcggagtagtttgatcatttgaagccttcttctctcaactcgtcaaagtcattctccgtccagctttgttctgttgctggtgaggagctgcgttcctttggaggaggagaggcgctctgctttttagagtttccagtttttctgctctgttttttccccatctttgtggttttatgtttgtttggtctttgatgatggtgatgtacaggtgggtttttggtgtggatgtcctttctgtttgttagttttccttctaacagacaggaccctcagctgcaggtctgttggagtttgctagaggtccactccagaccctgtttgcctgggtatcagcagcgctgtctgcagaaccgcgcattttcatgatctgcaaatgctgctgtctgatcatccctctggaagttttgtctcagaggagtacccggccgtgtgaggtgtcagtctgcccctactggggggtgccttccagttggggtgctcggtggtcaggggtcagggacccacttgaggaggcagtctgcctgttctcagatctccagctgcgtgctgggaaaaccactgctgtcctgaaagctgtcagacagggacatttaagtctgcagaggttactgctgtctttttgtttgtctgtgccctgcccccaaaggtggagcctacagaggcaggcaggcctccttgagctgtggtgggctccacccagttcaagcttcttggctgttttgtttacctaagcgagcctgagcaatggcaggcaccccttccccagcctcgctgccgccttgcagtttgatctcagactgctgtgctaggaatcagcgagactccgtgggcgtaggaccctctgagccaggtgcaggatgtaatctcctggtgcgccgtttcctaagcccgttggaaaagggcagtgttcaggtgggagtggcccaattttccaggtgccctctgttacccctttccttgaccaggaaagggaactccctgatcccttgcgcttcccgagtgaggaaatgcctcggcctgcttcggccggcacacggtgcactgcacccactgtcctgcgcccactgtctggcactccctagtgagatgaacccggtacctcagatgtaaatgcagaaatccctcatcttctgcgttgctcacgctgggagctgtagaccggagctgttcctattcagccatcttggctcctccccactattttgaatgttttctrtgttatcttttgagataatctagtgtttcttagtctgtcaatatgaattatattaattgattttcaatgtttgaatcagtcttgtagtcctggaatgaactccactggaatgtagtattccttttgcacattgctgaatactgtctactaatattttgttgaggatttttgcatatatgttcatgagaaatattgttctgtagttttcttagaatgtttttgtctgcttttgttatcaggataatgttggcacggtgaaatgagttgggaagtattctctttagtttttatttgttggaagaaattgtgtagaattagtattatttttcccttatatgttctccattgaaatcatctgggtctggaattttcattatttggaaggcttatgtaaattttaatatttttactaaatctaggactattcagattatctgttttttttctcaagtgaattttggtagtttatattttttcaagaattctgtttcacctaagttgttgaatttatggccaaagagtcattcatagtatttccttatatttttaatatctgttggatcagtggtatgtccggtctttcatttttgatattggtaatgtgtgtttactttctcttttccttggctagaggtctgtcatttgtattgatcttttcaaattgcctttctttcttctttttttttctgagacagagtctcactctgttggccaggctggagtgcaatggcatgatcacagctcactgtgacctctgcctcctgggttcaagccattttcatgcctcagccacttgagtagctgggattacaggcatgcaccatcacgcctggctaatttttgtatttttagtagggaagggtttttgccatgttagctggctaggctgttctcaaattcctggcctcaagtgatctgcccacctcagcctttcaaagtgctggaattacaggtgtgagccactgcgcccagccttgttttattggttttctgttttctattttatttatttctactctaatctttgttatttctttccttctgtttgctttatgctaaatttcttcttcttcctctagtttcttaaggtgggatgtgtggttactgattttagatctttcttcttttctaatctaggcattcaaagccataaacattcattaagcactgctttagcggcatsacacatatttgatatagtgtattttcatttccatttagttcagyatattttagaatttcccttggtacatctttaaattatcacagtctacctttaagtgttattataccatgtgtacagtataagaaccttagaacaatatatttctattgttcccctcctggcctttgtgctattgttgtcatatgtttacttttgcatatattgtaaacttcaaaacatactgtcatcagttttgcactaaacagagtattttcttttgaagagtttaaatattaaggaaaagtgatatttatatgtactcaatgtagtcaccatttccagttctctttagtcttttgtgtagattcaagtttctatctggtatcatgttccttactcttgaagtgcttactttaacatttcctataatgcaggtgtcctggtcatgaacttcttcagtttttttttttttaatatctgaaaacgtattttgtttttattttagaaagctattttaactgaataaataattctaggttgacattcctccctccttgtgttctttaatggttttgctccactgtcttctgtcttgtattttttttgaaaagaaatctgctttcttcattttctttgtcttgtctatataacatgtcccccggccccacctcattgcttttaacattttatcattggttttaagcaatttggttatcatgtgccttggtagttttcttcatgtttcttgtgctttcggtttattcatcttgtatatttgagcttacagtgttagtcaaatttgaaaaaaaaaatttcttcaaatatttagtgtttgctctttcctctctcactggagactcaaattacacacatatatatggagattgtgtcttcttttttactttttttgtttggtttttggtaatctctatctagtgctgcacctaccagttcatagcctttttccccttttgaaatggctaatctgctgttaattccattcagtgccttttaatattgtggacattgtagttttcttctctagaagtttgatttttatcttcttaaaatgttatacttttctacttactgttttcaatgtttcctttatttgcacaaaggtaatgcatttataacttctaatgtccttgtctactaatcctatcatctgtgtactttttggatcagtttcaatttattggtttttctctttctccttacgggtatattttcctgtttctttgcatgcttgttattttttttgtttccatttgcaaagttattttcttttactctcttttttttttctttcttctctttttgtaaaaggaaaccatggtcttgggggctagagcggagttttgcatgcctggtaatttctgattgaattctagacattgtaaattttaccttgttgggaggtgggttttttaaatattcataagaattttagtatttataaaaatatttttgagtgtaattttgaggtgtggttaagtgttttggtaacagtttgatcctttttagtcttgtgtttaaattttctgaggtgagactaaggcagtgttttgaatagggttgatttttccactctattgaggtagggccctttttagtactctacctaatgccctatgaattatgagtttccactctggctattcggaggaggcactattcctggccctttgtgagctttgagtattatttgctccattctttttaggtgcttttctttggtcttgtgtgttttcttcacgtgtgaatatttggcagccacttttccgtcacacacagggttttctctttgtttgaatccccactccctctgtctctgtacaggggagctgttttattcttctttcttgcctattaaattctccatgcctatatnnnnnnnnnnnnnnnnnnnnnnnnnnnnnnnnnnnnnnnnnnnnnnnnnnnnnnnnnnnnnnnnnnnnnnncttctgcaaattttaaaggttttctccctgggaactttatttattatctccagtactctaccctgcaaactgtagccactttgactttcccatactcctagctctgtcttctcaactcagggagtttgtaggttctgcctaaggtttccattgctgtgacctgtgaactttttccagtcaataagttgggagcaatcatagggctcatcttattggtttcccttttctcaagggtcattgtctttgattcagatgttcagtgtcctgaaagttgatgctttatatattttgtttacttcttttagtttagtttttttgttttgttttttccagacatgtcttagtccatttagtattgctatagaatttagtattgctatagaggaatgcctcaggctggataatttataaagaaaagaggtttatttggctcatggttctgcaggctgtacgagaagcatggcaccagcatctctttctgctgaggcctatagtaagctttcacttgtgtagaaggtgaaggggagcttacatgtagagatcacacggcaagatgagcagcaagagagagatgccaggctcttttcagtcaccagttcttatgggaactaagagtgaaaacttactcactcctggagaatggcaccaagccattcatgagggatctgctgccacaatccagacagctctyacctaggccctacctccaatattggggatcaaatttcagtgagatttggcaggaccaaacaaaccatatccaaactatagcaagacagaaaggtaaataaatgttaccttttttactttatgatcagaaacaaaggtccttatttatccatttttgaaagtcccatatttaatgatttacagccatgccacagcataggacatattcacatgtcccgtgttaaaattgctgtctgaatttcatgtactctttagagaactgctttgcagttttaagtatacatttttaggaaaaaaaagcttattaagaatgaaatttcttctcgttttgatcctacagaaagaggaatgctctaaggtaaaatggggcatgatgctaaaatgggaaaagtagggtagattgatgaaacttaatctgaaaactagcagcagatgtttgagaactccatcataggcctgaaataaatttaaggataagtttaaaggtttggtataaagttttctttaatgtcctgggttgaatgtagatggagagtggggggaggtgtgagttctggagaactgttaatttgtttgtaattttattacctatctgtctgtgcatctgtcttcattggggtccccaagaccactctcaggcttgatgattcactagaaggactcactggacttggaagctgttacactcatggttatgatttgttaacactgaaaggatacagataaaaataagcaaagggaaaaggtgcatgggtaacgtccagaagaaaccaggtacacacttctagatgtccttttccagtggagtcacatgggaacacacttaattctcccagcaactatgtgtgacaacaggtgtgaagtcactaccaaacagagaagttcacttgagccttagtgtccagaattttactggaggttagtcacgttggtatactacagtgctggcgtgactgacctcagctatccagattccagtacttcccagggcaaaarcaagcattcaccataaatcacactgtcagtataaacttatctggtcagattggtacagcatggcccaaggtacatacatactgggatattgtgcctgatacttgtttttatatgcaccagtacatacctctctagtttactaactccatactttatttggattgaattagtttttcctctaatgtcctttgtctgtttgaggatcccttgtagattttcacattacatgtggtcatcatgtttctaggtttctctgggctgtgacaatttcttttcttatttttgatggccttgacgattttaaggtgtactggtcaggtcttttgtagaatgcttctcaatttgagtttggttgatgttttcttacggtttgactgggattgacggttttgggaggaaaaccagacatgaagttccaattttcatcacagtctaactaaggtataatatatattttgaacctttaattatctaatttaaaaatctcctggcccttcagaaatacttaatcagattttaggccattatggtgcttatatgccagatttgttctcagtggcttttcttatctgataacttttaattaataggcagccttctttgcagtggtgtcaagatcactgtgcacaacttcatatctttctggagacaacagggaaaggaagccagaagggagaacagtaattggtcaagttgcagattagggaagctaaaattggtctcttttactagattagaatctggagtaaaactccagtctggcccttcagcataacttttccattattcacatatgcctctcttccttctacaagccaaattaaaatttagtattagggactccaaatggtacaaactcattcattctctttaattgcctaactcctactcattcttcatattgttgcttaaatgtcagaccttttaggaagctatacttgacttagaggaccctcaaggcctgtcatgggctcttgtagtattccgtataattttttgtctagtccttaatttaagtattagtgtatgttttaatgtattttttttcccagactgtaagctccacaatgtagagaccgtgtcagttttattcatttttgtattcttagagccaggccaagcattcaaaacagccatgcagtaatatgaatatatctgaatcaatgagtgaatacataaataattgagaaaatgaatggatattagatattaaaacctttaccaactctacttatagcagcctgactctagttaaccataaatacacacttgtaacgcatgggccccacacttaccctaagttataaaaatggtacaattaggtaatttctaccctaagacagtcagtttttgctcagcratctaaccacgtaggcttgcttacttctgagacttgcttgacctatctcattgaactcgctctgtgcctgagatacatgtccaatttctcaaggcaagttcttcttccagaattgtcttgtgacatactttgagccaattccctagttggttctgtaccagtaaactcatacccccagctattacatgtagcacattcaacattcagggacaaactttgatgtaagttaaactttttttttcttttctaaatattgcccattaagactgtgttttaaggattgttttctaatactttcttcactctttatcagaggtttgtcctcctaccttttgccttcaaaccaaaacatcagtaacagtcctctttccccaacatctttgttctctggccagcattgattattcttccccatgggggagcttactttctagtctatacctcaggacacagaatctgaactgcttttaaagtttgcttatatgagtttgctgagctttctgacccagagatatcttctgtctttgcctcgcatttaataaacatttggaacatcccttcagccagtcttggcagagtaggctttttatttccatgtatacaaaaactttattatcagctaaccatcaaaggaaatcagagaaaatggtttgaacttatgacccaactatttggacagattagggctaggaaatgtaatgcaaggcatgtatgtatagactttgtacacttttacatattggtttcactcgcgtccctgtgaagagaccaccaaacaaagactagggagggaccgacgtgttaaagaatgcctggacgtcaggcacctcagaccgtttgcccattttatgacaagaattatctagatcttgtaggatggaaaaatcgaaagtgccattttctggctatttggaaccactgtcaagtttatattggggtcaagcggtgttggagaagaaaataaaatgcttagattttagatcaggtgtgagctgaagaggttttaaggtcttgagaacacaggctaagggagaagaaggaggaatggagggtggaaggttgcctatagtgaaggagcaagtccagagaaaagagagggtagagacagagtgaaggggtggggggtgcttgcccccctggaaagtggagagaaaagagagggtagagacacagagagaaggggtgtggggtgcttgcttcccaggaaagtggagaaggggtgggtagagacatggagagaaggggtgggggttgcttgccccccaggaaagtggagaaggggtgggtagagacatggagagaaggggtgaggggtgcttgccccccaggaaagtggagaaggggtgtggggtgcttgccccccaggaaagtggagagaaggaagggtagagacatggagagaagcggtggggatgcttgccccccaggaaagtggagaaggggtgggtagagacatggagagaaggggtggggggcacttgtcccccaggaaagtggagaaagggtgggaggtgcttgccccccaggaaagtggaaaaggggtagagacacagagagaaggggtgggggtgcttgtcccccaggaaagtggagaaggggtatggggtgcttgccccccaggaaagtggagagaaggaagggtagagacacggagagaaggggtgggggatgcttgccccccaggaaagtggagaaggggtggggagagacacagagagaaggggtgggtgagcagccaaagcaggtgtccccacaattgacttgccaccaagggaatgtgggtgaatgaccaaggcaggcstccctgcggtgatcagacaccaatgaaatgtgggtgaataatcaggcaggcatccccgcagtgattaaacaccgagggaagactgtcttctcaagtctgtgaccggcgctggagttttcggtccacggataaaacgcatctcctttgtctctaccagaaaaggaaaggaactgaaattaagacaagggcgagactgaagtgtggcaccaagattgaaaggagaaagagattgagggttagtgagagaggttggagaagagagtaaagaggccgcttaccgactttaaaattggtgagatgttccttgggctggttagtctgaggaccagaggtcgtaggtggatctttctcatggagcaaagagcaggagaatagcggactgatctcccaaggcaggcccccctatccgagtcacggcaccaaatttcactcgtgtctgtgtgaagacaccaccaaacaggctttgtgtgagcaacaaggctgtttatttcacctgggtgtcggcgggctgagtccgaaaagagagtcagcaaagggagataggggtggggccgttttataggatttgggtaggtaaaggaaaattatagtcaaagggggttgttctctggctggcaggggtcagggggtcacagggtgctcagtgggggagcttttgagccaggatgaaccaggagaaggaatttcacaaggtaatgtcatcagttaaggcaggaacaggccattttcacttcttttgtgattcttcagttacttcaggccatctagatgtatatataggtgcaggtcacaggggatatgatggcttagcttgggcttagaggcctgacaattggtaacctttttcacctgaccacatgtatgggtttaatactaactctccaacttttttctttatttttattttattttactttaagttctaggatacgtgtacagaatgtgcaggttctcagcaaactaacacaggaacagaaaaccaaacactgcatgttctcactcataagtgggagttgaacaatgagaacacatggacacagggagggaaacatcacacaccagggcctgtcggggttggggggcaagggaagggagagcattaggacaaatacctaatgcatgtggggcttaaaacctagatgatgggttggtaggtgcagcaaatctccaacttttttctatattgcccatcttaacctcctaccagcttgtccctctgtcacttttaccccttctgttgttttacttgtaagataatacaagataaatatatgtctgcctattaatttatttctttaccaagcaccaaacatatgtaatatagaaggtactatgttaggaaggtcctagtcatacacacatatagaaaaaatagtttagttattaattactcatgcctcaaattatcaagaaaagtaatcaaaactcatttaaacatttttactattaaaaatgatttcttctagttttgggtcatttggttatgtagtattccatatgattgacttaaaattcacttaagaagcttgttaaacatatacttagctcctgggcttaggggtcaatcagtagaatcccctctgtcttccctctgtttttagtttccttgtttttagtttctatattttccatattcctttatctttcccagttctgctatgccatggtaagaattgcaggagttactaagcagttttcttaaatattcaaagcatttgctggtgattatagggaagttattcaaggaatttggtaaattagaaaaagcaaaatattttcatgatgtatgaagaattttgtaggcgagttttatgctgttgtcatatctgagtcttaatttttgttacttttttaagtttccattttttatgagttttttttcttatacttgttcatctgacaaaagtaggtagttttttaaaagctcattgtgtaaatggttaaccatttttaaggtgaattaagacatacatttttgtaatctaagggaagttacttggataatttattatatttataaggtttgacttcatgcatagccagatctgaggacagtgctaagtgtgattgtaatgtaattatattttagaaattgagctaagattttaatataaccattaaactgattattgaaatctatacagtttgaaaaaaaattacctttaagttgataatatttttcatgtttttttcagatacctatattttttaaacttgactaattcccatcttaatgtctttacttattaaatatgacatctatgaacatctggccctcttagctattatatgtttagtgaggttctcaatgttatttactaaagagcaacaaatcccaacaaatcaagagcaattagtggcccagttttggtgtatagtttcttatattctttctaatctagttttttagctttctgtactcccatctgtgaaattgttagatgttttcaacctaagcttgcttatggaaaatggaaataaaacagaaagaggggaaaggctgggagaaaagagaagcaaagacctctttgaayactcagcccttcccactcaccctgtgcatagcacttcacatttttacttgwctgcacaatctgtctgcttttcattggttttcagagtcctcgagtgatttttgtattttgtctgacatttttctttctttttttttttttttttaattgatcattcttgggtgtttctcacagagggggatttggcagggtcataggacaatagtggagggagggtcagcagataaacaagtgaacaaaggtctctggttttcctatgcagaggaccctgcggccttccgcagtgtttgtgtccctgggtacttgagattagggagtggtgatgactcttaacgagcatgctgccttcaagcatctgtttaacaaagcacatcttgcaccaccattattccatttaaccctgagtggacacagcacatgtttcagagagcacagggttgggggtagggtcaccgatcaacaggatcacaaggcagaagaatttttcttagtacagaacaaaatgaaaagtctcccgtgtctacctctttctacacagacatggcaaccatccgatttctcaatcctttccccgcctttctcccctttctattccacaaaaccgccattgtcatcatggcccgttatcaatgagctgttgggtacacnnnnnnnnnnnnnnnnnnnnnnnnnnnnnnnnnnnnnnnnnnnnnnnnnnnnnnnnnnnnnnnnnnnnnnnnnnnnnnnnnnnnnnnnnnnnnnnnnnnnnnnnnnnnnnnnnnnnnnnnnnnnnnnnnnnnnnnnnnnnnnnnnnnnnnnnnnnnnnnnnnnnnnnnnnnnnnnnnnnnnnnnnnnnnnnnnnnnnnnnnnnnnnnnnnnnnnnnnnnnnnnnnnnnnnnnnnnnnnnnnnnnnnnnnnnnnnnnnnnnnnnnnnnnnnnnnnnnnnnnnnnnnnnnnnnnnnnnnnnnnnnnnnnnnnnnnnnnnnnnnnnnnnnnnnnnnnnnnnnnnnnnnnnnnnnnnnnnnnnnnnnnnnnnnnnnnnnnnnnnnnnnnnnnnnnnnnnnnnnnnnnnnnnnnnnnnnnnnnnnnnnnnnnnnnnnnnnnnnnnnntgccccccacctcctatatatatggggcggctggccgggcgaggggctgacccccccacctccctcccggacggggcggctggccgggcagggggctgatccccccacctccctcccggacggggcggctggccgggcagaggggctgacccccacctccctcccggatggggtggctgccgggcagagacgcccctcacttcccagacggggtggctgccgggtggaggggctcctcacttctcatatggggcggttgccaggcggagggtctcctcacttctcagacagggcggctgggcagagacgctcctcacctcccagacggggtcgcggccgggtagaggtgctcctcacatcccagacggggtggcggggcagaggcgctccccacatcttagacgatgggcggctgggcagagacgctcctcacttcctagatgggatggcggccgggtagaggtgctcctcacttcctagatgggatggcggccgggcagagacgctcctcactttccagactgggtagccaggcagaggggctcctcacgtcccagacgatgggcggccaggcagagacgctcctcacttcccagacggggtggcggccgggcagaggctgcaatcttggcactttgggaggccaaggcaggcggctgggaggtgaaggttgtagcgagctgagatcacgccactgcactccagcctgggcaccattgagcactgagtgaaccagactccgtctgcaatcccggcacctcgggacgccgaggctggcggatcactcgcagttcggagctggagaccagcccggccaacacagcgnnnnnnnnnnnnnnnnnnnnnnnnnnnnnnnnnnnnnnnnnnnnnnnnnnnnnnnnnnnnnnnnnnnnnnnnnnnnnnnnnnnnnnnnnnnnnnnnnnnnnggagagggagagggagagcgagagcgagagcgagagcgagagcgagagctgacatttttctttttaatcaacgggagagagtctatagttgccttatggcaccatagtgaaactggaacttttgacttctttttttttttttttctttaaatcttcatagaatgtgtctttacagcatgggaaatttttttttttttttttttttgcttttcactatatacagctaatggcttttacttattttcatttagatctaagaacacattttaacagttactgcttcctaatcttgctttatctgtattaaagaagcatttggaaatttataattgttcttgaccttggaggttggttttctcaaccttttttttcctgcaatatgtagtatctttagtaatttggtacacttatgatttctaaacaaaatatgtgtcttttgaacattgttgaaaagttagtgtatgaccccacaaagaatttggaacaggtgccagcccaattgtgactgcctgacttcttgtccttacactgggagttgttagcatgaaaaaacaaaatgtcatggcattttctctaaaataatactttgaaaagaatttttgtccctggtggtaaaaaacttggcacccagcaagcaagaggatcttgactcatagatgtataaaaacattgtcagtgcccctggagctacggaattcctctctcatagtaatttttctaatgtctgtagctcagttcattaatttttattttgctgccttggaatttgtccataaaagtatttttttttctatttatttttaacctgatcatcaagttccttggcttctatgggtgtacagtttgaatttttgttgttgttgttttattttgttttggggtgtttggctaggaagaactaactataggatgtttgtcagggacatgtkccttgggaaatttatctcactgctctgtgcttgtttgacagctgttcttgcacttctgactttaattcaaaaagttataaagccatatgtgagcagctgttcactgttttcattagggcaaaataagatcggatgcaaatattatcaggaatgatttaggttatattgtaaaaataatttagactatattgtaggaataattttacggtagttatgatatattgtaagttattaaaaagaaggttctagaattaaaaacaattttaagcataaagtactatttgttgaaagatgagaggtgttgaaagatgatatactgtctgaaggtaggatagtgaaacagctagcttttgaattcctcttctagttctaggattttatgatttcatggtagtgtttatccttctctacagactaacttttcccatgacttcctatgctttagaactcttctgtgtaataataagctttttttttttgagacagagtctcgctgtgtcacccaggctagagtgtagtggcatgctcttggctcactgcaacctctgcctcccaggttcaagcgagtctcctgcctcagcctcttgagtagctgggattactggcatgcaccaccacgcccagctaatttttttttttttttgtatttttagtagagatggggtttcaccatgttggccaggctttttaagctgattcatatttatttgtgaattattatcatagccatagaaagagttatcatttttttggctttcaggtactaaaatcaaaatgcaaaattggtttgcctttagtttaaagtgatcagaacaaaaaaaaatkaagataatttaatggcttatctttttcagtagtcctccagaatayaaactttataatcatctctcagacatttaaataaagtatctagtatttattaaatatttaccacatgccaggcaaagtacaattaatttaacatatgctctcctgtttaattctcacagtgatcctgagaccttagggtttattatccccatattatagaagaggaaaaagtttagagagttgaagtaaattacccaaagtcacatagtaagtactgggtctgagatttgaacccaagaccattttttttttttaccaagttctaaattttagaagatatttactatatcaaaaaagtatgaagttaaaaagaatcagaatgtaaaattgtgaatatgttaaaccatacatacacatgcacacatgtgtgtttgcatttggagaggctagaaggtcctacaccaaaatattaacaaggattacttttaggtattggcatacagataattcttacatccttctttataatttcttgtaggctatacttcttatatctgctattctcataatcaacaaggtgggaattgctgctatttttatattctaaaaacttgacatcttacatgtatgcaattttcaaatctgtcttcactgtcttatttgagaattataaagctgtttttcagtagcttttgtattaatttgtgtaaagacagatattttatatatttagagactctcttttaggatacttttcttatttctctttctagatttcagattttttggacattattgcactcatctttgtgcccctacagtctctaggacaaatcctgcacatagaagacatttcttaaaattgattgaatttatttcagtagtaaattttagccacagtacaatagttggaaagaataaacgaattacagttgtaataataaaggaaacttaggttaagaaaatttcctagatttgttaatcagtcatttctctaactttgtcacctagttctactaggtgaatgggtggttccctgacaacgttgggcacccatcaaggctttttttgtttagttttgtttttgtttttggctgaaccttttaactccccatctgcgtcatgcttttctttttttcttgaccacagcttctaggatcttagtctgcttccttgtcctcatgcttttatatatacatacaaacacaaacacacacacacacatgcacacagacacacacacgagtatgtcaaatgataaaagtaatgcagtttcactgtagaaaattttcgtaataccaaaaattattatggataatatagaaattgcttgtattcctatcactttaaaaataacaatttttgaaaatacatatatgtgtatgtggttttttttttttttctgagacggactttcactcttggcgttcaggctggagttcaatggcgcgatctcggctcagtgtaacctccgcctccctggttcaagtgattcccttgcctcagcctcccgagtagcggagtttccaggtgccggccactatgcctggctaatttttgtatttttagtagaggcggggtttcaccacgttggccaggctggtcttgaactcctgacctgtgtgtgtgttttaattgggattataatgtattaaaatctttatattctgcttttttattacataaattttcagaaaatataaaatatcttctaaaatttatttaatttctatatgattgtccattctttaagtattctataattcatttaatagttgtttgatgtttagcattgaggttgtttctaggttattttctgtcatacagagtgttgtgccatgaatctttgaagaagaaatctttttgtatttcctgaactgttttgggaggatagtctaggaagtaatattactaggtaaaatgtatgaacttctaaaatatgttgccaagtacatttaataaacattacgatttttttcttctaccagtgtgtgacagtgttgactcattgtctatcactggccttgagaagtccatattttactcttcgctaattttataagctgaaaacagcttttcactattttaatttggatgttttggctttgattagtagagagttgagctttttacccccatagtttgattttgcatttcttttttgtatcatccatttcctcttatattccatacttgtaacggtacctttcccaagctagttatttaagctttttttaaaaaaaaattttaatgatttttgaaatggactctttgagctttttttttttctttttttaccttttccctttttaagatttttattcttacctattaggaagacaacaaggtatatctaattacatgacaaacagtcttcaccaagaagccagaatcttaaatttatagctcactgttgccatctgagatataaatagaacttcagttactgtgtgttgctttccattaagtctacttccttgctcttcttaaaccccactactccttctttaatgatagcccttctacgaacacatggatcttaatagactataagaatcacttgattgatgtgtttcatttacattttagagaacttccataataaataaaagctctctcagtgtgtctcacagagagattatcccacaaagaaatgttcctctttgagcattttcttatatttcttcctgtcttcaaaataagtcagatcatttaatttattttaatcttttctgttaaatgccagtagtacaaagtctccatatagtcagcagtcctaaacagcccaggagaggggacctctataataatggaatgccagtaaccaaaacagcatggtacgggtaccaaaacagagatatagatcannnnnnnnnnnnnnnnnnnnnnnnnnnnnnnnnnnnnnnnnnnnnnnnnnnnnnnnnnnnnnnnnnnnnnnnnnnnnnnnnnnnnnnnnnnnnnnnnnnnnnnnnnnnnnnnnnnnnnnnnnnnnnnnnnnnnnnnnnnnnnnnnnnnnnnnnnnnnnnnnnnnnnnnnnnnnnnnnnnnnnnnnnnnnnnnnnnnnnnnnnnnnnnnnnnnnnnnnnnnnnnnnnnnnnnnnnnnnnnnnnnnnnnnnnnnnnnnnnnnnnnnnnnnnnnnnnnnnnnnnnnnnnnnnnnnnnnnnnnnnnnnnnnnnnnnnnnnnnnnnnnnnnnnnnnnnnnnnnnnnnnnnnnnnnnnnnnnnnnnnnnnnnnnnnnnnnnnnnnnnnnnnnnnnnnnnnnnnnnnnnnnnnnnnnnnnnnnnnnnnnnnnnnnnnnnnnnnnnnnnnnnnnnnnnnnnnnnnnnnnnnnnnnnnnnnnnnnnnnnnnnnnnnnnnnnnnnnnnnnnnnnnnnnnnnnnnnnnnnnnnnnnnnnnnnnnnnnnnnnnnnnnnnnnnnnnnnnnnnnnnnnnnnnnnnnnnnnnnnnnnnnnnnnnnnnnnnnnnnnnnnnnnnnnnnnnnnnnnnnnnnnnnnnnnnnnnnnnnnnnnnnnnnnnnnnnnnnnnnnnnnnnnnnnnnnnnnnnnnnnnnnnnnnnnnnnnnnnnnnnnnnnnnnnnnnnnnnnnnnnnnnnnnnnnnnnnnnnnnnnnnnnnnnnnnnnnnnnnnnnnnnnnnnnnnnnnnnnnnnnnnnnnnnnnnnnnnnnnnnnnnnnnnnnnnnnnnnnnnnnnnnnnnnnnnnnnnnnnnnnnnnnnnnnnnnnnnnnnnnnnnnnnnnnnnnnnnnnnnnnnnnnnnnnnnnnnnnnnnnnnnnnnnnnnnnnnnnnnnnnnnnnnnnnnnnnnnnnnnnnnnnnnnnnnnnnnnnnnnnnnnnnnnnnnnnnnnnnnnnnnnnnnnnnnnnnnnnnnnnnnnnnnnnnnnnnnnnnnnnnnnnnnnnnnnnnnnnnnnnnnnnnnnnnnnnnnnnnnnnnnnnnnnnnnnnnnnnnnnnnnnnnnnnnnnnnnnnnnnnnnnnnnnnnnnnnnnnnnnnnnnnnnnnnnnnnnnnnnnnnnnnnnnnnnnnnnnnnnnnnnnnnnnnnnnnnnnnnnnnnnnnnnnnnnnnnnnnnnnnnnnnnnnnnnnnnnnnnnnnnnnnnnnnnnnnnnnnnnnnnnnnnnnnnnnnnnnnnnnnnnnnnnnnnnnnnnnnnnnnnnnnnnnnnnnnnnnnnnnnnnnnnnnnnnnnnnnnnnnnnnnnnnnnnnnnnnnnnnnnnnnnnnnnnnnnnnnnnnnnnnnnnnnnnnnnnnnnnnnnnnnnnnnnnnacgagaaagaactctctccaccagttagtaatgaaatgcagaagtgaaactgagtatcctatacctataatatttccttctaactctttctttgccattgtcactaggagagttggcatgcaaaaacatcttgagagttgcacattttaataaattatttaccttttccacacaggccttgatagtcatataaattcagtcttgctcagagttgtccaatcttctggcttctcttgtccacattggaagaattatcgtctcgggccacacataaaatatactaacacgggctccgagcaagatggcagcctccgagccggttaggctacagcttcaatatgattacccactgccagctaccctgcactgtacggccttcctggcttctggttgacttgaacaggcgccgagttgtcacagatctcattagtctcatccgccagcgatttggcttccgttctgggggccctccgaggcctctacctggagcagggkttcctgccccccaccgagagcgcatgcctgatgagagacaatgactgcctcagagttaaattagaagagagaggagttgctgagaattctgtagtcatcagtaatggtgacagtactcatttatcacttagaaaagcaatgaagtgggcatttaagttagaggaggatgaagaaactaacccagattacaactattcaaagaagcattggaagaagcaagagtacaataacaataatgagaaggtcttggatctagaacgaaaagcggtcacagatcagactataagcaaaaaaaaaaaaaaagaaacaaaagaaaaaataaagcaacctgtggcacaacgggtgatgataacgaacagaccccccaaaaaaaatcaccaaagaaaaaggagaaatgtgaatatgaaaaaaaggccaggaatcccaagtcacctaaagtacaggcagtaaaagactgggccaattagagatgtagttctccaaaaggctctgctagaaacagccttgttaaaaccaaaaggaaaggtggtgtaagcgtttgctcaaacgagagtcccagttcctcctcggagtctgagtcttgtcatgaatcaatcatgatggtcccagcaaagtcactttggaggccagaaattcctcagagaaattaccaactaagtaatcaaaggaaggaccctctaccaaaagtacaactgcagacaaactggctacaaaatctggctttagccttaacccccagcaagggcaagacctctggaacatcatcttctagttcagattctggttcagagtcagaggtgaatgcttgatgtcatcgagcaccctggagtgtgctgtggatttctaaaagacagtaggcctttttgcaggaagaggttgtccaggccctgggctgtcatcacagactgcaggtgctactggatggaagcgttctgggttaaatggtggcagacaggctcctggtccttctcccagtgtgtctctccccagtttagaaagaggatggggtagaggagagaaccttttttcttggaagggagctaggggacggggaatgcgggggagaggtcgaggacaagggcatcctgtttcctgtgttgtaaatagaagcactgacaaccagagacaacagcaattaaataaagtggtaacaaattcatctactgttttccagaatccggtagagacacactagaaggactgtatggtctgttaccgctgttaacagctgcccctcaagttggagaaaagattgcatttaatctttggaactaacatccagttacactcttctgttgtctctgattacaaggaaaaatattaagccacaatccagagacacagcaagtagatacagaaattctttcatccttacctgccttgagagaacctgggaaatttgatttggtttatcacattgaaaatggaaccgaggtagtggagtatgctgtgatgcaggagagcaagatcactgtattttggggagagttgattgatccaagactgattattgaatctccgattaacacatcaagtacagaacctgtctgaatatgaccgctccatcttatagtttatgaatgtcttgtttgtgaaagtgactataacttgaacttttttttttaagaggatttgaaagttgtatgggtttttttgttatcttcactttactgcataggaaacaatctacctcatcatttaaaatgacatgggtgtcggttttgtagacctttggtttttttgtcaggttcaatttcagttaacaaaatgtaaaacatgacattccctgcaaacgttgttgtataccaatacgtatggtttcttctcttttttaaaagtttttgaccatcaagcagcagttgtcagtaggagtttataataccaagaatgtgctgcatatcttgtctcattaagttttaagtaacatttaaaamtattaaagcatgttacttgacctaattttatagcatttgagttgtcccattaaatggagcatctcgtaaatttcaagtattttatacttggcaatggttaagagttaaaaggtagttggatttgtcacagacaatgagttaaggaatcctttcacgtttttcccaactttaaaattaaggattctcagggccctgtgtagagcagtaaaaataagacctcgtgtatgtgtakgtgtgtgtgtgtgtgtgtgtgtatgtgtgtctgtctgtctgtctggaggagaattgattggtgttccacttgggtgagagggttggctgtgagcctcagaccaggaaatgtgtcatcttgccaagcacctggctgagtgtgctggagtgaggatttgaacagaaacttccttttctgttattattcactacaaagcttaagtggccaaatatatactgtgaaaattggtttcttttaacaaaagatcagatccctccttcagctgtacacatttttaaataaaatcatatagaactaaaaaaaaatactaacacgaacgataggtgatgagctaaaaaaaattgcaaaaaaatctcataatattttaacagactttaccaatttgtgttggactgaaggttggccaagcttggtttagcttaagttatatggattatttgtacaacagaattgagttgatttctgcggtattttgaagagtgaaagtggttttttaaatttgtactgtacttatgttataaagcaatatgagtaatatactttatgtgtgagaccttacgtgctctaagaaatacttttgttaaggatttatatttatggtggagtattcgttacaacatggggtctatacatacttgtaaagaaattaaggatagagaatgcatcactcagaccccaatctttccattcatatagattgattagtcatcacatagtccatatttttctactatattcaagtcccagttgacaccttatgcatcatattccttagttcccaaacatgttcccttatttcttttcatgtaacttttaattactcatttgtccgagtctgaatcctgaatattacccttgataccattttgtttcaccacccctctccaaatgtagctttaagtttttcctgtttctttttctactcccagaacccacaattatagctctgaagtatccttccagtgagttttcagtatctgcatgtgtttactctagctcaaggtgtgtttttttttctgatatttatgtcattaattgatctctctgatgaatcttgtcagagaaatcttccagaaggacatttcagaccatattgctttctagattaaaaaacttcaaagacttccaagaatgtacaaagaattctcttgaattccttcctctggtcttcagggccctatgctatgacttcaacttttctttatttccctccctcaaatattttttctcttttcctttttatacttctttccttctgagctttctgtcactttttggcctgtacctagccatttccctgttcttgcatttccaaatctcatctatccttcgagagttggcttttacgtttgtcttccagctagaagtagtcttttcttcctgggaactcccaatggccttttcagtttgttattgtacttagtatcctttctgttgaactgtggttgttcatggttactggttgttatagttagttctttaacgcatggattcctgtctcattattctatttcttgtgtacgttttctggtacacgtatattcttaagacatataaagagctgtcttgttctgggggtatttcttagttgagaaaaataaaaccttggggatactttatatgctaaagataaaaatgattgtgtgttctataaagatctacaaaaatatgcttggaagtagttttgctaaaaaacaggtataagaaattagatatatagatgagaccttggatgacttgactcaaaccactttcagacagatgaaacgtaacttctaaatctttctagaaggttagattttacgatatgctcaatcatttaaacagttatttatatgagacttacaagcagaattttttttttttttagtatttttacaatatgcagttcacattttatgtactcctaatttacttcttgttattcttggaattttttaaaggattttcctgattcttaaatggttctattcttttttgcagttcttctgttaatgayatgttttttatttttttttagttctctgtttgtcctggcaaaacttatatttggaaaatgttctatttttcaggtatcctggtcagatataggaggactggaaagtatcaaactgaagttgsaacaggctgtggaatggcccttaaaacatccagagtctttcattcgaatgggtattcagccacctaaaggagttcttctctatgggccacctgggtgctmtaaaacaatgatagcaaaggctttggccaatgagagtggactgaattttctagctataaaggtaggrtgttaaattttttaatcgctactctctcttggcctcccccaacccccattctctgactcctacctttaggagaacgaataaaggcatcttaaggagcagtgattcttttttttttatttgatgttgatggcaatataatatagggagatgagtgataagaaataaattcgtgcatgtaatcagcaaatcatggtagacattgggaagactgctttatttagtttcttgattctggtatttcttatatccatgtgtaacagaagctaatctttttttttgtttgtttctacatttttaattatagacttttgcttaaccaggacttaaagataaacatgacagtgaattcaatatttacatacctagaattttcaaatgaacaagacacttgttatggtacactaaattctttaaaaatacttttccattcagaaagtatatgtgcattgtttttattctgaaccacacacacattttatttgttcattgcttcgccccgattaactgggatagataatctttcatgatatgtagttgtacacttactttaggaccagatattaattttatgtaacattatgatatatccagatacttaatccacacatataaaactgtaaatccatttctgtggactgtatcacaaaaatatatacctaaatagattaactatcaattcatttcagaaaaggcacatgatcatctgttttgatattaccagggaattttttacataacagaatgcattttctttagcgtgatcttggctcactgcaagctccgcctcccaggttcatgccattctcctgcctcagcctcccgagtagctgggactacaggtgcctggcaaattttttgtatttttagtagagacaggtttcactgtggtcttgatctcctgacctcatgatccgcctgcctcggcctcccaaagtgctgggattacaggcgtgagcgactgcgtccggcccagaatgcattttctgtcttagaacattgaaatcattggcagtttgaaagcacaaaacttcagagtagtttgtcaacttttggctttacttaagatttttatagaatgatacttaggtgtgattaagctgtttgttctttaagaatcagtatcttcaacatattttttattttctggaagatattggagagtaaagatgggggaggagaccatttacagcatgatcacttatggggaatcacaactacagttttaaaggtttcaggtttatttgttatttttttgagacatggtctcactctgtggcctaggctgaagtatagtggtgtgattatagctcactgtaacctcaaattcctgggctcaagctattcttctgcctcagcctcctgagcagctaggactacaggtgtgagccatcacaccagctaactttttaacatttttgtagagacaggktctcactgtgttgcccaggctggtctcaaactcctggcctcaagcagccctcccaccttaccctcccaaagtgctgggattataggagtgagctgctgcaacacagcaaaggttgcggttttaagggttgaagtaatgagtgattttgtcacttcccaggacaacttgatttctccttggtccttgtccttttatcatgtggtaatggggatggctgtgtttactggcattttctagtctttttactctcatctccattttttctgttcttaccttgtatattctacaattgtatattcatagtattagaatttttcttgtctactggaaatctaaaatttatttaagaacctgtgagcgaagtcctcatcagataagttttcgacttaactcttaagagcacacttattttcttacaaactagtatcttactttttctgtgatccaaggtaataattttagatactactaagactgctttctggactatcctagaattacttagaaatatatttattatcttttttgaacataaacatttcataaccttagacaatttcatttttagtctttttttcactatgaggaaattgtaaatgattctttgaaaggtttaactttgtacactgctatataaaataaccaggcacacattcatttatttgagctttttcattagatttttaggtcacagacagaaaagccacatgatgttaacaaattatcttcatcaattgagttcataactcagagattattacatgtcctagttactaattttgatttagtgtggatttttattcagtttagaatttagtgtggttcgacagtattattcaatttttgaatctgtatggaggatatacttaatgaatgatgggtttttatttttcaaattgaatatcccttatcaaaatgctttggacctgaagtgtttagattttgaatttttttgcattttgaaatatttgcattatacttcccagttgagcatccctaatctgaaaatttggaatctaaaatgctaaagtgggcattttctttgagtgtcatgttggagctcaaaacgttttgaattttggagcattttggatttttagatttagggatactcaacatgtactattcgttcaactctcctataggtttaaaatttttttaaatacaaagttgggaatatgaaaataatttgtcttctactagcattttcattggtccttttattttcatctattcagtgtttgtgaggaaagttttaaagtaacaataccatacagcttatgtatgagaaaatggagccaaagaagttgggaattcatactctgttctctttttttttgagacagagtcttgttctatcgcccaggctggagtgcagtggcacgatctcagctcaccgcagttcccacctcccaggttcaagagattcttgtgcctcagcctcccgagtagctgggataacaggcaagcaccccaacgcccagctaattttttgtatttttagtagagacagggtttcaccatgttgcccaggctggtctcgaactcctgagctcaggcaatttgcccgcctcaccctcccaaagtgctaggattacaggcgtgagtcactgcacctggtcctgttctgtttaattttaacttcctgtttaaaaaacttggcaacttttgttcaacccaaatgtttggtttcaacctatatatttgttttctacaagctttaagtgttaaaagttagtttgaaattttgaaataacaaatcttacacattttgaaagtgatcagaaaaagtagacatacactagaattctctagccagttaggaaacacaagtattttaaacagattgaaaggaaaaactccctatcacttttcacaatggtagttactacttttaatcttcaagatattttgatagacttacacttcttcctctaagtttatgaaagaaccttttagcttcctctatgcatcttttctgaacagggattaaaagatacgtactgtactcagggtggagacttcagcttggcttgtgtgagctcttaatgccctctggcatatatatgtgtttttgtgtagattgtgacatttgacatactgtgtaagtttagtttgttatctgggccagttacgtaaaatactttccagttgaaatttcctttctgcttctctcttgcttttgtctggagtgctacaatagattaattgccctgggatagctgcattgctttactatatgaagaactgtcactaattctgcaagaaatgtggttaggtctttgacagggattttcagcaaataattattctggtaaatacaggaatgtaatgagcttagtatatccttgactttttgggaaattttcttctctatacttgtctcagagaggaattgtataaaatagatttcatttccagaaaaacctgtggtttattcaaagtagtgcacaattcagagtacaggtgctccccaatttaagatggatttacttaagttttcgactttacaatggtgtgaaagtgatatgcactctgtggaaattatacttcgaattttaatccttttttttttcctctgagacgaagtctcactctgtcgcccaggctggaatgcagtggcgcgatctcggctcactgcaacctctgcctcccgggttcaagcaattctctgcctcagcctcccaagtatctggggttacaggctcccaagtatctggggttacaggcatccacgactatgcccgactaatttttgtatttttagtagagacggggtttcaccatgtaggccaggctggtgtcggactcccgaccttgtgatccacccgccttggcctcccaaagtgctgggattacaggtataagccaccacgccaggcccaaattttaatcttttactgagctagtgatatgcagtacagtactccctcatgatgcctggcagtaacagtgagccacagctcctggtcagccattgtgatcatgagtgtacacagccaacattctagaatgtactgtgttgccacgtcactttttccaactgtaggccagtgtaagcattctgagcatgtttaaggtgggctgatctaaaatatgatgttcagtaggttaggagtattcaatgctttatgacttaggatattttcaatttttgatgagtttatcaggacataacccccttgtaaatcaaggagcatctgtaattactatttgtcatttaactagatatattaatattctcttatcaaaggtacaagataatctgaaatttaaaaattccaaattcatctttaggcttctgttttttaatttttgcatgggaagctgcatagctcttttaattacagaatgctttaagattacaaataaggataatgattttaagaaggttaagtgacttttcgaaggtctaagtggtagtgatggcactgaaatttagtctcagaactttctgactcaagagtctgagctcttaaccactgtattatatatatgctcttccatttccctttttgttttttttaaaaaaatagaactagtgtccaatggcttttttcattaattacacaaagttaccagggaagatagtttaagtagtttctgtagggtaggtttagagaagtggaaagatgtttctgggaactggtttgaaaaataattttgtttctctaggacaaagaaaacagaaaaataacatggctttggtctaggagtaaaagttaataggaaagggcaatcacagccaaagatacaggaaactgttcaatgaaatagaagtgcctggaaaaagactgatggtgggataatggggagcttaaaatttacctgttagtatataatttgtgcccttgatattgagtatgtcacgatgaaaagaacactaagctgggattcacattgcttggatttacttcctaaccttagcactttttagttttgcagccttaagcaagttctgtaagtctcatttttttcatccagaaaagtataacatttgtacattataagctttggggagcattatgcttaaaaaggcaaatgaaaaagtttttggggggcataactccccactccttgagtgtgggcttctttccaaagaatttaatatcaaaagaggggaggggaagagctactgtacaatggtgaaacctgacaagccgtgccacagccagatgatcaaggttaacatcttcagtgataagtcatgttgacagtacagttgatgctttgaacaacacatttttttaatacatttttttttcagtatagttgcccttccttattgtaggttccacaaccaaacacagattgaaaatataatatttgtggtatatggaaactcccaaataaggagggctaactatgtgtcctcagattccacaggctgactacaggacttgagtatgtgtgcattttggtattcacagtggtcctggaaccagttcccgtagataactgataaatgactatatatacccttggataatgtggtgataatagcactttacttctgttgtcttcctcctgagtgctcataacccctctccaaccatgagaaaaattttaggcaaacccacgttaaaagacattctgtaaaatcactgactagtactcctcaaaactgtgaaggttatcaaaaacaaggaaagtttgagaaactgtcaccaccaagacagtacccaagaaagcatgatagctaaatgtaatgttacaatatcctgtgtaggatgctggaatgaaaaaaaaaaaaaaaggacattagggaaaaattaaggaaatctgaataactatggtctttagtttaataataatatctcaatctgggttcactgattgtaacaaatataccatgctaatatgagatagtaataataagggcaacagtgtacatgggtgggtgggcatatgcgagctgtttgtactatctgctcaattcttctgtaaatcttaaactttgctaaaaaataaaatatatttaaataaattttgaggtcagtataatagatctgggcatattgtagatgaagtaattgaagtttaaaaggctaactctgagttctgtactgcagtgaacaggatgcatggagtaaggcaaagaagagtcatgaagaagattgtggatttcatgggtgagggctttgatgacctctcctattcatagtccccctgcccataatgatagtggaaagttactgggaaaagccctgagaggaacttggctggggaacctgggtttggggctgccctgaacttgcctgtttcactgcacttctcagttgaagcctataaaggtgtgtgttagttctggccccaaacccagaccccaacactataaagaactctttctcttagtgttttggttattttttctttcaccttgggtgcagcttccagtttagtctcaccaggaactatgtcatttcatgccttttgtggatcctaagtctgtattctccttctataggtttattactgtttgggctcatctagagtctgaaaccttttgagtttctatttaatttcctttagagttttgtttttttttaactttaaaaattcccttgacttcagcaaatagtgttgtattatgtgccttatttgcttaaatcggcagttattaacatcaatattaaacaaagacatatacttagttttatccctgtttgaatgactattagggaataactaatagtaacctgttattcttgggacaagtggaatagttattgtgccattgtcagttttacaaggttatgaagaagttagatcagatttacttacatttgtcattatttgtacagtatactatgttaaagttgtggcatcatatgttaagactatatatatgttattttttttgagttgggcttttatcagttgataaagctgatatataaaaaaaagtcttgatgtgaaaatattccataaataacatttatctaaaagcagaaaatgacaataagaactataacaaaacctttagcatttggaatctaagaagacctagagagatttagaaaaagaaggataattttataaggaattttataagaaaaaggataattttaaacttataagaagtttaaaaataagcacattttattgttgggtttaattttttattcatggataaattagctgatgtagagaractagttttttctttctatctcaattcctttttgaatgaaatttagaggtgaaataaatattacaatgtcatgtctgtaatacttttaaaaatatttgtaaaagttttacaattggaatagcaaaaataacaccttctgtgtgtcaggcactgtgcatagtaaacaaagatatattagatgggctcctcgttatgtatcaactcattatttagtgggagagatatttgactcaacaactaacatgaagaaacagttaacagaatctgcagctcttggttgttgattgtatgtgagaaatgagaaagaaaagcagtcaaaggtgataaaaatttttactgtcaatgactggcagatggaagtatcctaactccagggagaaaaggagaaacaggttggaggtgagagagaaaataccagtgttgagtttgaaaagcctttgggacaaaatgttgaatatgtcctaaaggcagttgtatatatggatttgtagctcaagaggatgattatttcgagagatgaaaatatggaaattgagatgaaaatgtggaaattggaaatcagtgtttgagattctgcagacaagtcagcaaaggagactgagagtgacaaaagtagtcattaatagcagaaggggatttcatgggcatgtaaatatgtgtaaatacacattttacaacttgcctaattgtagccagcatggtccctgcaatgtaagttctgaagaaatgtgtcatttttctttttcctgaatagaatgaatgaatttggggaaggattgtattatactttwtgagaggaacagctcgaattctgttctcttccctgccagcccctcttgcatttcagggtttttacttgcccacagcattcttgcctagtaattaaaacctattttcaaactctttgaagtgctttcccagaatggccttctgtatgtgctgatactgtactttttattaattttcaagttcctttactcacattacatatatgtaattctatcttatgtgagtttggatttttatgagcatattccataacatttaaccatagttaacacttaggttaacgtgccttccccagacactttagaacttataaaaacttcatttgaattgtaataactaaaagcaccaggcaggtgtcagacacatttaaaaagcccttgggaggactgaaaaaaacccagtagtgattaaaggggcaaaattgtaagaacatgaggtgtaaatgttatactcgagtttgtgactgatatgatgtaaaataatgaagcacagtaaaaagataagtcaggtttacttctcactagattaatagaacagctggacaaatattttcacatgtgtttatgatatttttgttattttgtaaacttggatacttgaaatattggccatggaatgttaaaartaatgctattaaaaataactcaattaatggtacttattaatggcagtttttcttgatcattcttatcagtaaagcacatgctatctaggaggtaaaatatgtggcaagactaacatacattcttaaaagtaacataacttatgagcaaatacgggactgagactatactatatatacctaaactctgtagttagatataaatggtctcttgtttataacgggtactaataaaattcttattttcaaattagcctatgctactatctattaagaaagaattatacttcacctttgccactcgatctgctcaccagaaatacatttgaatttgaattgctggtactgtgtaaaatcttgttttaaatttaaaaaattatttttagcagccagctttgtctagccccaaattaactttcatctaaaatcttaacgggacatttcatttctcttttaaggacttagaacaggacatcataattcttagaaagagtgctggtttggaaaccacaattctgcattcttatcatttctgccatttaactagctctaggacttttggcatattactcagcctctttgtactttgcctcagttttaggtgagtaggttagactaagtgactcctaaagcccttctgctaataacattctatgagtaggtcacagtacttgtactttaatctgttgcatatcttttgtgccaatggtggccaaatatttggggcagtttctctaactgtcaagtgtaatagttaaaagacttgtatcccagttctgccatttgctaagctgtgtgactttggacaaattacttcacctctttgcacttaatatttttttctgtaaaattgtagtaacagtgtacaactcagaagactgttgcaagcagtaaaagggataagacatagtaagcatatagaaagattccacaaaattagtacatgctgattgctgctctcttccatttttaagaaattgatgtatgtttgacctcaaatggagcaaaaatatgacatcacagcttatgattccttaagttttctgttagtagtaaagtgtaatatttatctttgaaactgaatatagacttttaaactctttgtaccaaaatacagtgatttttggcaacttaaacttcaagcttaaaataacctcccttggtaatgaaattgctgtgacttctcataaaactcgagaccaacgcaacatacgagttcagctacttgggttgcattttgcaggccatctaggtaagattcatcagtacatagtcctgtacaaagtcatattttctagggaccctgcagtcttttcattatgccttattagtaacacttgacttgaattattccaatgcgtattttcttcacagtgccagattttcaagttagagtttcaaatgtcttaattttttttctttctgttttgttttgttttggaggaagaagcattgtttcattcttatccacaggtcctgtagtccacctttctgtggcagtggagtgacccttcaattggttgaggctttatactatattttcacattttcaaacaaagtatcaagaatgtttacctgtatgttggatatttattaataaaccatattaatctttctattgataccaagatattgacattgtacttagcagagaaaaaaatcatgaaatgaccataatcttgtactttctaacattaatgcctaggttatcttcatcatctacagagaacaatgaccatttttccaggttctctaatctctttccttcagttaagccagataattaaaaagcagtatatatacattcagttacattgcctgaataaagaaatctcttcactggattattattttatgccatatccttggcttttgcagacaattgctgtaagaacaacagcaataatgtagagttggcatgatggtaattgcaataaaaacagtgaccccagcaatttcctttctgattattgtcaggccacagtttgcctaggtagttgctctaaactgaataaaatctgcatacaaatttcttaccacccctaacccctcaacaaaaacacactctgctgtttatctaaagcttgttttattgggtgggccctgatccttgttttagtgttcactttcttaattccttgtccacagtcccccttgtgtaaaacttaatttaccacatgtaaatgaaaagtactagttttgtttatttgactttatattatgttatgaataggcatttcttgctttgtactacaatcgtttttacagccctatactacaggcatttcttgctttgcagtctagtacaaagcaagtatagggctgtagtatagggctgtaaaaatgattgtgcaaggtgaaattatgcagaatgatcttaatcagtgggaaaaattacaagtgttacataacttttaaacattttgtcaaaacattaagaacgttcattcttggttataaatgttgaggcagtgcattttggctgtataacagatcccttgctagtttccctacctcttaacttatttctttgactagcccttcattcacacactgacagcctagtactccattttatgaggacacaacaatttatttactcatttttatgttaatgaatttttaagacgcttccaccttttatttttattgttgttataaacagtgctcagtaatattcttattcattttcttttgtatattggtaagagtttctgtagggtatacgtatctagaagaagttgttattgttattggacatgtacgcttcaacattactagatagtttgaaattgctttttttgtgtgtcattaattttttttgcttaatttgtatcaatcaattttttaaatattttgaagattgttcactccttagcaattatgtcattgacatttttgatgacttttgatcttatagacaaaagtgaactctttcaaattatatgagattaatctacatcagaggtcatagtctttagacataatctggcctgcagtgtattttggtccagctccctagctaagaatgaatttttcatttttaaagggatattaacaagaagaatatgtgacaaagactttatgtggcatatacagcccaaaatatttactctctggctctttatatttcgtctttttagatcccacaatacgtggaaaactgccttcaagtttatttacctcagtgacggctgtgggtgtaaacattgtgtcgctgttacatagtctaacctgtatctaaaaataagcttgtaaaattgatttggtattgtttctttttcttcaaaatccttagaagtatgagaacattttgcctcagcataattaatgtttcattgtttgtctttttttaagttaaatctgtttggtagttgcattatttaaaaaattgagatatggaagtattggtgattaaattgtaattatgaagtcactctgtagtatcttaagcttaacaataattttattgtggaaacatgattgcttacagtttaagtaccaatgtacaaataattgatatactaattataaataattactcatccaaaacactgtgccaagcaaatccttgtttacttatggatacataatcactttgtctatttgtgtattctgtggtttgtagatttcagtcagtgatgtaatgatattatctgtcttaaatgaaagataatatttttaattattactcttcttttttataattttttatttattattattattatttttgagacggagtcttgctctgtcacccaggctggagtgcagtggtgcaatctcagctcactgcaagctccacctcccgggttcacgccattcttctgcctcagcttcccaagtagctgggattacaggtgcccgccaccacgcccagctaattttttttttttttttttttttgtatttttagtagagacggcgtttcaccgtgttagccaggatagtctcgatctcctgacctcatgatccacccacctcggcctcccaaagtgctgggattacaggcgtgagccaccgcgcccggcctatgattattcttttcatgtatctgtctcctaattagcctcaaatattgatttttagactatgtataatctattactctgaaacagttttttggggtttttttgtttgtttgtttttgttgtttttttgagayggagtttcgctcttgttgtctaggctggagtgcaatggcgtgatctcggctcacagcaactgctgcctcccaggttcaagcgattctcctgcctgagtctcccaagcttggattacaggcatgtgctactactcccagctaattttgtatttttagtagagatgtggtttctccatgttggtcaggctggtcttgaactcctgaccttaggtgatccgcccacctcagcctcccaaagtgctgggattacaggcgtgwtccactgcatctggcctgaaacagtttttcaaaaagattaatcatcttgggttaatagaaaaaaatcaggcagaaagataaaactacttctgtcattacttaaggattcctgtgtttatgctattaggtatctccctcatcttaattgaatatgatgcaaggcagtgtccttggtggaagctggattctgtcagtctgaactttgagatgttcttcctatccctttcttatttttgctcttaacttttctaccctgattctcatatcttctaacctactcgtctgttaccatattatcatatttcaatatttttgaagcagcattgtgaaggtaattgtcttatttcaggctgctataacaaaataccatagactgggtggtttaaacaacagaaatctatttctcacaatcctggaggctgggaagtccaagatcaaagtgctggcagatgtggtgtcttcttagggtttgctgcttggctttcatgtggtcatcttgacatagcctcacatagtggaaagcagagagagagagagagatatcaagctctcctgtctcttcttataaggacactaatctcattcatgagggctccaccctcatgaactaattacttcccaagggccctgtcttctaatatcacattgtggattaggatttcagcatatgaatttgggagggacaaatttggtccatagcagcaccatacaaaaacagtattaaaggtggtctcgttttcatcaggcatgtttccaacttgaaagatttgttaatgtccataatttttgtctgtttgccatttctgttcttttcccttttctcctcttttcttttgcattcagtgcattttgatattgtatattatctcctctattatcttaatagctaagcctctttattttacttaaaaaaatacttgctcaagcatctatactatacatacttacattctgtcttcaaataacactgcaccactttatttatagtttaagttcttacatcaatatacttttgttttcttgtgctgtattctgtattttacctctaaatacacaataaactttatattgtagagttaaaacttttagtcagttacctcttaaagaaattaattgaaaaaagagctattctatatttattcatatatttgccgtttctaaccctcttcatttctttgtatagatctaggtttccatttgatataaattcccatcaagctttagaaattgttttaatatttcttgtagtggagatctactagtgacatatcctctcagcttctgtttgtctgataatatcttgtcctcacctttcatttttaaggatatgccattctagcttgacaggttttttcttgcagcacttgtcctccattgtcacttggcttgaattgtttctgataagaagtcagcagtagttctttgcttacagatatataatgtgttcttatattctcatttctcttaagactttctctttcttatcagtttttagtaatttgataatgatgcatcttgatgtagtttccttacttggatttcactgagcttttttggatctagttaatatttttaaaaatcaaatttgcctatgtttttgtcatcttcttccacttttttttcctgacttttcaattgtatatatgaggggacttcaaaaagttcatggaaaaatggaattaaaagataaaaaatataaactttatttctcaacataaggtccatcaagttcaagatacttttgtaagtgatgataccagtcatttagtctatccctaaagaactgagtgtcctgggaaattaatcatatcagtgttatattttttacattagtaattgaataaaaatgggtgccctttaaaaatttttaaagattaagaaacaaaaagaagtcagaagttgctaaatcaggattgtaagataaatgcctaatgatgtcccattgaaattcctgcaaaattgcccttgtttgatgagacaaataagcataaactttgtggtaaaggaggactctggtgaagctttcctgggcatttttgtgctaaagcttttgctcactttctcaaaacacttgcagtcagcagatattattattctttggaaagtcaacaggcaaaatatcttgagcattcagaaaaactgttgccatgacctttgctcttgaccagtccatgtttgctttgactggactacttctatctcttggtagccattgctttgattgtgctttgtcttcaagatctgtagagctgtgtttcatttcctgttacarttctttgaagcagtacgtcaaaatcttgatcccacttgtttacagttttgattgaaagctctgcccttgtatgcagctgatctgggcataaggattttggccctaatcatgtggaaagtttgcacaactttaatttttcagtcagaattgtttaacctgaaccaattgcrgtggctctggtggtgggtattgtttgtgctgttaatcatttatcttcttcaattagggaacaaacaagatgagttttttccttgcaaactgatgtggaaggtcagctgctggggkcttcatcttcaacatagtcttgttctttcagttatccatttgtaaactgctatctcattagggcattgtctcatgaacttttcataaagcatcaatagttttaccatttttctatccaagcttcaccataaatttgctkcttcttgcttcaattttaacaaaattcatgtggctctgacaaactgttttcaaactggtatcttacccttagtgcctcaaactggactctgttcagacatgttttaacaagttagtatgaatttattttggtgcaaaaataactgaaatccatgcataatttttaaaataatacatcttttacrtgaactttttgaagacccctcatatattaaacctcttaatattgttgttattaagggacctgtgtctctgaggatgtcatktttttttttgtcaatcttttttgtttctatgcttactttgaatggttgttctgtctccaaatttactgatttttttcttcagcttgtaagcttatttagtgcactttaaaatttccaatattatatcttttagctgtagaagcttcatttggttctttttatgttttctatcttttcctcataattttaatgttttccttaaaattcttttttgtcttcttctttttttaaaaatttcttttggccaggtcaataactgcatagtgttttcctgaaaatttttgaaaatatttacgatacctgtttttaagatcttgtttgccaattttatcacttcttttatttctatatctatttgtattgaactttttttctccaatrtttttatatttggatcaagtttttgtttatttctttaagatctctaaactttacagaaaatttgcaagaacagtcacaaacatttttttcttcaaccatttgaatttagttgctgccatatgccccatcacagctgaatacttcagtgcgtatttctacaaaaagcaaattctcttacataaccacagtgtaaccataaaattagaaatgagcattattattgtcactcaagttttgtcaggggtcccaataatttcctttatgacaaaataagttagtccagaatcatgtgttgcatttatttgtcacatccgtgaagatttcttcagttggtnnnnnnnnnnnnnnnnnnnnacatccgtgaagattcttcagttggtaacagtttcttcagtcttctttactttagtgaccttgacatttttgtagattgcagggtagttattgtgaacaaacatctctaaattgagatttgcatgacattccctcatgattagagttaggttattcttagaaaggatgctgcattcttctcattgcattctatcaggtgatacttgattttaacttgtcgtatttctagtgatgttaactttgattatggtggtgtcagccaggcttcttcattgtaaaattactctttttcctgttaagttaatattttgtgggaagttattttgggactatataaatatcctgttttggccgggcgaggtggttcatgcctgtaatcccagcactttgcggggctgagatgggtgggtgacctgaggtcaggagtttgagaccagcctggccaacatagtggaaccccgtctctactaaaaatacaaaaattagccaggcgtggtgacatatacctgtaatcccagctacctcaggaagctgaggcaggaggatcacttgaacctgggaagcagaggttgtagtgagtggagatcgcaccactgccctccagcgtgggtgatagagtgagactccatctcaaaaaaaaaaaagaaagaaagaaaaagaaataaataccctatttcttaagagatttttaaatttatttcgtttttatgggatcataaattcctttctattcagtggtttatgatttctcagtatcactatttgtattgatgtctcagttgcaccagtttggctagcaggccctcttttaagctgtcttttgtgtgctcttggcattaattaatcgcagatggaaagtcagttgtaactctgtgcagctttgacattttacatagctgagttaataaagtgcttagaacagttcatggcacatagtcaaggttcaatatatgttagtacttatgattgcaattatacattttttattttaatcattttggagtacagtatttttaatgagctacgtatttatttttgtattttttattggtgtatcatagttgtacatattttgcaggcacatgtgatattttgatgtgtatacaatatgtactgatcaaattgggataattggagtcttcatcacctcaaacattgaacttttcttggtttcgggaacattacaattctcctcttttagttatcttgaaatatgcagtaaattgttgttaactatgatgtctctactgtactactgaatactggtacttactccttctaactgtggttttgtacccattagccaattttttttcatctccctcctcctctcttccctcctcaggctctggtaaccaccattctacgctttaccaccatgagatccacatttttagcttgcacatatgagtgagaacataaagtatttgtcttttctgtgcctagcttattgcacttaacataatgacctctcattttatctgcgttgctgcagatgacaggatctcatttttttaatggctaaataataattgatgaacacttaggttgactccataccctggctgttgtaaatagtgctacaatagacataggagtgcagatatctcttggaaagactgctttcctttcttttggtagtaaacccagtagtggaattgctagatcatatggtagttctgtttttagttttttgaggaacctccccactgctttccgtaaatggctatactaatttacattcccatcgacagtgtacacatgatttcctttctctgcatcttctccagcatttcttatttttgtctttttgataataaccattctaacttgcataagataagagatcattgtggtcttgatttgcatttccatgatgattatgatgtcgaaattttttcatatagttattggccatctttcttttgcgcattttttttattggattatttatatttgctactgagttgtttgaattccttttgttattctggttattatttctttgctgaataggtaatttgctaatattttctctcattctgtagattgtctcttcactttcttaattgtttcctttgctgtgcagacactgttgaggtaatttgtctttttttttgcctttgttacctgtacttttgaggtcttgcccagaccactgttgtatagcatttcctcagtgatttccccaagttttcttctagtagtttcatagattcaggtcttatgtttaagtgctttttttttttttccttttgagacagggtctcactctgtcacccaggctggagtgcagtggtgtgatcttagcttacttcagccttgaactccagggttcaagcaatcttcctttcttagcctcctgagcagctaggaatacaggtgtgaaccactacacctatttttttaaattattattattgtagaggtggggtcttgatatgttgcgcaggctcaaacttctggcctcaagtgatcctcccacctctgcttcctgagttgctgggattacaggagtgagtcatgtgcctagccacatttaagcctttaatacattttgaattgatttttgtttgtggtgaaaaatgtggatttagtttcatccttctgcatatggatatttactttttccagtatcatttattagagactgttctttccccagtgtgtgttcttgatgcccttgtcgaaaatgagttgactgtaatgaatgtggatttatttctgggttctctcttttgtttcattggtctgtgtgcctgtttttatgccagtaccatgctgttttattactgtagctttgtagtataatttaaaataactttgttttatgcttccagcttcrttcttttagctcaggattgctttatctactcagggtcttgtgtggatccatatgaaatttaggattgctttttctatttctaccaaagaatgcccttggtattttgatagggattgagttaaatctgtagattgctttgggtagtgtagacattttaacaatacttattctaattcatgagcrtgggatatctgttcattttttatgtgtgtcctctttagttgttttcatcaatgttttatatagttttccttgtagagatctttgacttctttggtcaaagaaaatttattcctaggtttttgtttgtttgttttgaagttattgtaagtggaattgctttcttgagttctttttcaaattaattgctattggtgtatagaagtgctactgatttttgtatgttgattgtgtatctgggaatttactgagttcattagttctaagagtcttttggtggagtctttaggtttttctacatatgagattatgtcatctgcaaacaagcacaatttgacttcttccttttcaattcgaatgccctttatttctttctctttcctaattttggccaaaacttgcagtattatgttgaatagaagtggtgaaagtggacatctttgctttgtttcagatcttggtgtaaaggctttccatttttccctgttccatatgatagtagctatgggcttgtcatatatgccctttatcagattgaagtatgttccttcaataccctgtttattgaaggtttttatcatgaagggatgttgaattttacccagttttttcagcatctgttgaaatgatcctatggtttttgtccttgattctgttaatgcagtgttcaatgtttattgattcgcatatgttggttcatccttgcatccctgggatgaatcccacttgattgtggtgaatgatctttttaatgtattattgagtttggtttgctagtattttttgaagatttttaaatctgtgtttatcggggatattgatagttttttttatttgttttgtctttggttttgctgtcatggtaatgctgccttcattgaataaatttgaatgtattctcccttcattttttttgaaatattaataattagcagaatttatgttaattctttaaatgtttggtagaattcagcagagaagacatcaaatcctgtgcttttctttgatgggagactttttattgcttcaatcttcttgttattgcttttctgtttttttcatggttaagtcttggtaagttgtgtccaggaatttattcaattcttttagattttcccatttgttggagtatagttgttcataatagtttctaatgatcctttgtatttctgtagtatcagttgtaattttttctttctcttctctgattttatttatttaggtgttcttttttttaggtagtctagccaaagctttgttgattttatggtttcaaaaatcagcttttcatttgttgatcttttatttttttagtctgaatttcatttatttctgctctttattatttgttttcttgtagtaattttgggtttggtttgttcttgcttttctagttccttgaagtacattattagattgtttctttgaagtcttcatatttctttgatttgggtgtttaaggctttaaacttccctcttagtactgcttttgtgtatctgtagattctagtattttgtgatttatttcactggtttcaagaaattttaaaattttctttttttttggtggactcattgggcattcagaaatatgaactgtacagaaactgtacagtttccaaagttgttcttgttactgatttctagtttttgttgtggtggttgtggtcaaaaaagatgcttgatatgattttgactgttttgaatttgttgagatttattttgtggttaatgtatggtctatcctggataatgtgccatgtgctgataacaagaatgtgtatattctgcagcagttagatgaaatgttccgtaaatgtctgttaggtccacttggtgtatagtttaactccaatgtttgtttgttgattttttgcctgaactgtttgttgctcaaagtggggcattgcggtcccctgcaattattttattgcagtcattgcagtctgtctctctcgagagctattaatatttgctttatatatttgggtgctccactgttgggtgcatgtttttaattttgttatatcttcttgctgatttgacttttctaaatcattatataatgactttctttgtctctttttacaagttgtgacttaaaatctgttttatctgatataaatatagctactcctgcttttttttggtctccatttgcatggaatatcattttccattccttcactgttagtctatatgtgctgttagaggtgaagagagtttcttctaggcagcatatagttgtgtcttttttttttttttggagatggagtctcgctctttcgccctttcgcccagactggagtgcagtggcactctctcggctcactgcaacctctgcctcctgggtttaagcgattctcctgcctcagctttctgagtaactaggattacaggcacctgccaccacgcccagctaatttttttttagtagagatggggtttcaccaagttggtcaggttggtctcaaactcctgacctagcgatccatcccagcctcccaaagtgctgggattacaggtgtgagggtcttgttttttaatccattcagccactcttggtcttttttaactagagaatttagtctatttacattcaattttaatattgataggcaaggccttactttgaccatttcgatacattttttttttggtattatgtaactcttcttttcgtttccttctttcttactgtcttcttttgtggctgagtgatttttctctggtagcatgttttaatttgttcttttttatttttagtgtatatattatagtttttagctttgtaattaccttgagtcttataaaaatattatattaattatttcaaactggtaccaacttaactttgrttgcaagataagaaacaaatgaaaagaaaaatttgtacaccttaacttcctctcctccaacattttgaatttttgattttacaacttgctgtttttatattgcctcttaacaaattgtacttgtaattatttttaattgttttgtattttctttttactaaagatataagtgatttaagaaccatgattatcatattagtataacaataacgttaatgttcttttcttttggtttgaagaactctgattagccttttttataggacaggtctagtaataaatttcctcagcttttttttttttttttttttttggcctgggaaagtctttatctggcctttatttctgaaggatagttttgctgggtacacwattcttcgttaagttttttattttctttcagcattctgaataatttcactccctccaaccctaaggttcccactgaaaattctgctgccaagtgtattggatctcccttatatgttatttgtttcttttcctttgctgctttcaggatcctttatctttgatctgtgtgagtttaattataaatcttgggttgtttcttattttggagagggaaagttgagcctggttggtgacctttaaccttcatgtacctggatatttatatcttttcaagctttggaaagttttttgtatttctttgaataagctttctacccctttgtctttctcagtttttttctttcatttcagtaacctgaatatttgttcttttgatgttgtctcatagctcccataaaccgttcatttcttttcattccttttgcttttttctcctctgactgtgtattttcaaatagttgggcttcaagctcactgattctttcttccttttcatcagtcctgctgttgatattctctattccatttttcattttgctcattgtattttccagctccacaatttttgtttgattttgtttatgatttcagtatctctgttaaatttccctaatacatttctgaatcgattccgtctgttttcttgaagttcattgagctctcttaaaacaggtattttgaattccttgtctgaaaggtcacatatctctatcactttagggttggcctctggtgcctcatgtccatttgttgagatcatattacccagaatcttcttgatgcttgtgaaattgcaggctgtctgtgcattgagggattaagtatttattttactcttcacagtcttcctttgtttgtgcctgtccttctttagagaccttccaagaattctaagccaactgagtattgtgtttcctgagcctgtgaccacttcagctatctaaacactaggagactgtattagggttctccagagggacagaactaataggattatgtgtatatgaaaaggagtttattaaggagaattgactcacatgatcacaagtgaaaatcccacagttggccatctataagctgaggagcaatgaaaccagtagtggctcagttcaagtcccaaagcctctaaggtagggaagctgacagtgtagccttcagtctgtggctgaaggcctgagagccaatggcaaaccactggtgtaggtctgagagtccaaagggtgaagaatctggagtttgatattcaagggcaggaagcatccagcacagatgaaagccagaagactcagcaagccggcttatttcatcttcttccacctgctttttctagccacactggcagcagattggatggtacccacccaaactgagggtggggctttgtcgcccagtccactgacccaagtgttaatctcctccggcaacatcctcatagacccaaccagaaacaatattttgcatccttcagtccaatcaagttgacaattaatatttaccatcacagagactctctgagcccaggcttgccacaaatctcacaggatctctttggttgatatggctttctggcccagatggacctggggtagacccaaggcagatactccggctgcgtggaaatgctggccagggatctgagtccagaagactgtcccaatcacccagatgagtgtgcctttcagcatatttctgcacaggcaggaygggctgctaactgcagtgagagggcctggagttgagactgggctgcgttgggatctgctgtgtgaaggagactggccccgacttatttgctcatatcagcatgcatcactcagctggtcattgcaaaagtgcttgactgtaacagggsggtctggtactgagactgggctcccttggaatctgctgtgggatggaggttggtgttcttgtcacattggctcagatgggcatgtgtctcccagcaggtccgtacatagatgggatagctcccagactgcagcaggaggggctggagctaagactgggcccccttggactctgctgtagggacggatttggaaagcttgtcttgttggctcagagtggcatgcatctcccagcakgtctcagcacagataggatagttcctctactgcactgggcggggcttagactgggtctcctcaggatatgttgtgggatagaggctggtgagcatgtcggggaggatcagagtyccaggccatgagatttgtgtgaatctccccctggtttcttgtgtaagcaactataagctgggacctcagctagggaggcctggagcagtgtcacagttcaacttccaggttcactactgagaccagttatcagtgggctgatgagcttttctgccaaggcattagtgtgcatgatttctctgaaccctttggcagatgattttggttgcaggctcaaggtcaaatggggctatagtcaagccccttgagagacagggctacttctgggcttgaatgcaaaagcaagctcagtggagcagatcagtcacttgggtgttagtgtaccctctcaaagtgaccctcctgtgtcttagggtttcacaattgtggatggatggataattctttttattgtgggcatatatgagcaggttaccttctatttcgccatcttggtggtgtcactctatgaactacatacttaagagaaattgctacacagaatatattgagcatcctttttttttttatgaattaagtcattatcgtgaacatcaaaaatagtaatgttactttgggaggccgaggcaggcagatgacgaggtcaggagattgagaccatcctggctaacacagtgaaaccctgtctctactaaaagtacaaaaaattagccgggtgtggtggcgggcacctgtagtcccagctacttggaaggctgaggcaggagaatggtgtgaacccaggaggcggagcttgcagtgagccgagatagcgccactgcactccagcctgggtgacagtgcaagacttcatctcaaaaaaaaaattagtaatgttaagtcaaatttgaattattctacaccccactctcatcttcacattttgctatccacaacacattaattttatatttttaattgtttttgtggctatcttctcatttccnnnnnnnnnnnnnnnnnnnnttgcactcctttgccttaaacttgttcctcattatttttcccctttactattctaagcattttataactgttctctcgacttctggactcttaatattcctcctaaacatcgtttatactgtggccagaatcatctttcattaatacctctgttatcacttaactttcataaaacccttcctattgcttacacgataaaatctgaacccctgcctcccactttaagtagctttattgattgccacaatctccctgcaccctatgattcacgtgtagtaaattcttatatcagttctgttcaagtgtattcattgtatgtaatttaaaagtcaatgaactcagcgtaaagaccttaagagctcttctacaacaaagttcatatagtaacatctattttggctcatcagagacctttttgatttcttcctgggtcttgatgtatttcatatttttgaggatgtgaaataaatcaactgaggactaacctgaaatgttactttctctaggaacatttcttgactctaaggagtttcttctgtatgttttgatggtacctgtgcattgctctatcatagtacttgtcatacagtatgctaattttccttgtaatatggtgttttatatgaagccaaatacygcccataccagtttgggattagttaacattctgctagggtttgcctttgtgtttcagtcagtcagatttttaaaaattaatataaattgtttaggaaatacttaagtcagtgtcttgttacatcctcggaattggctggacccgtgatctgcatggaatagaatatgaatcttgttcaaagtaaggggtgtgtgtatgtgtttgtgcatgcatgcatgctcgtgcgcacacacagagagagggagagagagacacacacacatgtctcttgttcttcgggatgtatgaggaactgtgtcagaatagccagatgctcggagaaacatccccacaactgaggtcatctatcattatgggacaatttaattcataacttcttgtggtgactgtttatcttaagagagtagatatgtatgtggtaaaaaagaaagtctgctgtgtttcttacaatatttgatattctaggtacttgagaaataagaaatattaaagttcagaaatattaatgtcaaaaaatgtgcatcttcagatctggtaagtagacctgcttagagctagccagtggttaggcctgagaaatggctgttccatcttctgtgcctagcaccacatctgatatagtgtaaaaatgtggatagagttatagacagatgatgaataagttgttaaaatattatgattagtcacagcctttcctttgtattgatgtgtggtttttggaatgtagaatggctttaacttttaaggcacaaataacaaacagagaaaataagcatgctaaagggattaataagcagattttgtttattttctcttttgtgtatattttttctacttcattggaagaaatatacatgattgcatttataaagacactgaacagttgttttcttttcatgcaggggcctgaattaatgaataaatatgttggtgaatctgaaagagcagttagagaggtaagaaattgtgcctttagtggcactcagcacaggagaatcacacttctgtcctgtgcagcttcccttttgttttaggtaacagactttggcatttccgaagtcagatcttagtggtatttttttttcttcaggtaaatattattttattatttaaaaatgcagttttgatcatctgcaatacttcagttttgtttttaaacatcatattaccagcccttttaaaactatcattttttctgataataatagccagcatttctgttaaaatagttaatgctgttactaatagttaataatacctatcatttattgagctcttactgtttcaggcattgtgccaaatgctttgtgttctttttaaaattcaattattaaaataactttctgaggtaggtgtttattatctccattttatagatgtagaaatcgaggcttacagaagtgaagttaactgctgaaagtcacacagttactagtagtgcagctgggattttaactgaaattttctgattgcttaactgaattgcctccttcacacctatgtgaatatgtattgatagtcttgtctctttaagcactattgaaggggatacttttacatccattataaagttctgaacatctattacaaggtctatacaaagtgactgggcttgttgacttgtacctaataggtttggttctaaatatagttttaaaacaaaccaactacagaattttctagtgtttgctcatctttagcyaatgtggcactctttccaccagaccttccgaaaagcaagagcagtggcgccttccattattttctttgatgaactggatgccttagcagttgaaaggggcaggtaagaagtatttaatagcactgctattacataataatatgatgttacataataatagcaattatggtataaatagcattttgtatacaacttttatctattaatacatttggcctaaaaaagttttcagtttttgtaattttttcctcttayacccattaaattatttcatgtaattactgtatagtacttttatctatattggataaaaaccactgatacctgtctgggcatttgagttaatttttatagtttatatcaacacatacttcttagtattgtctatcaaaattagggttattgtaaacatataattaaaactgtaaacaaaactggattaatcataattacttcttgtagtagaacaaaattataaaatacgttacacagattttaaaattctctggaataaatgtttcctaaagtaaaattaaatagaatataaattagtattaatagttttgctccaaaatctcaggcagtaaagaggattatctatgatgtcatttcaaacaaatatatayacacacacacacacacacatcagaactgttcataagtatgtttttttcctctacaaatgtatagcggtcctttaatatgttctacaagtggttcatgttgggtaatgtaaattcatgtactttgtgcatagcttcttgatgtgtatattgattataaaatttttgctggtggtaattacagtgaagggtgaagacaacttacaggtgtcagtagtaagtgtgatatgaaacattgctgttatcatccttcttaattagagctgcctcatgtgatgagagtataaattgtcattaggaacctatcattaggaggtagactgctatattagtccattttcgtgctgctgataaagacatactcgagactgggtaatttataaagaaaaagaggtttaatggactcacagttccacgtggctaggagacctcacaatcatggtggaaggcgaaagacatctcttaggtggtgacaggcaagagagaatgagagccaagtgaaaggggaaaccccttataaaaccgtcagatcgggctgggcgccgtggctcacgcctgtaatcccagcactttggcaggccraggtgggcgaatcatttgaggtcaggagtttgagactagcctggcccacatggtgaaacgctgtctctactaaaaatatagaaattagctgggcgtggtggtggttgcctgtaattccagctacttgggaggctgaggcaggagaattgcttgagcccaggaggtggaggttgcggtgagctgagactgctccatcgcactccaccctgggcaacaagagcgaaactccatctcaaaaaacaaaacaaaacaaaaaatcagatctcgtgagactgattcactaccatgaaaacagtatgggggaaaccacccccatgattcagttaatctcccactgggtccctcccacaacgtgggaattatgggggctacaattcaagatgagatttgggtggagacacagccaaaccatatcattccgcccctggcccctccaaatctcatgtcttcacatttcagaatcattcatgccttctcaacagtccctcaaagtcttaactcatttcagcattaactcaaaagtccacagaccaaagtctcatctgagacaagtcaagtcccttccacctatgagcctataaaatcaaaagcaaatttgttacttcctaggtactatgggggtacaggcattggataaatacacccgttccaaatgggagaaattggtcaaaattaaagggctaaaggccccatgcaagtccaaaatccagcagggcagtcaaatcttttttttttcttttcttttttattttattttattttattttattttattttattttattattattatactttaagttttagggtacatgtgcacaatgtgcaggttagttacatatgtatacatatgccatactggtgtgctgcacccattaactcgtcatttagcattaggtatatctcctaaagccatccctcccccctcccccgaccccacaacagtcccccgagtgtgatgttccccttccggtgtccatgtgttctcattgttcaattcccacctatgagtgagaatatgcagtgtttggttttttgttcttgagatagtttactgagaatgatgatttccaatttcatccatgtccctacaaaggacatgaactcatcattttttatggctgcatagtattccatggtgtatctgtgccacattttcttaatcctgtctatcattgttggacatttgggttggttccaagtctttgctattgtgaatagtgccrcaataaacatacgtgtgcatgtgtctttatagcagcatgatttatagtcctttgagtatatacycagtaatgggatggctgggtcaaatggtatttctagttctagatccctgaggaatcgccacactgacttccacaatggttgaactagtttacagtcccaccaacagtgtaaaagtgttcctatttctccacatcctctccagcacctgttgtttcctgactttttaatgatcgccattctaactggtgtgagatggtatttcattgtggttttgatttgcatttctctgatggccagtgatggtgagcattttttcatgtgttttttggctgcataaatgtctttttttgagaagtgtctgttcatgtcctttgcccactttttgatggggttgtttgtttttttcttgtaaagatagtcaaatcttaaagcttcaaaatgatctcctttgatccatgcctcacatccaggtccccctgatgcaagagaggggttcccatggtcttgggcagctctgcctctgtagcttggcagggtacagcctccctctggctgctttcacaggctggtgttgagtatctgcagcaacatggtgccacaggcacatggtgcaagctgtcagtaacctaccattttagggtgtggaggatcgtggctcttttctcacagctccactaggtggtgccccagtggggactctgtgtgggagctccaaccccacatttcccttccactctgtcctagcagaggttctcataagggccctgcccctgcagcacacctctgcctgaacatccagggatttccaacatcttctgaaatctaggcggaagttcccaaacctcaattctcgacttctgcacaaccgcaggctcaactccatgtggaagctgccaaggcttggggcttgyaccgtctgaagccatggcccaagctgtaccttgaccccttttagccatgcctggagcggctgggatgcagggcaccaagtcctgaggatgcactcagcagtggcagggggggccctggacctggcccagaaaaccatttttccctcctaggtttgcaggcctgtgatgggaggggctgcagggaaggtctctgatcttccctggagacattttccccattgtcttggcattagcatttggttccttgttacttaagcaaattactgcagctggcttgaatttctccccgggaaatgagtttttcttttctactgtatcttcaggctacaaaattccaaacttttatgccttgtcacatcttgactgctttgctgcttagaaatttcttccaccagatatcccaaataatctctctcatgttcaaagttctacagatctctagggcagggacaaaatgccaccagtctctttgtatagcaagagtaacatttactccagtttccaacatgttcctcattttcatctgagaccacctcagcctggattttattgttccatattgctgtcagcattttggtcaaagccacttaacacgtctctaggaagttccaaattttcccacatcttcctgtcttctgagccctccaagtctctaggaagttccaaactttcccacattttcctgttttcttctgagccctccaaactgtaccaaccttcacctgttactcagttctaaagttgcttccacattttcaggtatctttacagcagcaccccactctaccgttaccagtttactggattagtccatttttatactactatgaagaaatacccaagactggataatttataaagaaaaagaggtttaatgaactcattagttccacatcgctggggagcctcacaatcatggaggaaggtgaaggaggaacaaaggcatgtcttacgtggtggcaggcaagagagcttgtgcagggcaactcccctttataaaatcattagatcttgtgatgcttattcactaccacaataacagtgtgggggaaaccacctccatgattcgattacctccacctggccctgcccttgacacatggggattattacaattcaaggtgagacttggttggagacacagtcaaaccataccagctgccctgctttccacccccctcacatttggtattccatgaatacttaccagtctttttgctttgtgaagtgaagcactcaagcccttttattacttacgttttaagatggcacagagtgttacaaaactcaggtttacctaactacaagagaagaaaagccagagaattttgctgaagtagtgtgaccttccacagttatgtgacatcagagacatctggttttggaccctaaaaaggaacaggtgggagggatatcctgttaaatatgaaccagatgggaggtagaatatgtagcaaagttctcttaaaatgtctctgaaataaagtgatgtgagaaaccagacaaggcactttgtagtaatatcttgctttcwtaggagtttagctcagtaggaattaccagatacataagagatgctaatgatttgcagcttctagatgttatttcctctggtagtcttcatcaaattgaacttttcagagaacacatgtgtttagtgtatacctccctctctcaatggctcgtcatgtgttacttaatgaagggaggcagtttacatactgagaaattcagtcattagtcaatttcattgttatgtaaacatcatagagtatacttacttataaacctggatgatgtagccttctacactatataccatatggcctattgctagatagtataacaatcatctgcagtactttgattttgttttcaaacatcatattaccagcctttatttttatgaaataaagattttttttaaaactatcatttttttctgataataatggccagtatttctgttaacatagtcaatgttgttactgttacttaatcatacctatcaattattgagctcttactatgtaagatatatatagcaataagccatatggtatagcaataagtcatatggtatagcaataggctatattacctataccaggtagcctggtcctaggctactaacttatacagcatgttattgtactgaataccattgtaggtagtggtaacaaaatgcttagatttgtgtatataaacatacaaaagttagagtaaaaagacagtgctgtgatcttatggtaccagcttcatatatgtgattgccattgacccaaacttcattatgtggcacatgactgtagaaataaattctatgcaatttgttttgtacagaaacatttctggtcataatttatcaagttagttggcatttcggaaagcaaagatgaagttccattcaaggaaatagagtgctgatgggtcccaattaaagagttttggttgtactctatttgcactgaatcttatgtagtttgttttttgtaaccataaaactctcataaagtgactttctgttttcaggtcttcgtctttttttcctaattatatgatggatcattattgcctataagtgattgttttatctaattagtttgctgttacttgaaatctaaaacaaaaggtattttgttcatttttttgttctttggctatttgaattgaacacaatggaaactgataaagaactactgatagatataccagaagtataaaattcccaagatactaaactaattttatgcattgttaaactactcatggaataggaaaacagagaaaaatttcataaattaggaggcatttctatgtaatattaggctgtaaacagtcactgatttaattcgtccaaagctatcatctgttttctatgataacattcagatcaaatcatataattagtcccaaagtgacaatgcataaagaagaatgtttctgggctgggcacagtggctcacacctgtaatcccagcactttgggaggccgaagtgggcggatcacgaggtcaggagatcaagatcatcctggctaagatggtgaaaccccgtctctactaaaaatacaaaaaattagctgggcgtggtggcagacgcctgtagtcccagttacttgggaggctaaggcaggagaatggcgtgaactcaggaggcggagcttgcagtgagctgagatcgcrccactgcactccagcctgggtgacagagcgagactgtctcaaaaaaaaaaaagaagaagaagaaggtttcaagaatttagtttctaaattcaggatgtttcrcaattgagcaaagaatcatgatatttgctagtctttactgtcttgctcatgctaaatcaaattattttgactacttaaaattactgaaaagataagacatggtaattagccatgaagcagaggattgcagccagcacattgtaagtagagcatagatatactatttgcttgttagtcattgaagtctttgtatttcaaaaaaatcgtatatttcgtgcttatgaaagtatctaattataaccaatattttatctcttctttgccctgtttaatagattctttgggacttgaagaataaataagcctgatatttacttctcttctgtgtgttcatttaaattacggcacctttgaataagaatttttgtcatattttatattgtaagaggaaatgctgcatgattcttttttcaaagtattttactacatttgggaaaattaaaaatgctgttaagggtaacatagctctttggaaaatggataatatgatagggagtgagacgttgagggaggaaggggagttgaattatactgggctaataataatattagataacattcctttagtgcttmttacatactagaaactacttacattgctttacagtaaagaaaaactcacagaaaggtccctgcattaatgcaaagtaggatattatacaattggcagttgactctagtactttgtcttacctcctgactagcttacatttttacctttttcaaggttatgatgtggtgagtagagcaaactgggcagtaaattattagtcaaccttgtcttaggcaacaatcctgtcatcaaaagtgcagacatgtagggttggcccagtctcctctgactgacgaaatgagtactgactaacctgtagatttcccataacaacttctattgtccaggacatttcataggatcctaagatcctgaatcatactccttagctgacagtgattacttagtagtgccaaacttcaagtaggactagaacagatttggaactaggaacatattcctgaaacttagggtcattagctagagaggctcatcttttttacttaacttccaagtaatgtgactccttttgtttggaccccacttagtgtattaactcctaatcgttgtgtttaggtgctattctcatcttcctttcacaggtgagaaaacggggctgtagacacctaagtacctactcaagggcatgcatcactaataacagagcttgtatttgaatttagatatattgactatagagcagataccctgagccacttttttgttcaactacggtaccacatagcccaggattccaggtgtaggtagttaactaaccttcaagcttgtttnnnnnnnnnnnnnnnnnnnntgcgttggggataaaacagtgaacagtaacctagggacaggttccttaacctctctaagccttagtttcttcatctgtaaagtggagttaataatagtaaattctaggtttttggaagtaaatacatttatagcgcttaacataatacctggtatttaataactactagaaaagttcaatgtttcttcttagagtaatttttgcaagatattcttaaaataataatgatttccatataggttgaaatatagtaattgagattgaaatgaatctacctcgacagagtttatacactagtgaaagaaaactgattaaataaaacatttgggaattagaaaaaatattctacagttgacacacagtgtggcattttgtcactctaagatgccatcagttataagatacatcattattttatgtaacttactgaagaaatatgctgagaaaatggtgctgagaaatcaccaactacaggagacattctgacctgacaaatttaaaatatgaaaaaaaattatcctagatataggagaaaattttgttgtttaggagatagggaaatgatttattctgttttgtaacactaaagctttatataatgtattggggtattgttttatgactagaacataaaaacatgatcaaatatatttaaaaaaatgaaaaaggtgaagtgctcagttaaaagctgactggtatcttctgtgtggcactagagaatctatattaataactgcttctcctatagctgtttctgcatttatagtccagaattggtttccacttaagagtggttagggaaaaaaataaaaaagttctaagctagctttcattgaaaatgaagatctcaggcttagcggcattctgaaaagaggtctgcgttttaaaataataatcaggaaatgaggtaccctcttttaagcagcagcagcatatccagatttgaggtaaattcaatacattcatgatgttatgtactgtaaaggaaatttttgtaggcatcatttctctaaatgacacttttcaagaagggttataaattttttaatgtgatttttatggtggtttataaaatttcataaaatcatagaactttataaatggaaaagttcttagaagtcatctagtacaaccttttatttttcagaagaaacatgtaattcttttgtggcctagacaagactagaactcatgtcttctgatttaatgctctttgaactatactactgctgtttcatatattatcaggatttaggatagaaaaagtacatttatttcagggtaaaaattctcatgtatctaaatatttatgaagaatttttttatgttttaagaaactctagtagtcacaacttagatatttttagccactattatttttatgtccattttgaaagttactaaaatcaatggcatttttctggtaaacagttttttccaatttatacttaattgcctcacatataacatartttcatattggtaaattttaaatagtaaacagtaaacaaatgctgaggaaaacaaagcaagagacgaaatggaaaatgtgtaacagattttctcttataatagttttatgtggtatgagagttctatgagtttttttatttgtgttttgtctataagttgtaactaagtactatagcataatttttcaaaggcatgagatgagtttccttagagagatggcctgttgcagcattttactaggaactgggaattctttgttatgtgtaggacacatagatttcttgctgtagctatctcacctttaaaatcaaagtttgcttacattttacgtgtaccatgaaaattatcataagtaatgctttaactcagagcagtatatgttggctagccttcttttttggggtttcttacaagccaattttgactgtgggtgtgtgagattttaagaaaatgaggctgggcacggtgactcacacctgtaatcccagcactttgggaggctgaggcgggcggatcacgaggtcaggagatccagaccatcctggccagcatggtgaaaccccatctctactaaaatacaaaaaattagcttggcatggtggcgcacacctgtagtcccagctactcgagaggctgaggcaggggaatcgcttgaacccgggaggtgtaggttgcagtgagccaagattgcaccactgtactccagcctgggcaacggggcgagactccatcccccccaaaaaaaagaaagagagaaaagaaaatgaacaaatttacatgcctaccatttgggacttgttatgatatttaaaatgtatactaggaaaaaatattttaaaattaaaaatgagtatataagatgctggtatataatttgggtagggcattttattttattggaggagttaggaaattcatgtattctgtgaaaatttttagtactggaaaatagaatcagtataataattaccataatgggagtgaagtttcttaaagataggggtaagcacattttttttctgaaacagttcagttagtaaatgtagtctctgttactgctattcatctctgttgctatagtacaaaagcagcatggaaaatatataatcaaatgcgaaaacaattggttggtcagatttggtctgtgcctatagtttgcctaccccagttttaagataccgtaatatccctttgatctgtggtcgtatatgtcttttgaatagcaataatttggaaagggggcttgacttttgaaaggaaaagaaagttaatgctttgggaatgtctggcttatatattrgctgtacattttcccctattgtgttgcctatgtctagcagataataaagtcttatgaaatcatttcattatgttagtgattaagcatttgtatttaaactttttcatagagttgtttttgatttcctaggatgtcagttttatggtttttgtttcctactgaagctttgaaagtcagccaagaatatttctcagttcataaaacattttcactatgcttttctccagctagctttcaatgatctgtggaaataaagagcaaaggccgtatgggtaataggaatgcaaagaattattgtcacctaatcttcagcattaattacagccactgtttcatcctacaacaaagagcaaattggaaaagtttgagtttcactgccttttatttagaagtacctgattggaggtgtcaataaaacatttctaaatatgaatattttattaagagtaatcaartagctccacatagatgctacataataacagcatagaatcacaattttattaaaattcaaaagacttatgtatatattacctaaatttgctccctcattcatacctgccaacaagaatgaaatcttcaaggaagtgaaaatgtcttcattctcttacctcagatgtccaccacagtgcctagcaaagatgcacacagatagttttttgaataagggaatagaaactcagagaaactagagattatgatcactccactggttattcagagttcgacttagtgccacgtgtgaacaaattttcttttaaaatttgagacttgtaaaatttaaactgagactcttacataattttatctcctgcattaatgtttatagaagcatcatcatcttcatggtaaagaatcattggtaagctttggaataatttacctctcaaagaactccaaaaagaattactgaagtgctaagccgtgctaaaaacatttaatggtttttgaacacaataaatttaaaagtgggttcgactcacaaaactttgtcagtgtgccaagtatacagaaatgatagatattctttttaatatagctgttagcagccgtaattaaaggccaacaaaggatagcagcagtgatgagcattatccattttaggccagtgagaacacattttgaaaaagactgctgccatccatgatatattaattaatttgtagaaaggtctccatgttactctctgcacaaaaggccattcagtcacacttattttattgtagggtaatttaacagtctttttttgcgtaaacaagcacctaagtcagtaggttccaaatcctgtgtttctacaaccatacttagagcatataaatgatgatcctgtattatcaaggacaaatgctgtatagaatcctgtggcaccctcttcccaaacaaaagctgagttgactgggaatacacaaagaaggagtgtaggtagaaaaaaacagatgaagagaacttttggtatagattcaagaaaccaaagaaatacggattttctttttgttggcctatttcctgagccaagcatttctgcatctgagcacagaatcttacagtatgttgttaaaaatattttgtctattttagaaggatttacttaaatttatttttaattataaaaatatccgaaaagtataaacatattcttatctggaaattttagctatgtaaaataaataactacttgaggaatttgagaagctaagcaattactacatttgaacaactaaaacagttaagactgttaagactaaaacgtaaagtactctaattaccaatgtcttaacaatctcctagtaatacagcaacaaaatctctattaggagtgtattaaaggctgactgttctgggcatgcctcatagttatgaaggatttcagaggagcagttctgatcttagtattcgcttggtggttttcatggcaaaatttaaggaaatttgatactttgaaccatattgtaagtaaggctaagtaaggaactgactgttaatctggatgcatctgttgacccatgctgtttgaagcttctgaaaatcttctaccagacatcacattcttgctcttttcagcaaatatttatgtatcacacacccgttagtttaatttataactttaaaagatttaaaaggtatcttcattatgccaattatagtgctgacacttacaatgactaaaaattaatatttaattaatttttataattataattattataatgccccaaactgctatctagtgacattttctttgtgctaagtactgtgctagatcctttatatgttttatttaattttgaggaagtgtcttagtccccttgggctgttataacagcataatttagtctgagtggcttagaaacaaaagtttgttagttctggaggttgtgaactccaagatcaaggtgctgtcatatttgatatctggtgagggctgcttccttctttatagaatgccatcttctcactgtgtcctcacgtagtgaaaggggcaaaggagcagtctgggggctttcttacaaggatactaattccatacatgagggctccaccttcatgacctaattacctcctagatatccaccttcagataccatcactttgggggttagatttcaacatatgcattttgggaagaggcaaatattcaatcaccaggcaagtatgatccttcgcatgttttgactgagaaaactgagcctcacagacaacaaacaaggtgaaaagttgccgtttgaacccaagcatattaaatatcaaagtcctttcccaaattcaaagcaaccttcccaatgagtactagtcaatgaaggtttattggttttctttgggttgttgtttcttacgattactatagatttttattttttattttactatttctagatctgtgatattaggaaaatggcacacgtttaaaagcatttaatctgcttaaatttctaggtagttggctgtcagaaagtaagtttgaactgacatattaattttccttattatttcttgtgttggattatgtttatgatatcagtgcctgcaggttcaggattgggaaacaattcttttcaaaaaattgcttttgtcaggtggtaaattgaactgtgagtttaagaatcacttgtttctcgggctgggtgtggtggctcacgcctgtaatcccagcactttgggaggccaaggcgggtggatcacctaaggtcaggagttggagaccaacctgaccaacatggagaaaccccgtctctactaaaaatacaaaattagccgggcgtggtggcgcatgcctgtaatcccagctactcgggaggctgaggcaggagaatcacttgaacccaggaggcggaggttgcgatgagccgagatggcgccattgcactccagcctggacaacaagagcgaaactccgtccccctccaaaaaaaaaaaaaagaatcacttgtttctcttattctgtgtttgaatcaaaactatacaaatgtaatgaatattgtctgtgttagtgtggaatttttactgggaaatcatggcaagatggaaaaatacatgcttttatgtcactctctatgttaacagtttatacaaatctgcagttacatagagcacatgcagcttatacatctgtataatagctgacaaaggtaacttgtgtgtctttctgcatttataggatatcttattaatctaaaataggttcctgctgaatgttgatcataatctaaaatctagtttatcatgtaggtgataagctagattactcaagacattattgattttggacatttatcaaatggtttttgctttcatatttttcaagttttgttgattattcattgttaaatatttcttcagtacagcttcctttcaactgtaataaataaggaacttttatttttcttctggagtactgattaaaagatggctgtagtagatatttcagctttaccatggcacattggtgtatttggcttacaaaatttttaaaaattatttatgatggaatgagtataggctctggaatcaagtaaatgtgcttttaaatcccaactcttttatttgctagttgtggaatcttaagccattcaacctttctgtctcagttttttaatggccctcacagcagtatttacctcacagcactattattgggattacttaactaatacctgtaatgcatgacacagagcaacttacacatgtgtcaactcttattaatacagtgtctgggaagtaggtattcaatgaacaatagataatcttcataattacttaatttcgcctcacagcactgtgtgggaagtcagaattctccattttcaaggctagaagtgaggcacaggtaaacttcctggtgtaaacataattatatactgagctttagtaatgctgtaaacaaatggtttatcagaaacaaggaggtttaattttgtttatgggaatcagagatcttttgaggagattatttttaaaacagcccaaaaaagtgagcaagaaaccttaagaaatccttgatgttgttagactctttaaatatttgtcaaaatgtaattgccagctgtataacatagctggaattttaaacatccataatttcccataattttaaacactagggaaaaatgcagtatgtgcaacacaatataattttgcttttctctagagttgtttttcaagaagtccagtctaacatggatttctttagttcaagagttttgtgatattggaaatgatttattcaaaatgcatttgtttatggaagaacaaacttctttcctagggatagagattgtattctataggtaaatttattactgtaatattaacctgttttatttggagtgatatgtaatgtttgtgttcacattttttaattgacaaaaattgtgtgtacaatgtgatgttttgctatatgtatacacataaaatgataacataaagctacctgacgtatctggcacctcacatatttgacactttttgtgtgatgaggacatttaaaatctactgtcttagcattttcaaatatgtaatacattattattaattatcataaccatgctgtatatcaaactttttaagatgtttaaaacatgaattcctattcttttttttttaaactgaaaaaaaatatggttaccttctccggcctatctccttttctttcttctttcacttaaggaaatgatgttaaaacattttagtttttttcataacttataaattgtatctttattacagatttttactttttgaaacagtaaaaatcattgacaaaaatgatgtttttaaaataattttattcttcatgaattataacttgttttatttgtatacatgcttaaaattcttaaaaatataaatttgtctctttttctatttttacaaaatatcaaggaactagaataatgttatcatcttcaaggtatwtatgcggtgaaaatgtaattcatactcctcccaaactttgctatggagagggggagtatttttagaaagaatctctttttatgtgtttgttcctgtccaaacttattttctctcaggtggttgtactcattactacttcttygtcaaagaaaactgactctttctcaagtatataggtttcttaatcttagtaatttattttgaaagaagttcacgtcggatttktcaggtcaactaaagaaaaggaaaggcaaaacagaatctaaaacatttagatgtattgttgacatttttaatgagtgagcatttacaggtgtgtatgcaaacaagtagtaccataacatttacagtttctgtttctaggataattcatatttaggactcagaaatgccctgtttgtacctgttttaatattagtcactgattgcagaagttattttgcatagatgacttttggaataaatcttaaatgtaaatggtggtcacagacagttatctttagttagaagtaattttattgccttcaacatttcagagttttgagtccattcttgatctctttgatttctttcaatagttttgggacattctcagatagtattttttttttttttttttttttttgaggcagagtctcgctctgttgcccaggctggagtgcagtggcgcgaacttggctcactgcagcctccacctcccaggttcaagcaattcaccctgcctctgcctcctgaatagctgggattacaggcgcacgccaccatgcctggctaattttcgtattttttaatagagacagagtttcagctgttggccaggctggtcttgaactcctgacctcaggtgatccatccatcttggccttccattctcataaggggactctatactttttttttaggcctttccactggattacatatgtcttttgcactctattctgtttccattcttttttttttttttttgtcactttgtgtattcatttggatgctttctagtaaccagtcttccattttaaraatcctctgttctgttttcactaatctcccattaagactatcttttgagttcttaatttttattatagtttttargtttaggatttccctttgatggttttctaatggattccaagtccctggtgaaattcaactttttaaaaattttgctgtagttcatgtggatttttgtttttactatattagcactatctcttgccagattgtattttaacttgtttcacagattgtaattcactaggatctctcctcttcttaagagaaaattaaaagggagatgggattaaagccaaatgatactctagaaagcctttttcaaaaaatttcttctttcatttatagaatttagggtttcgaggaatgggatgaatagagatgtctatgcttttgttgataacatggtattttgggtttttctcaattgttccatctcttttttgggggcggtgggaacggagtcttgctttgtcgcccaggctggagtgcagtggcgacatctcagttcactgcaacctctgcctcctgggttcaagcaattctcctgcctcagcctcccaagtagctgggattacaggtgcatgccaccatgcccggctaatttttgtattttttcagtagagacggggtttcaccatgttggccaggctggtctcgaactcctgactttgtgatccgcccaccttagcctcccaaagtgctgggattacaggcatgagccaccacgcccagcctgttttatcactttataatcattatttttactgtagcttacttaatgccttgtgttgagttgagcgtctaaagcaattaggatattggtaatgtttctgtttgtgaaatgatttacgcaatcttggcttactgtaaccttcgcctcccaggttcaagcgattctcctgcctcagcctctcgagtagctgggattacaggcgcctgccaccatatctggctaatttttnnnnnnnnnnnnnnnnnnnnnnnnnnnnnnnnnnnnnnnnnnnnnnnnnnnnnnnnnnnnnnnnnnnnnnnnnnnnnnnnnnnnnnnnnnnnnnnnnnnnnnnnnnnnnnnnnnnnnnnnnnnnnnnnnnnnnnnnnnnnnnnnnnnnnnnnnnnnnnnnnnnnnnnnnnnnnnnnnnnnnnnnnnnnnnnnnnnnnnnnnnnnnnnnnnnnnnnnnnnnnnnnnnnnnnnnnnnnnnnnnnnnnnnnnnnnnnnnnnnnnnnngccgggcatggtggctcacgcctgtaatcctagcacttagggaggctgaggcaggtggatcacctgaggtcaggtgtttgagaccagccggaccaacatggagaaaccccatctctactaaaaatacaaaattagctgggcgtggtggcacatgcctgtaatccaagctactggggaggttgaggcaggagaatcacttgaacccaggaggcagaggttgcagtgagccgagatcatgccattgcactccagcctgggcaacaagggcgaaactccatctctaaaaacaacaacaacaacaaaaaaaaaacaaaaaaaaaagaaagctccctgaactgggtgcagtggttcatgcctataatctcagcactttgggaggccacaggagttccagaccagcctgagcaacataagactcccatctctataaaaaatttaaaaaaattagccaggcacgatggcacaaacctatagttctagctacttgggaggctgaggcaagatcacttgagcccaagtgtttgaggctgcagtgagccatgatggcaccactgcactccagtctgggcgacagtgagaccctgtctcagattaaaaaggctgcatgaaaagttttttttttccttacctgtgatttaaaacaaattcaaaataaaaaacagttatacagttttagtttttccttattttctgatgagttctcatgtaaaaactgcttataataaagcttagatatgatattcttttaacttagttatctgttgatgtgtacagttatttatgtttgcaacattcatcctagggtttaagatataaaattattttttaattatatgatgaaaatttatgtacatttagattgcctttatttttatttttatttgttttttttagagatggggtgagtcagtctcttagcctttttttggggggtggggggtgataaacaagtaaacatagaagagattaccagtcagtatatattcagtgacattttatgtcttgggttagggatttttttcccctcttaaaggagactttttgcttttgacccccaaaagaaatcagtgtagaaataaagataactgcaacactgtctttagccttattttgaactcagacctatctactgagtactatctactatctactgagctcaggtctatcttcagaatactcccatctagatgtttcagaagtaccacagatttatacttgttttctctttggtgcagttgttattctacccaagatcattttggggaaactcaagccctgtgctgtgtgtgtgtgtgtggtggtggtggggcgggggggttgtgtggtgtgtgcatgtgtgtaagtgaaatttttttttcctgttgttgtttttttttttttttttttgagacagagtctcactttgttgcccaggctggagtgcagtggcgcgatctcagctcactgcaagctccgcctcctgggttcacaccattgtcttgcctcagcctcctgggtagctagggctacaggcgtatgccaccacgcctggctaattttttgtatttttagtagagatggggtttcaccatgttggccaggatggtctcgatctcctgacctcgtgatctgcctgcctcggcctcccaaagtgctgggattacaggtgtgagccaccgtgcctggcccctttttttcctatcttaaaaccacttactggctctgttacctgcatgatgtctaagtcaagaactgtgaaagatctggggttttctacttgcaggctaacaagtagccttccacagttgcatggatactggcagaaaccatgaggctcatgggtcagaaacgaatgacttcattattcacagcacagcaagcagcaagaatatctgtatgtttgtatcagttcctcctttacactgcatccaaaagaggtgatgcatatgggccatatggatatctgcacatctggtaggttgcattacaggacaggaatcccactcttggttaactcagatcttttatcttgggcagtaagcttgcctgccctttgcccctgagggaggtagatgaattgtgtagcttctgaagctctaaccaaacctactctttgctctggagggggacgttgtttcttgtttttgttcttcaccattttaagtgtacaattcagtggtacttcagtatgtttacaatattatgcagccatcaccactaattccagaacatttccatcaccccagttagtgccttgctcataagactgaagaaatgtgaaagacccgtggagaattgtctcccaaaacacacattatttgtaagagaaaatcatatcttacacagattatattaatggcaaagtagcatgggagagggtcacagaagtgggttggacgattccgttaaaagcagggaacattctagttaaggcacttggataggcattgggtgagagttttcatgtcttttctgctagattgttcctgttttttttctctatgtgcacctgattttatgctttttttcatctagcacattatctttaatatatttgacattgaacatttgtttgttaaaccaccaaaaagtttcaaacaagagaaatctgttttgactgttggaaggcagagacagcacaagattagcctgttctgctgaagtcatagttcaaccttaatgaacgtcaaggaataaaagactgtacatatgaggtgtgtagtattagcgtgtttgtgaaatcatatacccagtagaacaaaacactgattttgctgcttttgaatgtgcacatattatttttgtgcattaataatagctagtcagtgtttggaactgagacttttgtctagaattgtatagaggtaaagagcatggatttacgtaggcttagtagaagaactaattttaaaataaatggtcacatcataagacytaagtcaggttatcaataaatatttataagtgtctgtaacttgcaaggccatgtcaggtaatgttcagcagtccccaacttcaatctagaatggagrtggctaccaaaaagtatctttggattcctaggacccacagagattgactcagtgggtttgattgttaccctggattcatgggtaacactaaatggttacccatgggtaatctaaagcacagctagatttctgaacctttatttcaggatagctgaaaaacatagagatgagacattaaagcccccagtcctctaacagctacctccgaccagttctttgtttagcataaggattaccttcacctaggaactttttgaagtgtccagtgccctcctttgtgctctgattttcttctgttttgcattgtttgagaagttatgttgttattactgtttttatgaggggaatggtgttaggaatgaggggttctctttctataacactccttgagggaatagggacagtcttctttaatcttctcatttctgtttcctaaagtagtgcctgccagctagtgtttattgaacaaataaattgaattgaatgaattgttatacattctaatgaaattattccccttatttttcttccagtcttcctcctgccatgccacaatgatctttgcctaacatgagataaaacttacttagctatttttttactgcttggtaaactcaagtaatacattcacactttccagtaagacacttggccatcttactaattcattgggagaaatagagagcatatatataactaaggataggatctgacattatttggatgtagctcctgttagaaggcaaagcaagcaataacatgcataaattagatgtggcatggcccaggattttgtcttttgatgaaagtaggccattcctttggaactgtttagttatgttccatgaactcctctaggtagggcacaaaaattagaagaattctgttttatctagtagtgtagtcaggttaacatttttttgttgatgtgtaaccctcgccaatgctaggagtataaccttcctattgataaatccagttgttattttttatttctttacttgactcgaaaatatttgacacagttaactccagctttttttttcttttccttcttttttttttttttttttttttgagatggagttttacccttgttgcccaggctggaatgcagtggcgaggtctcagctcactgcaacctmcgcttcctgggttcaagcgattctcctgcctcagcctcccgagtagctgggactacaggcgcccactaccacacccggctaawtttttgtatttttagtagagatggggtttcaccgtgttagccaggatggtctcgatcgcctgacttcgtgatccatgcgccttggcctcccaaagtgctgagattacatgcatgagccaccgcacctggccaactccaaccttcttgatacactatcccctttattccttggtttcctttcttcttctctgatacccgtaaaattcatatattgaagccctaaccccgaatgtgatggtatttagcgatgaagcctttgggagataattaggtttagatgaagtcgtaaggttagttcccacatgatgggattagtgcctttataacaggagatagcagagagctagcgctctctcaagtttgtgctctcactctctctctgccatctgaggacacagcgagaccgcagccacctgcaagccaataagagaactcttgctggaacttgcccattctggcatgctgaccttggacttccatctaccagaatgtgagaaaataatttctgttgtttaaactactgaatttatgttattttgctctggcagccccatctgactactgcacaccccttctcctttgcaaattcccctatcacttcctgtacctaaaatactggtgttagcattctcttcattatgcatttacctttcttctaactatgtattttttctcggtgatctatttccattctccaggtaccatctttatgacaaggactggtaaaatttgtatttccattttgtacctctttctaactctaaatatctaaatctccagttgtcccacaggacaacccaccatgtttacagttaaagtttttttcatccggtgactccatggagacattagtttatcagccctattgattgtatttccttaatatttctcacatatatccacttctgtctcttttgccatgattttaattcagacagctaactatccgtcctggatcgctccaacatttttctaattgactgacatcaataatactcttaaatttatttattttttctaaatagactttttttttttagagtagttttgggttcacaccaacattgagtggaaagtacagagtactcatatatactctgtcttcagaaacacacaacctccccagctgttaacatcctgtgggagagtgatacatttgttacaatctataaacctacaatgacacataattatcacccaaagtccataattaacattagggttaactcttggtattgtacattctgtgggtttggatgaatgtgtaataacatatatctaccatgatactgtcgtacagaatagttccactgcattaaaaatcctttgtgccatccctgttcatttctgcctcctctgtaaccaggtgttaacctggcaactgatccttttacagtctacgtagttttgcctcttttggaatatcctatacattcctatgcagtgttcctgtagttggaataatgcaatatgtagcttttccagattggcttctttcatgtagtagtatgcatttaatattcctccatgccttctcataacttgatagcttatttccttttagcacagaataatattccattgtctrgacctacctcagtttacccattaacctactgaaggacatcttggttgcttccaagttatgaagactgtgaataaagcttctgggaacatctgtgtgcaagttttttgtggatataagttttctattccttttgataaatatccaggaatgcaatagctggaacctgtggtaagagtatttttagttttctgagagtttatttttgcaacttccaaactgtcttcaagagtggttgtaccattttttaccccatcagcagtgaataaaagtttctgttgcttcacagcttcatcagcctttggtgttggcaactttcctgattttggccattctagtgggtgtgtaatggtatcttattgttttcatttgcagttccctaataatatatgatgttgaccatcttttcatatgcttattgtttgtgtattttctttggtgaagtgtttgttcagtttttggcctattttttaatctgcttgttttcttgttgagttttaagaattctttgtatgttttggataacagtctttatcacatgtgtctttcgtagacactttctcccagtctgtggcttgccttctcattttcttgatgtcgtcttttacagagcagaaggtttttgttttaataatggccagcttatcagttgttttatttgtggatgatgtcattgccattgtacctaaatagtcatttccatacccaaggtcatcttggttttctcttatgctgtcttctaggtgttttataatttgtgttttacatgtaggtctgtaatctactccgagtcagtttttggaagaagtgtaagggatgtgtctagattcattttttttgcatgtggatgtacacttgttccagcatcatttgttaaaaggaccatctttgctcccttgtattgcctttgctactatgccaaagattagccagctgtatttatgtgggtctatttctaggctctctgttctgttctgttggtactttttgtgtgtgtctctgtctctctctctcttttttcttttttttttttttttggtcactaccacactgttttgattactgtcgctttataggaagtcttgaatttggatagtgtcagtcctgcaactttgttcttttccttcaatattgaattagctattttggatcttttgcctctcagtataaactttataatgggtttgtcaatattcatagaataacttgttggggttttggttgggattgcattgaatctgtggatcaagttgaaaagaattgacatcttaacagtgttgagtcttcctttccatgagtgtggaatatctctccatttatttagattttcttcagttttctttcattggtgtttgtattttttctcatatagattttgtacacattttgttagagttataactcatttttttggggtgctaatataaatgataatgtgtttttaatttgaaacactttttaattgctgatatataagaatgcagttacttcataggttaaccttgtatcctgcaaccttgctataattgcttattagattcaggagtggttttgttgataatttcacactttttacatagatgatcacatcatctgcaaagacacttttatttcttcctcccctatctgtaccttttatttccctttcttatgtagtgtgatgttgaaaaggaatgggcagaagggtcatccttgccttgttcttaatcatagcagaaaagcttctaatttctcaccattaagtgtgatgttagctgtaggttttttgtagctgttccttaccaagttaaggaagttctgctctattcctggtttgctgagaggtgtttttttgtttgtttgtttttaccaataatgggtattggattttgtcaaatattttcttcatctatttatatgattatgagatttttttcttcagtctgttgatgagatggattaaattaattgatataatgttacatcagttgtaacatcaattgtaatgtaatgttttcaagtgttaaactagccttgggtacttggaataaatcccactttataatggtatataattattcttttttttttttttcttttttttttaagagacagggtctcactctgttgcacaagctggagtgtagtggcacaatcatagctcactgcattcttgaactctgggctaatgtaatcctcccacctcataattatttttacatgttgttagatttgatttggtaagattttgttgaggattgttgcatctatgtttatgggcaatatttgtctgtagttttctttttttgtgatatgttcgtttggttttggtattcgtctaattgtggcttcatagaatgaggaagtattcactctgcttctattttttaaaagagattagagaactggtgtaattttttccttaaatgtttggttgaattcaccaggaaacgatctgggttttgtgctttctgttttgaaaggttattaattatttatttaatttctttaactgacacaggcctattcaatttgtttattcttgtgtgggttttggcagattgaagtttttaaggaatttattcatttcatctaggttwtcaaattttgggccataggatgtcttagttttttaaaattatccttttaatatatatagatctgtagtgatgtgtcctctgtcatatctgatattaggaatttatgtcttttctctttttttcgtagatagcctggctacaggcttattgattttattgattctctgaaaggaccaacttttagtttcattgtttttttctcttttgacttcctattttagatttcattgatttctgctctaatttttattatttctttcgttctgcttactttagcttgctcttctagttgcttaaggtgaaagcttagtattgattttagatcttctctaatatatactctcartactataagttttgctttaagtactgctttctctgcattgacaaattttgataagttctattttctttgyatatttatagacaatagaactttgataagttctatttatatatttatagatatatatctataaaactagtgtatatatgtaaatagtatatatatatgtgtgtgtgtgtgtgtgtgtgtgtgtatatatatataaagagagagagacagagacagagacagggtcttgctctgctgtccacacctcagtgcagtggtgygatcacagctcactaaggcctcaacctccctggctcgagtgatcctcctgtctcagcctcccaactagctacaactacagacatgcatcaccaagcttgactacatttattttattttttatggagatggggtctcactctgttgccaaggctggtctcaaactcctggcttcaagaaatccttccacctcggcctcccaaagttctgcgattacaggcgtgagctactgcacccggcctaaaaatattttaaaatttctcttgaagtttctttttttttcctttgtattacaagtgtgttgttcagtcttttaagtattttggaattttttttttttagctgtttgctgttgactttcagtttaattctattttggtctgaaagcagacattctatgatttcttttaaatttgttcatgtgtgttttatggacaagaatgtggtctatcttgatgaatattctgtctgagtttatgaagaatgtgttggctgttgctgtatgaattagtgtgtagatataagttatatccagttgaattgtgatttagttcaactatgttcttattgatttttttgcctgttggatctatttctaataaagtgatgttgaagttttcagctataatagcgtattcatctgcttctccttatagttctattagtttttgcctcacgttttgctgatttgttgttagatgcatacacgttaaggattgttctgtcttcttagacaatttacccttttatcattatataataccccttttggtctctgagaattttgcatgcttgaagtctactgtgtctggaatcaatatagctactccagctttctttggcttagtgttagcattgtatgtctctcttcattttttttacttttaagctatatttgtttttgttggtaaagtgggtttcttgtaggcaatatatagttaggtcttatttttttattcattcaatctctgttctttaattggtgcatttaggccgttgatgtgtaaagtgattattgatatagttggattaatatctacgatatttgttactgttttctattagtcgcctttgttcttcattcccatttcttcttctctttcatggctttaattgagcattttatgttattttattttatctcttttcttagactgttaagttttttgggtttttttgtttgtttgtttttcagttgttaccctaarttttgcaatatatttctactttcaaatagccctattcacttcacaggtagtgcaagtaccttataataaaaaaaattcctaagttatccttctcatgtcccttgtatcatttttgtcattcatttcacttgtccgtaaactataggtatcaaatacattgttgttattttgaacaagcttttsttagatcagttaaaagtaggaaaaattaaagtttttatcttctttatttcttctttctctttctttatatagatcaaaatttctgacctatattttcttctttctgaagaactttaaacatttcttgcaaggcaggtctactggcaacaaattccttatttttatttgagaaaaattttctccttcatttttgaaggatgtttttgcaggatataaaattatacattggtgggtttttttctctcaatagtttaaatatttcgcttcactttctttttgctcacatggtttctgaggagaagttaacgtaattcttgctcttctgtaagtaaggtggtccccacccctcgacatatgacttcttaaaggttttttaaaaatctttgattttctgcctatgtgtagctttttgtttgtttgtttgtttttacatttattctgctcagtgttcactggacttcctggatgtgtatctgacattaatttggggaaattctcagtgaatgtttcttcaaatattggttmtcttctttcttcttttggtgttgctattacacatgctacacctatttgcttcatagttcttagatattttgttctgtgtggttttattattttttttttaaatctagtccagtattttgttttcataaagttttccttatccttgcttttcagttttggaagtttgtatatacatatccgtaagtgcagagattctttcctcagctgtttccggttgactaatgagcccatcagatgtaatctctatttctgttacagtgtttttgatctctagcatttcttttttatagcatttctttttgattcttgcttagaatttccatcactctgcttacattactcatcttttcttacttgttgtctactttgtccattagaatccttaacatattaatcatagttttttaaaaattcctggtctgacacttctagtgtttctgccacatttgactttgcttttgatgtgtactcaatttcttcaaactgtgttatttctgtcttcgtaggccttgtaatctttctttgatagccagacatgatatatgggataaaatgaattgcagtaaatgaggctttagttatataatggtaaggtgttggggggagtatgggaaggagtgttccatggtcctgtgattaggtctgagtcttttagtgagtctatacccttggactgtgaacttcacaattttctccygttaggtgggacaggatggctagatggagctggagttttttattttcattctcccatgggaaaggctagagagggctgaagttgggtatttctcttcctctgggtcagttggtgtctaataaaacctcaataacataagctctgggaaaaaatattttctcttgaggagcaggcctttttaagaagagaatgctctagtgtatttcacaatgggtacttttccttcctcctgccagaagcacagggtaatttttctcagatcttcactgtgagaagctggtgtagttgctgaagataaaactcacaaatgtgtgagggaccccgctctatgactctcagacttgtcaaacactgaaccyccagcagtttgttaattgcatttccagttgtcctaccctggcactggctctcatggaggtttctctttgtgggtttccgctccagaaagttgtgattttctgtacctgggctgtctgtctctccaattttgggggcagtgatttgccctgtgaccttactaatatgatgtatctaagaagagttggtttttcagtttgttcagctttttacttgctgttaggacrgagcgaagacttccgagctcttaacgttctggaccagaaattggaacaatgctgtccttttattgtctcttctctacactgcaggcagccatggtgtttctcaaaaacacaaatctgattaggtcatgtctctagttgaaacatcccattaactgtagcataaaatccaaactccatgatttggataacaaggtctttgttttcagccttggtttatttttctgtactatcttttataatacattttcactttactgttatgctgagccattgtgcactttatccagtttttagtattctgtgttctctctctttccctcctttcaccctttgcttgcctgatacccaccaagtttttaggttttaccttagaaaccatctttcttatgacagcccaccttgactctcctgagacctgtccatattaccttcctgagttttttctggtatagaatcacaagtgattagcagagtagatacaattaaaggcctccgatgtaatttattggcagcctgaaatatttactatgcttgtagtaattatgaaagacctcctaaagcttttgccaactgtgtttmtacttgacagttaaactcccacgtggaaaagttatattatggagawtcttttgaaggatgttgatagtgtttggctctgtgtccccacccaactctcatgtcaaattgtaatccccgtaggttggaggagactcctggtgggaggtgattggatcatgggggcagatttccccctttcagttctcatgatagtgagtgagttctcatgagatctgatgatttaaacgtgtgtggcacttcccccttcgtgctctctctctctctcctcctgccatgtgaagaaagtccttgcttcctcttctccttcagccataattcttagtttcctgaggtctcccggtcatgcttgctgttaagtggaactgtgaatcaattaaacctgtactcttcataaattacccagtctcagtagttctttataacagtgtgagaacggtctaatacagatatagaatccatttgtttatagtgttcaatgtttattcttacgtagagtcaaaaaagcaaatttgtgtaccggcagagtagctacctgcaagaattagtgcccaaaacagttctcattgactttgcaagtactctttggtcccatatattttaaatactggagaaraccatgttaaattaataaattagcgttgtgatttgtatgacaacctcatgtgcatttgattagtgtgagttagaggctattctcctgtggatacactaagtcaaatttttgaacttataagtctaaatacttaactaaatactttaacttataagtctaaatactgtcatttagagatgctgattaccttattattaaatatattacatgatgattatactgaggtgtgcttctttgtcacaggtgctaacaaagttattgggtgtgtatctccttctactttacgtcctcttccacccaagtgcatctaattgaatttacatgtttaatacgcttacaatgctgtgttactctataattgtccactcagttgtttattacatatttatcaattccaaataggtcttggaggaaatccaagctattgctaatgagaattattttgcacattttgactgtgtgatacagggttttgttcattagtaggatctgttgagtttacttcttttttttttctttttttgggacagaatctcactctgttgcccaggctggagtgcagtggcgtgatctccgcccactgcaacctccacctcccaggttcaaggtattctcatgctgcggcctcctgagtagctgggattacatgtacatactaccacacctgactaatttttttattttttttagtagagacggggtttcgccatgttggccaggctggtcttgaactcctggcctcaagtgacccacctgcctcggcctcccaaaggttttacagacgtgagccactgcgcctggcccgagtttatttcttaaaaacttatatttagtaatttttttgtggtcaaaggacatgaagttaraggatagtgtgtttagaactggctttgtaatggacttggtacgtaaaccaaaggaaaaaaaactagcctgctttctttgcctgtttctcaagaaatcgggattgtggtgattacctaccttctgatgtgttttaaaaatattcttaatatttatgaagaaacatcagaaatatcctagttgctgtggatgcgtaatgagttttttatttcacatagactttaggtttcatgtgaggaatgggtttgcatcttactcagttttttattctaatttctgtcaacatatttaccatgtagaatataaacattgattgaacaattctctatgtatttgatgaactattttaaataatcttatatcttgttttccagtgcttttatttctgacatttatttaaatatttttgttttggaatgaaaatgaacatggttgatgatagaggaaaataaatgatttgaatacagtttgttttgagatatgataatgcagtaaataaagtctcaaatgcatacttcatatttgaaaatagacatgatttctcttgttatagactatagaacctttaaaaattaatagataatagtatttgaagataagtaaagatattttttaaaccrtactttcaaaatcagttctttaggtgctgggaatgtagccgatcgtgttttggctcagctcttaacagaaatggatgggattgaacagctaaaggatgtgaccattttggcagctactaaccgtccagataggatagacaaggtaagagagaaggcattgtggatattataaaatcaagaactggcttgtttgattttatcaggtttttgtttttgtcaaattactttctaatcagtatttcatttagaggatattgaagaatgtaaagcaggttcactgtggactggttaccatcttgtctgagtctggtaagacagaacattcttgcatacaagttatacaaagcaagtttaccacttctggataggcagcaagatacaacagaagcctaggattcattgcaagctagtctctcaaggttcaggaaaactgccctgggtgaatggaatcttgactgcatatgccccacttgcactgcagctgagggcctctggaaagcaccctgttccaggttttatacactgagtatgtgagactcactgggctaaagtgttggaggacatcctgtttttaggggaggactggagtagaacctgggctgttccagccggtccctccctgtctcaggatgttgcatttcctgcacatgctwcagttattcttgagagctacgatgggagagagagaacttggtcattccaagaccacccagagagctgtcctacaaaggatcttaaactaaaggaaatgaagagaacaaaggaaagcttttatttacatttttattgcttatgattcagtattaatgaaactatttcataactcttcaatatctactccccaatcttgtatcttacttttagcayatttctctagagaattgaagttttgaaattctttgtttcatctaatttattcttccagagttttcaacattttcatctatacgaaggtacattctagctatttagcaagtactagttagactccagttgccatcaacacaagaactttgaagaagtactgtcctaattgttgtttttaaagtaattagaataaaaataatggattmttctatttttttaagaagttagtcaggctgtcacattaaattaagtagtrtaggtgcaaaaccagtcyttttaaactattactaccactttttccctaggtcataatttaataaaggagttcrgtaatttaagttcctcatctatatctaatatgtaatattttataaggatttaagttgagtaaacatttgctctcagagcgtgaaccagtttctcttttttgttgttgctggcattattgccttgtgtatgactttatgagctactttcttcctgtgtacatatacacattctttcagttttaaaagatgtgatttttaaaaaagacccctttgaatgtaactattatgtggcaagaaagccttgctttggttaggtattttgctrtgtgataaagatcctttggtaaaattcaggaaagctttggaccttaaaaaatcattcccttcctgatgcagtattttattagaagrtaggtgagttctgagtatttatagaatctgggttggtgttaaggcatctctgaagtctatacaaagtataagactgtatcttaacaaggactgtagaaactgctgaaagagcccttaaagtttacctaattctgcctctggtttcacaaataaagggtgctgaatccagaaaaatctttctcctggtaagaattcattgtatttttatgatatttatttcctggtttccctgtggttaataagctctaaaatgtcttaggatttttgtcactacggcttaatctaatagtagccttctttggcttcctaatgttgggtgtcctcgatattagatatatttcttgaagtaggatgtaaggcttacagtaaacttaactgcatttttctaaatcaagctgtctgacttggcctgtttagtgcttgtattgttgttttctttctgtgtaacaaattaccacaaatttagcagcttcgcacccatttgttagttcacatttcttaggttagaatgtgggcacagcatgactagtttgtctgctcaggatttaaactaaagactgaaaacacagtgttggctagactgcattcgcattaggagctcatgtttctaaactcacatgattgtggcacagctcacttgtgattggggctgagaactaaagactgaatttccttacttgatgtcagctaggagccactcccagctcctagagactacccacattccttgccacacagccccctcctccatcagaaacagcaatggaaaactccattatgttttatccctgtcacacttcaaatttcctttgccaggaaatttgtccctttggagggctcatctaatgaggttagccttattgaggaaaaatctctggaccttgaagtcagttgattaaggatcctgcaaaagcccttcgcagtagcacctagattagcatttgattgaataagtgggagaagatatgtttctatcagggtgatacaggacaggccagccccagaattgggacatagcctaggagggttctttgctacccccaggaaagaattcaagaacttgctgggggtgttagacagcaatcttttattgattggtactgcccgttgtggtgcagggctaactcataagcagtgcacccagagttggcaaggtgtgggcttttggcaactgtatttatactcacttatgcccactttcatttacatgcaaattaaagggtgagttaacacaaattgattctatgaaagggtaacttctgggtcactgccatggaaacgggtggtaacttttgagtcattgccatgacatttgtcaactgccatggttctggtggcagtgtcttakgccaatgagcattgagcgcagctagagatcgcttttgttgccatctgctggctttggccagtttcttcactttgccccatgtggactagatcctgttttgttcagcagagtttttcaccagaaaacaagtcttgttggtctcctaccttattcccccctcagagattagaaactcctccttaatcttaaagggctgcagatgggcacaggtctatcttctgtaagtgctttctgctgattttataaacataggctctgcctagcatgggaggagtaaaaatctctggatacctgatctaaggagcccaacagcaggatattttcattttctgggtcagaagataagatgagttggaagccttgtgccagcatcatctttatgttgactttagaagatacaaactttagtaggaggttaaacaagaaaattacaattataaggaagagaaaacttaatgctcctatgcccacccacagcatcacattatttatctgtgtgtttgtgaaataatagctttaagtcttctagaggtttgtaagttatggtgtcttcctcttatgcctgcagcgacttrcaagaaacaggtttaatcctggacagctgtatccagctagtgattctctaatgtttgacagcagtggaggtccttaacaatacctgataggggtccttccattttgggttgtaattgatcatcaggggatctttctttttaagttcttagtaagactaagtctggttaaacagaggaactatttttttctttgtgggaaacggcaacactttattttcataattttgaaaggccttttgaacctggcctaaattccaagagccggggtggcatagtgaagtctgtccaaccccctatttcccatcatggcttgaattagttttttaggtttctgtaggatttcctttggccggggaacgtgtaagtcaaaagacttatagccaattaaacattttaggccagagaggaatggaggtggcttaaaacattttaagcaatataggagtcaaatattaaaagccaaaaataagattatatatcaagaaaaaccaagagcatcaaatcaagctatactgggggaaaagtgttcctgtagatctctaaggcaaaacactctagtatcaggccataacagcagtcagaaccagaggagaaacaagtyacaggagctgacaaaaaagctaaaggaaagagttacacaaatctgagaagctttcaaaagaaataaatcacagaattgaaaaagcaaaaattctggtaagttagcaaattaataccttaagaaaagctggctctaacacctagaccattttctagaaagtctaccacgaacagttttccttcagtcacagccagcttaatcacacacaaaactcccctcacaaattccctttcacaaaccccattatcacccacacagaccatccatgacatgtctggaccttgtgacctgtcctacaccatctccctctcaaacaaccagttactttactctaggacaagaatccaccatgcaaggtccctcatacaaaatcactttctttatatccctccccmcaaaaaaaaaaaaaaaaaaaaaawatatatatatatatatatgtgtgtgtgtgtgtatatatatatatatcttttatccacactttcctcacatccctctttttattcattgattccctcttattttgaaccatggcctaaatgtgctgtatatattctgtagttatggtggggaaagtgccttcagtatttagtgataattataaaaaagtttaatatttaattcatttctctttcaggtagaactccctgtggaacatgaattttttttaactatacttttgttactactcagatgatatatactgtatcaaaagtgtatgyccttgtcaagttctctaaagtttgtgaaatacaagagaatatgcagtaaaattttaagtctgtttcctttccagatactttttctctgaagaactactgtggaacattacttatattgtttaatagtactataaagttgtttccacacttgtatgattagcacgtaatgttcaaactgtgccatgaatgtgctggtagaaacaaaacagttttaaggacaattaaaacaacaacatcctgttatgaagtaaagacacagtttttaccatctttattgtctggaagaaactgtagtaggaataaaagaggcgacgaagagttaaagtacattttatgtttttaggctaaaactgattaaaaaaaaaagatcattgtagggtcaaagaaattgatatatatagtgtaattttggctacattaaatccaggcatttggccttttaaattagctagcatattttacaatcttgttgcctcttaccccacaacctctatgttatgatgattttaggttagtatgttaaaacaaggagaattcctggactgtcacaggagtgaaattgatatcattatgttacccatgtgttgtgcatatttagtgtctctttttgacagtatttcagtttcatgtcttctggggagactaaagccaaagtttcttggggattctggtgttttagcaaagacagtgagacacatagctcaagaactgcgttattttactccttgctatgtcacatttacatgtcagactcatttgctgtgatgtagcacactaggctggtgaaataattgcttgtgatgtccctaartccccgaggcttttttctacctcctgcttagatagtgaagagaagttgaagttgmgtcctctagtgttcattttgcgtaagagtgataggatgcggtaggacagatgaagattaatgagattgtgtgatatcaagtaggctcattgtctttagattgattgctgatggtctggatttgcttagcatcaggagagtttagaaacaaacaactaatttattaatgatgcccaaataatagttaaatgcccaaacttttggaatttatgttgttcattgttaacaactgctgtgtggcccctttagaagtgtccagtccatgacattttatacatttgtsttgaatcttaaggaaaacatgatcatgtcttctttctcgggtgataagcatgcctcaaaatagttttaattctgtgaatatctttgaattcagtttatttgggtacttttagtacggatacctactatataacaagctcctaataagaactattaaattataagcattatccctagcgtataaacctagttttcttgtagtaggaaatttgaaggacttcaaaaattttactttaagccatctatggaaaagattgcccaattgagaaaaattgtgaaagatatgtagaagtcttaaataattttggtttcaggattattttctattgttgtgttagactcatggaggtagtaaattggcattaatttyccttacagtttttctggaagaggaaatrtgcttaatgagctaaataagacataacattttgttttcttacattgttgcaaattgaagttgggttttgttgtttgtttgttttgagatgcaggtctggctgtkttgccaggctgaagtgcagtgtctattcacagatcattaagttgtgcagccttaaacctttggactcaagcaatctcctgcctcagcctcccaagtagctaagattataggtgtgcaccacagcatccagcttaaaatttagttttctagaaagttttatgacatggggaaaagttaattaacaatatttaggaatgtccacaaataaaaagctaaatatacgtatctttcgatattcaaatgactagtattccaaaaataccctcagaagaaaggctacaaatgtttcttcattctccatttttcctagttataactattgctcttctaatattactcttcttagctaagtcagaactaaaaaaaaaaaagctgcaaggactaattgacattaatagttcaaatgaatcataattctttactttcccaaaagtatttaaggaatggatgcctattaatctttcacattgtttatcaaaatgatgtgaatagtctttggtgagccatattaagattaaagctggaaagcstcctgtacggttgttttccaatttcagctttgccatctttacacaagactctcataagtgtttttgttattgttgctggattcttcttttgtttgtttttaaaactccaggtgttttaacttctatgacagttattattcttatcttctatggcagccccttccaagttttggctttggggatagagaattgggagagatcagagaagagagactggtgagaggttgtatgcatatgtgggtcttacttcatttcgatgttcataagataaagacgctttatctcaagggttggcagaccatggcctttaggccaaacgtgacccaccaactggttttgcatatcccattgtctaagaatagtgtttacatatttaaatgattaggaaaatactttaaaagtggttttttgtgacatatgaaaattatatgaaattcagctttcagtcctcataaataaagctttattagaacacatccacactaatttgattatgttttgtctgttactccttttgcactactgtagtagagtagttacagtacagacttatggcctataaagcctaaattatatactctagacctttgcagaaaaagtttcctgactcttgatttgtccttgtaagtttttagaagattagtagcctttaatgtctgttgttcatatatgaacctcacgtttttgtttctttttaaaaaagattattttaattgacataaaaattgtatctgtttatagagtacaacatgttgttttgataattgtgtattcattgtggaatggctagatcaagctatttaacatgtgcattacttcacatacttcttatttttttgtgatgaggacacttaaaaccaactctcttagtaatttttaagtatacaatatattgttaacgatagtcaccctacagtacaatagacctcttgaacttatttctcctgtttaactgaaggtttgtatcctttgaccaatwtcttcccaactcccttagacctccaggccctgataaccaccattctactttctgcttttgtgagttcractttttaagactccacatataagcaagatcatgcactatttgcctttctttgtctggcttatttcacttagcataatgtcctccaggttgatccatattgtcacaaatgacaggatttccttttaataaaggttgaataggattaccttctgtatacataccacattttctttatccgcttattcttcgatgcatacttaggttgattccatgacttggatattgtgaataatgctgcagtgaacatggagtgcagatgtctcttggacatactgatttcatttcctttggatatatactcaatagtggaattgctggatcataagatagttttattttaaattttttaggaacttccacactattttctctaatatctgaagtaatttatgttcctaccaacagtgtacaaggggtctcttttctccacatcctcaccaacatttatctttcatgtttttgacaatagctattctaacaggtatgaaatggtatctcattgtggttttcattggcatttctctgatgattagtgatgttgagcacttaaaaaatatacctgttggctatttgtatgtcttctgagaaatgtctattcaggtcttttgcccattttttaatcaggtcatttgttgctgttgagttccttataaattttggtattttagattttaacaccttatcaggtttggtttacaaacatattctctcattttataggttgtctcttcactatgttgaatgtttcctttgctgtgcagaggctttttagcttcatgtaatcccattagtctattttttcttttgttgtctgtgcttttgaggtcatgttcaaaaaattattgtccaggccagtgtcatggaacattttccctataacttctttcagtagtttttcagttttagctctttattcgtctttaattcattttgagttgaatgagccacagagtttttttttttaaagattgtttaaaatgtttaacacrtacgttttctgaagatacattataagtcgtatttgagtaaaaaatataatactgaacttaaataatagtagggaggctgaattaacttatttcaagcatacaccatcccctcttgaaagctctcttaatctttaattttttaaaatacattttcttccactaaatacttattttttccaactgactccckaaaactcataaatctacaattgttattacatgagtaatgtaaatatttattcatgccacctgaatcttaaagttccattggttattagctttttgtagttatgagttgtatgccctttttagtatttagcaacattgggattttcaggcttagatttctaaattttgaaagattctgtgtttagatatatttgtttagtaaataatatttgatgttgtcaacgtgaattgaagtatgtttaatattagagaaagtaataccataataaaatacatgttgctgtcaatacccaaggtctaaaagaaattkgktttttcaagactggagaggacatagaaggctccatggtctagatgacccatctgatacactgacacctgttgtaaaatcccaacccatcatttcttcatcctttgcttattcacccacactgatggggaactattaattcacgaaatagaccatttcatttttgtgtcagactattargaagttctttaatcygatgaacaagcagctgtttgtctccctaaaccctctatacctctacctgattttattccaaagtctgtaaagarcagtttttaatccttcttctatatggtgttcctttattttttaaaactgttagttatcttgtctttacactttatctcactaaccagtcttttgtttttcaggcttgacattttggattatttcatatgccattstttttccgtctaaagcattctcatctttttcttgtgaactatttgtcctttttgctctgaagttgtaacatccaccaacaaatatatattgattggttgtgttctatcagtacacaacttagtgagactcctgctgcctctaccctgaataccttgcttctcctaatgcattccaggattttgttagctttgttgtcagctgcacattgagattgctattgaataaagtcatcaggarcaacaacaaaggtgaaaagcccaggtctttcttcaaagtctgctaaataatagttttcacgccttgggcttgtgcagttaatttgatttaagtttcagcaactgaggcacaatatataccagatatagaagttatcctccaaaattagctcctctaagtttctcctacttttcacatgattcccagatattcttttctttaagtccaagtgatttcccaattatttccatggctatggctacaaaggctttaggccataggaatagaggaatttattcttactaaattcatcttattagatttgattaatcttcccaacttgtcaactgtgggatcttgtttctgtcattctctatgtatttctttattcattgatagcaaaggcactatatatcttaaataccaagaagaatttatatagctttctttttgaaaaattgtttaaagtatctagttcaagatccccaatctaggtgaacttcatggaacatttaattgacatggagataattaggggatgttctgaagagttaccaaagagaactcctaaagagaaactagatggttgagattatttatggaggaagaacagatgaaagtaaaattctgctattaagaatactatctgggtaaagaaatgctttctgctttctttggtggaaatagataagagtgagcagacttatattcattcattgaaattcagataaattcataaccaaagttttattatatatatactgataaggtgaagagttcaacactaatctagtttgaactccatagatatttaaaaccagctattttaatttcttttagctttaagacaatgctgaaatatgtacttaattttctgaatactttgctctttatagttgccgtttcatgaatttgtgatattagacttattgtatgaggagttttgtatttttcttctttgaactttttgcttatagtgctttgggcacagaccttcccaaaccttagtatttctggatgaattttttgagagtgcacaacattggaaaggagcttttgcataatgccagcaatgtagctgaggaaatgggtctggaggaaaatgagatttgacacctgtaacagaggataaatatgataggggccagagtgccttatacagagtgtgataggaaagctcaaaactaacagaaacaagcaatggaagagtaaaggcagacagatggttgcagagatcttagtttctgatgctagctgtgttattaacagactgtgtattatttgaaataatttatcctcactgagcatctgtttctgtacctgtgaaaaatgtactagataatctttgatatatcattcaagctctacaattatcttcttttgtgacacagagacagacaagaatagagattatcaatgttatataaaaggatgttacttaccaaacaagtttctgaggtttttgttttttgttttctgttttgtttctttttaggtaccaccttcccagactttcttgttactgtaacgtttatttcttcaaacagatcataaagcaagcagatattatccaggtgtgcaaaagtgattaaccatgtgattttcagaaaaaaaaaaaaaaaaagaaaaagcaatcaatcagcctttaaggctgttgttgtgtaataaaaaccttgcttgacagttgaagtacaccttaactttttcatttaaaatttattactctttgaaaaaggagaacttgttgagcagcatattttcttttttcacagatgtctgattagcctgcaatattttggttctatttaatatacttttaactattttttaatgaatatgaatgtaaaaataatgttgagttagaatagaaatatctaactgtatgattaaagttgaatcacttataaatttgaaaaagcttcttgtcttctattgttaatgctcctagaatctcatgtttgagaacgaatgttcagtgtagccaaaacctaaatctgggrctatatgttgaatgttttaaagtcactagtagaagggcaatttggtggctaattttaaagtacataaagagtattaacaataatgaagtgtcattttgttcctggcattctgtgtgtgtgtgtgtgtgtgtgtgtgtgtgtgtgtgtgtgtggtgtcaaaaaagtatctgaaggggcctgtaatagaaaacctagttcctttatgatatacacaatctagcttgaaattttgatgcattaaattcataaaacatgaagagtttaagctttgcaacacttaattgacacatgcgtcagaataagtttggaaaaaaatgaaccttcatacattttgacttctctgttttctatttgataactttggtattgcagttactcttttttgacacaagatggtgatgttcacctgaaatgtttcctgagtacaggctctactgcgtttagaggctcccccttatttatccaaagagcagcttaaagaaatgaatgaaactggctttgctttaagagataatagttgaagaaaagcaagagagtgtgtcctcttttataactgatttaacaaataatgattcaaatttaagtgtgggtttgtgtgagttgaggactggggagcggagagcactgggaaaaaggaaagttgaacagtggagaattagcagtcattaggtatgcagtatgcattaagtctatgctatgtgttttacatatgatgtctagttaattttagtcaaatatgagcactttacatgtattttacacaayactagtgcattccttgtttaattgtgcaagtttaraagtacggtgtgtgtttgttctttcttaaaaaaattatgacgtatcatcagccagtgtagtagctttattcataatttaagtgatactgtttcatttttaaaaatacacaagtttcttacatatagttaaatatatatttaacatagtatccgacaatctcagtcctaggtatttacccaagaaaaatgaataaattgtccagcaaagacctgtttgtaatgtttatagcaactttatttataacacctaaacaacccaaatgtctacctacgtgaatgaataaataagttgcaacatgtccatayrgtgaaatactactcagtcatgaaaaggaacaaattattgatatatgcaaagatggataaatttcaaaagcattatgctaagtaaaaatagtcagatataaaagactatacactatactgacattgtgaggattgcagggacagaaatcagttcggggatctgagggaggaaatttcaccacagagcagcaatgggaaactttttggaatgatgtagatattctatatcttggctgtagtggtgattacaggactgcatatacagggatacctcgttatattgtggtttattgcactttgcaagtagtgtattttttataaattgagtatttgtggtaaccctgcaagtccattggtgccatttttccaacagcatattctcacttcacattttggtgatttttgtaatatttcaatcttcctcattattattattatgttatcttgatctgagatcagtgatatttaacattattattgtaattgttttaggacaccataaaccacacccatgtaagacarcaaacctaataaataaacgttttgtgttctggttgctccaacagccagccatttttctgtctcttttcctctctttgggcctccctactccctgagacacaacagtactgaaattatgccaaagaataaccctacaatgatttccagatgttcagattaaaggtagagtctcacatctgtcacattaatcaaatgctagaaatgattaagtttcatgagaatggcatgtcaaaagctgagagaggccaaaagctaggcctctttcaccaaatgtttagccaagttgtaaatgctaaggaaaagttcttgaaggaaattaaaagtgctacttcagtgaacacatgaatgataagaaagcaaaacagccttattactgatatggagaaagttttagtgatctggatagaagatcaaaccaactacagcattctcttaagccaaagcctaatccagagcaaagccctaatgctcttcaattctgtgaaggcggagaaaggtcaggaagctgcagaagaaaagttggcagctagcagaacttgggtcattaagtttaaggaaagaagctatctgcataacataaaaatgtaaagtgaagcagcaagtgctgatgtagaagccgtagccagttatacagaaaatctagctaagataattaatgaaggtggttaactaaacaacagatttttaatgtagcaaaaacagccttatattagaagaagatggtaatctaggactttcatagctagagaagagaaattaatgcctggcttcacgcttcaaaggatagggtgactctgttgttaggggctaatgcagctggtgactacgtggaagccagtgctcatttaccattctgaaaatcctagggttctgaacagttatgttaagtctactctgcctgtgctcgatcaatggaaaaacaaagcctggttgacagcacatctgtttacggcacagttttctcaatatttgaagctcactgtcgatacctattgctgaggaaaaaaaaagattccttttgagatgttactgttcattgacaatgcacatggttactcaaggctctgatggaaatgcacaaggagaattaatgtttttgtgtctgctaaaacagtatctattctgcagcctatggatgaaggagtaataytgactttcaagtcttatgatataagaaatacgtttcttaaggctattgctgctgtaatagtagatatgggcaaagtaaacctccttgaaaggagtcaccattctagatgccatgaagatcattcatgatttatgggaggaggtgaaaatacgtcaactttaacaggagtctagaagaagttgattccagccctcagggataattttgagggcttcaagacatcagtggaggaagtaactacagataaggtagatacagcaaaagagctagaattagaagtggagtgtgaagttgggactgaattgctgcaatctcatgaacaaattagaatggatgaggagttatttsttatggctgagcaaataaagtgatttcttgagatggaatctactggtgaagatgctgtgaatattgttgaaatggtaactgaggatttagtatatcgtgtaagtttagttgttaaaacagcagggtttgagaggattgactccatctttaaaagaagttctactgtggtttaccctatcaaatagcattacatgctacaaagatatctttcatgaaaggaagagtcagtygatgtggcatactttattgttgtctttttttttagaaattgccacagccaccccagcctgcagcaactaccaccctgatcagttagctgtcatcaacatcaaggcaagactttccaccagcaaaaagattataacttgctgaaggcttagataatcatttgcatttttagcaataaaggatttttaaattaaggtatatatatttttcccccatacatattggtattgcatacttagtagactatcatatactgtaaacatagcttttatatatattggtaaattagaaattcttgtcacttgctttattgtgatattagctttattgcaatattagctttattgtagtggtctggaactgaacctgcagtatcttggaggtatgcctgtatttgtcagaacccttctagctgtaaaagtaaagagattgaattttacaatatgtggggtatacccaaaccaccctaaaaaaaattgtttaattcggaacacaaaggaaaatgtcagctttatacttcagcaacagtttcttttcacttggaggtaaggcctcctgcttctccgctcttttaccaacctttgactatcttttacaacccatttacacagacctgcattgttattgcctcagtgggctcagaactacctcagcaaagaaggggacttggagtgttgcttcaccagctggaaacctccatggccagtggctccttctgcctgagtactgctcgcacccactgagcttgttctgcccactcagcccagcaggctgcactctgctcgtgctactggccttaatcccacacctgccaagggcgagcgaggcgtggagcggtgagggttgtgtgggcaagtgagcccaggttcctgccactatgcacagtcaggcacacaagctgctgcatggggtgggcagctccasrcactgataacaggtgctggctccatgcaaggctgtggctggaccagatgtactgcacacatcttccactctgtgcacccgtgactggacgaggggaacacagtggtgcccagaagcttggagaagccaggaaccagagccccaaagagggtgtcacagccctgcctcagggagcccctaggtctgggctccccagagggctgcaactcttctccttctcatcaccctcaatgtggcaagtcagggttgggggtgtttttcagctttstttgtgttactgctctttcagtccctccrtttggtgggtcctgagttcttgtcccgtgtccaggaccagtgaggtatgtggacaactggagggtgagcaaggtggaaaggactttaattgaacaacagaacagctctcaggagacccaacataggtagctcctttctgcagctagtagtcctgaagtctctccaagtctggctgagtccaggggattttatgggctcagaagggacagagtgcatgctgattggtccatgggtggccatgggcaggcccagtgaaagcaccctaagttctcactctgggccgaggtctccacatggaactggcagcccagcccccaggcttcaggctgtccatgtcttgaaggtggggtttcaccagggacccayccctttgcacccaggagcctgtctgccttctgtcaccaggaatgtgccatccatggcccccaggctgtttgtgccaaggagtgcctgaagccctatggcaaaccaccctcagccctcctcagcctccctcccatgctcaccagtgcccaaagtccagaggggttcaaggtggctgggggctggcatctcagtgtctccctgagcacaggcacacccagttgagttgtgacagcacccaggcttggccacaactttgctctgcccagagcctgcgccacaatcggagtggccagggagcaggagcagtcacttctgagcctgcaggggcaggagggcttcccaggcccccaagaacacaaggatgcctgggtgcagagtcacggctggacaactgcagtgagccccgccctcccaactcagtaggggccagggctcctgcccgttcgcagccttgacggcttggcagagcttgcaactctagccgcacctacccagtrcagcgggcgtcctcacagccgcgctccagacgggccgctgctgccatcattactcccaagtttcgggtcagaaataagtagaattttagtgctggagagattcttagagaatttgatttcttaataaaaatttggctaactagatattttacatgtaaatcttttagagaatttattcagcaacaaaaatcagttatgtgtrtattgacagtttctaatctaattttcataaatataactaaaattatgaaaatgtacttaaaaaaaaaagctagattatactcctgtctcctagaagggacagtgcaggtaaaccagaccagtgccttgtatcaataattatgtttcataccaagtaataatgtttacctttttgttatgccagtacaatttatggcctaaaagttacatgttgtttctgtttacatcaagatatttgatgacagacttagtcagaggtatgttttgttatgaaaaagacaatgataagccagttgtaaaacgagtgccttttggaaatcttgattccggaacttttttttttgtattagagtacaaaaaagaatatttgtcataggattttataaaagtatagtatattctatctaagtagaaagttgaagaaaatagaatgctaatgttggagaaggtgagcaaaattatatttttatgaatgtttaggatattttgggaatttctaagagttcagcctctttaattctatagtttggggcttaacgcatttttttttaaatatgtgtgtttttttagaggctagtagaggcctgacattttgagtttaacaactttataaggtttattcttaaattctgtatcagacttaatgtctttgaattgtgtatttaataatttgatgtccttttgctactgcatttataaaccagaattcagtctttgatgattgcattatattactaagtgatttgggtaaagacagaggggaaaaagagaaagagggaagatggaggagggtagagggaggttgaagtggtatatgtgtgtcggttgttgtatttatgttttatctttgcttgttagacaattagaattgaagttaaacactaggaaatagatgataagtttatctctatactcccaggaaaatttaacattagaattaaggcatttagctaaactaagccaagattggaaaactactgtgctctatgcctgtgtttagaaataaagttttattggaacacagccacattcattttttttctcttgtgagtgctttcacactgcaatgggagagttgaatagtgctatatagacggtatggctgacaagctgaaaatgtgtaccatctggccctttattactaattataatatggcttatagaaaggtattagtaattgttagaactaagaaatactcatatgatagatctctcttatctgaagcaataataatattgagcctcataggaaaagattatatcaatcatctgacactgtaggtgctccaacccattttctcactctgattctccatacctccttttatgctactcagctgtttttttctgagtgcttattagtgtagtgtagtgaatattattaccacatagtttacttatacacagtatttattattgtctgtctcccattgctctaatgcaagggaagcatttttgtctattttgagcaaggatttttgtcgtatttactggtatattcaggtacctggaacacatagtagcagttagtatgaaataaacctgccttcttattaactatattaatcaatttagaaagcatcagcttttcacttgctggctatattttgctaattcaaaatgcaaataatttgctgagctaaattgtatatcttttaatttgttttctctgttcttcattgagaaagttagtattttctgtttttaacttctcactttagctacatgtagttttttcttgggggtgatatgtgtttagtagaaggtagttcagtaatatatttactgaatagcaaaacgaacactaagattaaagctcatgttaactactctgatggccttgaggaagtaatgctgagagtttaatcaccattaagtaattaagaataatttctcataaaagttctcttccttccagttatattcatgactgtgttttggtgatagttgattgccctgcttacatagttgcaaaattggtaaggagaacagtattctgcagccaagtttccatgagttgatatttcacattcacatttgtgacctaaacctgtattctggcagacagtgagaaaagccaaatgttctcgtaagcagcaaggattttcttcatggaaaacaaagaagtaaaaatgtaatccaagcaaaactatcatgtatatactgaattttataggtatatctacagaaaattaatatttgcttttatgcattttattacaagtttattttgttaggtattatatttgaagtaaaaaataaaatacaaaattgaatacataaagggaaatcagaaaaacccagaaatattactctaagataataacaattattaccacttttatttgagcacatgcactataccaggcacagcacaccgtgctttatgtayataatctgtaactctcctgacaaccctgcaaagtagtacctctgtttacattttgaagatgagaaaattactgctcaaagagattaaatagcttgccatgattcaggaactagtaagtaatgaaggcagtattgtaaggcaggactttctgtctccccagataccttattctttatcccgtagcatgtcatttttctccagtattgtcatgatgtgtcatcagatgactatactttttatccatactttatttaaaaattttatgtgttagaaaacttatactctagacatttaaaatttaaattttcataacatagtatgcttctgaawaacctgagaagaatgttacacaaaaggagatggcttgctgattccgtggagtaataaatgcctacctgttttcattttgaagttgaagccattgcttctaattttaagccaacctgtatttttttttcattttacctttcacatcttcataacatgtatttggccttatatagctgtgaaaattgattgtacaaattggtttgagcatatgagacctatgaacacttgtattctgacttagcatagagttttatattttctgagtagcatagacccatatatttttggacacccctcgtattttacatttaatagaatgatgaacatgattcattaagcctttctttgatgaaagacagaaaccacagagcaatgaagatattggcatttctgataaagtttgtatattaaagtcttatggtagcctatgaaaaagagcttgtttggaaaaattgagagattcaagttttgtattatacttaagttttgtcacttcatcaaatgcctccctttctatgtcttatcatgaatttatttttttccctttaatagtagatcaaatatagatagccaggaaagagtaaaaggtcagttatggtaatatagtgaagatgtttcattcatactttaatattatacaagtattagttttgtattatacttcttcttcttcttcttcttcttattcttattattattattattttgagacagagactcaccctgtcgcccaggatggggtgcaatggcatgatctctgctcattgcaacttctgccttctgggttcaagtcattcttctgcctcagccttctgagtagctgggattacaggcatgtgccaatttttgtatttttgtgaagacagggtttcaccatgttggccaggctggtcttgaactcctgacctcaggtgatccgcctgcctcagcctcccaaagtgctgggattacaggtgtgagccaccgcacccagctatacttactattttagaagaactttatgaacactattaataataaaattgctttaaattattatctattgagtgaatgaatggctggctgactgaatgaatgcatacattcagaactctggactccaaaatcttttagagtctccctttgagtggaaactactcttccttgattttggaaatgttaaattaaaagatagcttaatattggtgttgctcctttctataattgtcaaaaagaagttatagtgtcctcataaagacaaataaggagataaagaaaaacaaaaataattgagttaaattgttaatttttgtttgttttatgtgatcctcagattcttgggattaaaattcaagcagggatgcagtcttcttttgagttacatgttagagtctgtgacattagcattctctatctcaagcagaaatgctaccaaaatggttcttgatttaaggatgtgatttcttttatagtcagtatttttaacatatcacatttgagtcttttaaaacttaactgcttccttctttcacatatcagtttctcttccatcagagagaatagtgatatggaatcattttgtctgaatggttggctaaaagtacatacygtagaaggtagaaacttaaatacaggataatgaattttttttatatctgattcccattagcattgacattttttttttctgtttccagaccataaaagcttcttccaaaagtatccacaggcacagaagctctgtttagatttttcctatgtgctttcttttcttgatattttgatttttttccaaaatgagtttgctgtttacttttgatgaagtaaatatctatataaaatctgaagatttttatttcttggatttggagggcaatttgaacattagattttaaaggcttatacttaagatgaccattagtagttaaatctggtttataactaatctagtgtaatttaattaatagaggttagtgtggagtcattcatatatttatatttcctgtttcatatgtttataaatatttgatgagtatcattggctttttttctccaatgtgtttggattcaaggaattaagggtctgtataaatacttatttttctgtgtgtgcattttcttgtgtttattttcattggttttgagtttgacttaatatacacatgtgcatttaaaaagatgatctttccaaaagctttgcttgggatctttgctaggaggatgagttaatggatggagagggctgcttgctttactgtttattttcccagacaaatccatggagacaggctgctaataggataggagaaaaacaacaaaaacaaatacagctttttggcctggaactgaattgtattatctgtactgtcagttagagcctttgctcacttacccagacgatctctacagggattaaagcttcctcctgcatttgcgataactttcagtatgctgcagcgtcatatccagttaatattaaaaaaaaaaatctggctgtaaatagttacaaaatcctcaccaaatcaacctttagcaagagtgattgtgctgattaatcaaacaagattgtcagtaattaaaggaatacagatgacttggattttattttcagttttcatatgtaaattcttgcagcccttccccaaggttgggcctgattttgttatgggatctttgggctgttgcttttctgaccagcaacctctgtggccagtggcgcctttgcctgagttcttgtcctgcatctaggaagaatgaggtacatagacaagtggagggtgagcaagacaaagaggagctttattgagttagaaaagctcagaagaggcctgcagtgagtagctcctttctgtaggcaggtcatctcgttgagtgttgagctctcagcagagaggaggcctggagtgggtggctcctctctgcaggcaggttgtccygacgaatgttcagctcttagcagagagggtagctcctctctgctgctggtcatcctgttgtctgcagctctyagcagagaggaggccctgaagagggtagactcctctctgatgttgatcatcctgacctcagcagctctcagcagagagggtagctcctctctgcagycggtccctccactggctctgctctgctctggctgagtccagggcttttatgagcctcagaggggaggaagtgcatgccgattggtccatgggcctgcggtaaaggcaccacaagtccccactctggtccgcagggctggcagcctggcccccagccttcaggcctgccctgttctgaagatgaggcctcaccagggacctgccctgccccttcccacccaggaacctgtctgcatcctgctgctgcccatcacacccaggctgctcacacccgtgccaaggagcacccacaggccagcccagagcctcattcagctccatcttggcctccctctcctacttggcatccatagtccagaagggccaaggtggcaggaggctggtgtgtcagtgctgcctggagcagcacacacctggctgggccacaacaacgctgggaccaggaagaggccaggcaatgggagcagatacccctgagtctgctgatgatgggggacccacctgggtactcgagagcaccaggagacccaggcccacagccacaacccaggcagctgcagctgtgcctggggagctctcaccctaccaactcataaggggcagagctcccgccagtccctggctctgcagagtgtgcagcattgactgtgctgccttctctgcatctcccacagtggtggcaggtgaggtgcaggtggcatagtggccctggccaacccagcacaaacaaacccgatgctcccagggctagtcctgtgagtcccagtggcagcacctttggccaggtgcttgtgggctttcaagacatggtggggcgcgaggttgaggctgcaatggcggctccgaacttagtagcaggtcctgctacctgtgcgagggtggaggtggcacagtccaccttgaggacaygggacacaggagactgttgccactgctgctctcacagttgcttctgctatcctgtctgcctccttgcagcctggagcagggctccaggccatcgctgggctgggctgccgtccaaggcaaggatgacattgccgcaagttccccctgtggacccggctctcggtggcagcctggggctcctcctcgcacagcttgagaccctgccggggggcacctctggggcrgatcgcgggccccaaacccagttgtcgggagcgccaggctgaacagtcactccgacgtggggtggatcctggggttgcagcgtcggtggcccgggctgagcctccagctgaggtgcaggaacttggagccgccagcagggtgggtgcggcgacagagtcgcttgccaggtctgggaagcgggcgccactcccgctttccaccccacacccctgaagtacggccccactgtgcgttcaggcccacctcccttcactctgtgcgcaactgcagcacccctgggtccaactctgccttgagacccctccatgccagaccgtgctcttcccccgcctgcaggtaggtcrgcccggccccacctgagtggatcccagggttgggcttccagggcagcaggccccaggtaccgttcgccttggagtccacctgaggatccacagcctgcamccccacctgcacccacacccgtgccccaccacagccggtcccggctgccaaagtggcagtgactactttggatggcccgctgctgccatcaatttgaatggtttatattttgccgtccttgttgagaagaaaaacatggatgtatagatatacagtgatggatggactagcagcttaagaatcattttggggacattttwwaaaaaattttttgagacagagtcttgttccatctcccaggctggagttcagtggggcaatcgtggctcactgcagccttgacctcatgggctcaggtgatcctcctgccttagccacccaagtagctgggactacaggcgggtgccaccactcccagctaatatttaaatttttatagagacagggtcttgctttgttgtgcaagctggtctccaactcccrggctctcacagtcctcctggcttgacctcccaaagtgccaccacacccaggctattttgaggacgtttctcttttcagaaaagttataagtattttgaccctgcatgaaagtttggaatgatggaatcatataaacaaaaacaacagaaagcctcaaaagatttttttaaaccaaacaaaaattattggaaccagcttttacctcaagcagtgaatgagctacacagaaagttgatttttcttttattaatgattgctagtaatgagaattttacactttattcttctcaacctccctccaggtcagttttggttgttacagctggaggaatgatactggcatccagtgggtagaggtcagggatgttaccagacatcctataatgcacaggaaaaccctccctgacccacaatgaaacattgttagcccaagtaatgctgagattgagaaaccctgctgtaaagtgtggatttttatcttgatgggagtttttccaaatagctacattgatgtttacaatgctttataaataaagggaagttttgttctgtttgtttgaattactaataagagataaaagaggctttagagacagattttgggatttatagatgcaataaacacataaacacagtcttcgaaaaatgttcatggagacaatatggtgatcttgtgatacagggaaatggaaaacattttattatagaagaacatgagaaatttgtattattttttactctttcatggacatgaaatgaaacttctactttgtaggtgttggtgttgtacagaattatttctatatttgtgaattaaatcatataataaagtaattgcaatatccaaaaatcaattatcttggtagaatattcaagagcctgaagctctggattcacttcccatttgtgactaaagttaatttatttaatgtccaagcctcagttaacacatctgaaaagtaaggtagtttttataaacttgtcagatgggcattagttaatttgtatttgataatttgtattgacactaaactgttatcagatgttaaaagaactgttcagtctttgattgctgaacttcagtgtaaggagtaggtatttctttgttcatttcataaaggagctcttgaacctccgttttcaagcattgtctgctcagtcacaataatttgcagtggaaggatgtatatgtaaccacacatgtgtaaacacatacacacctagtgacttgatggtagagaagttaaggatttacaaaatgtgtttacattgctttccagagattgaggttgaggtttttggaacctggcatactgatagtacccattatggaaccataatcatgtggagttagcatacgagatagagcatataacctataaacatatttaatgatactcatctattgtgctacaacagaaacagacattggagagtaaatgtaaatgatcttattcccactcttaaaaatttgcagttgattttattttttaaatgattatgttgtctgccatactacccacagtccattaactaactgaatgcatgttgtcgaaaaagttctactttctgtaaaggaggagagggagaaaaaaaaaatgcaggttggagtcacaaatcatagcaagtcactttacctttgcttccatgtttaagaaggtgtctctttggtggagacagatgagatctgtattctgtcaccaccaaaagtccttggggttatttttttaattttttttttttaactaagggaccagccagggctacgcaactaatatagagaaaaattcagacaagaaattagatctcagatggaggtggaaactgcaaagtttgatcatcttttagagattgcagtgtataaaataaattgtttcacttataaatggaagcaaagcaataaacttcatgttattctatatacaactttaattactgtttcattttttaaaagatattttgttaagatggtattttgaattggtaacatatgtatataattcagagatcaaaactgtatggaaagatatacatgctcatwccttgttccttctaccactgtaccccaacctttccaccttacttttattagtctcttgtttcttcttccaattttttaacacaaacaaaaaatatgcaaatatatatgcaaatataaatatatgtttatgtgtgtgtatatataatatatattatatataattatattatatataatatatatattatattatatatattatatatatatatatatgttttcaatacccatttctcccagttatatacaatgcaggaaactatgtatacccttcagtactttgcttttttgatttagctctgtttcttgcagatctttttctctcagtaaatgggcattttcctcatccttttgwaggatgcatggatgaagaactaccatagttattcaaccagtgccttattttatggattcttaggctattgtcagtcttttgccactattaacagtactacaaagagtaatcttgtccaggtgtcattttgtacttgtgctggtttgttgtaaaagtgggattgttgtgttatgggtaaatacatttgtaattttgttagatattatcgtatttccttttatggtgattctaccattttttactttcaccagtaattttgaatgtgtcggggtttccaggttggtatcagtagttagtagttaatttaaaagggtaagtaaataatcatttaatgttttatatttatgtttaatgattttaacataaaacataaatatacattgatttcatttgtcttagggcaaataattttttaagaatagtctgctcattggagctctgtaatacctcttttctaaaccatattttattaattttagtgtttggcatctatcaagtagagtgataacttaagatactctgaggtaccttgagtatccccattcatctacagctgttctgccaaaccaaattaacagttgagagttactcatctttattgaatctttcctatttaggtttttttttctaaaaaataatatatttatttgaatcacataatttcaatgtcaagtaattgttaaactagaattttggaatcagtattttttactcatgttttgtttaccggtaagtcaccttgcttattacagtgtctcaacgtattaagtgttyagtaaattttcattgaatggaatagaaggaaaagaggtagtatggaaatagactcaactgattctaattatgcacccaaaacaagaaagcaaaggttacgagagcaggaggagggtgcgcatagcagagggccttcttatcagccaggatatttaacctcccatggctgaagagtctaggaagtgacatattttgctttccagtctcctaactttctcttcttagacatacaaaatttatatcaaatagagacagtgtgggtccatctttttccctcattttgctgtcattttcaaacttgtttattctggaaaattataacatgtcttgccaaaattgattggctagatgtgctgcaacttacagagctttagaccagttataatgatgaaggttcagtttagatagtaatgtgctttgaggcaataattatgggatatttccttgtagtgaccagtaatttttatgtcttctgtattagtccattctcacattgctaataaagacatacctgaggctgggtaatttataaaggaaagaggtttaattgacttacagtttagcatggctgagcaggcctaaggaaacttaacaatcatggcggaaggcacctcttcacagggctgaagagagagaatgagtgcaagcaggggtaataccataaacttataaaaccatcagatctcatgagaactcactgactatcatgagaacagcatgggggaagctgcccccatgatgcaattacttccatgatgtgggaattacggagattacaattcaagatgagatttgggtgtggacacaaccaaaccatatcatcttccaaacagaatttatcatcaacactgacragccatttcagttttatcttaattattgcaaggactggtcaagagaacgtgtttggaaattggaaattaatcatctatgttgaggaaataatttataacatttgagtttctcyggtgaatcattaacatagtttccatatttaaatttctgccattatattttttcacattgtctgtcttctttccaaataacttctcagagaaactcttagaaaaagcagtaataattaagggctaaaaaaaagagcttcagtgcacttgtgacatcattttatccgttataattaaccattaaaaattagttaatattagttacctaactaaagttagttaatataatatcattatgtgtgctgcatcatctatgtgcccttctggcaagactgagttttggtgagtgagggttgttactgcagtcacattctagacacagtcatgtgctgcgtaaccatgttttggtcaacatcagactgcatgtacaaatgtgtcccataagattataatggagctgaaaaattcctatggcttagtaacactgtagccatcataatgtcataaccattatgatgtggtagcatagtgcattactcttgtggcaatgctggtgtaaacaaacctgctgtgctattagtcatataaaagtatagcacattccatttgtatagtacatcatacttgataataaacaactgtgttacaggcttatgtattacctatactatacatttttatcattgtagtgtgtactctgcttataaaaaaaaattaactgtaaaacagcctcaggcaggtcctacaggggatattccataaagaaggccttgtaaacgtacgagatgacagcttcatgcatattattgcccttgaatacctttcagggaaataagatgtagaggtggaagacagtgatattgatgatcctgacctacgggcctaggctaatatatgtgtttgtgtcttcgtttttarcaaaaaagtttaaaaagtaaaataataaataaaatttaaaaataggaaaaagcctataggataaggatataaagaagaaaatatttttgtgcagctgtataacatgttgttttaacctaagtgttattataagagtcaaaaagttaaaaaaaaaaaaawaaataaaaaatttataaagtaagttacagattaattcctgaagaaagaaaagttttaaaataagtttagcatagtcttattgtaccgtgtttattataaaatctatagtagtgtacagtaatgtcctgggccttcacattcactctttgctcacccagagcaaagagtttactcactgactcacccagagcaacttccagtcctgcaagtaccattgctggtaagtgccctatacaggcataccgttttttaatctcttatacattatttttactgtgcctgctctttgtttagatatgtttagacacaaataccattgtgttacagttgcctacagtgttgaatacagtaacatgctgtacaggtttgtagcctaaaagcaacaggctatatcatatggcctgggtagactataccatctaggtttgtgtaagtacactctgtgatgtttgcacaatgacaaaatcacttaaggatgcacttctcagaacatatccccattgttaagtgacacatgactgtattttgttctgtaactttcttggccaaatgtactattttgagtcaaattccatagacctttttgtttcctcttgaagtataatgaaccttttccttttaacttataaaaagatgagtgtattcaagattgattgttcagaaactttgtctgggcagatttgactttttattttaaattagctttgtcacaaggatattatcaccttatgtcttgaaaccctgacccagccctcattgcactctcccaatttccctgctggattttgtttgattatttgttgttttgctgcctcaccgatttacacatatcaccctgtagtttcaatatgtaaattcaaaacttacctgttttgctatctaggataatatttagataatcagttatgttgatgagaaagagatagatttgttctgagatacttaaatttattttaactgttctctccccagatatacagatactcctcaacttacaatggagttccttcctgttaaaggtatcttaagttgaaaatatcataagtcaaaaatggatttaaaacacctaacctaccaaacatcacaatttagcgtagcttaccttatatgtgctcaacacttacattagccttcagttgggcaaaatcgcctaacataaaacctgttttataataaactattgaatatattatgtaattaattgaatactgtactgaaagtgaaaaacagaatggttgtatgggtactcaaagtaaggtttcttctgaacatgtatcactttcacactatcataaagctgaaaactccaaagtcaaatcattgtaagtcagggactgttcattacttttgttttctaatgcagtggtaattaatgaaggaaaataccagaaattgacagtgtattgataaactgttctttctattcatagggctatctttttgcctttatactaatctcctttaataaatggaatagaaaactacttttttttttggccatgtcatctgtttttttgttttttttttttgacagcatattaggttgtggatagtatttggaaatccacatctgctctttatccacatgtgtttatcctacttgcagtgtagataaaaatgtgctttgtattttagattaaaaattgtgttttccattattttatcaattttcctttctgaaaattgaccttttaactttgtatttttgcagggaaagcttttgtcagaggaacttttattattgtttttcaaaaggcagttgcctcaagaaaatctattttactttagtatgaaagtggaaaactgacatttaattgcacaagctgtttaaaaatcataaaatataactactgctataaaaatgtgttcatataagagactagaggataatattcagagcataaaacaatggttggagatccacagrcaaccaacactggtagtcaaatagtgattaaattcttgataagtcttgctgcttttttttctgaaattttatttaataatatcatataatgtttttcatttgaaaaggaaaaagatgttatcaagttcctgcctatttaactttagagagaacttagtttggtttattmagttagacatgtagtcagtgtagcactttaatcttttaactttaccactttaattattttacaaatacaagttcttgatgatcttttatgtttttctaggaaatattagtgataacatctcatatcaatttttttgtaacattcagaatgtgtagtcatgaagaagaacagggcttacctcaaaatatctggtatactctgcaataaaagtatcatcactggccatcagagaaatgcaaatcaaaaccacaatgagatatcatctcacaccagttagaatggcgatcattaaaaagtcaggaaacggccgggcgcggtggctcacgcctgtaatcccagcactttgggaggccgagacgggcggatcacgaggtcaggagatcgagaccatcctggctaacacggtgaaaccccgtctctactaaaaaaaaaaatacaaaaattagccgggcatggtggcgcgcacctgtagtcccagctacacgggaggctgaggcaggagaatggcgtgaacccgggaggcggagcttgcagtgagtcgagatcacgccactgcactccagcctgggcgacagagtgaaactccgtctcaaaaaaaaaaaaaaaaaaaaaaaaagtcaggaaacaacaggtgctggagaggatgtggagaaataggaacacttttacactgttgttgggactgtaaactagttcaaccattgtggaagacagtgtggcaattcctcaaggatctagaactagaaatgccatttgacccagccattccattactgggtatatacccaaacgattataaatcatgctgctataaagacacatgcacacgtatgtttattgcagcactgttcacaatagcaaagacttggaaccaacccaaatgtccatcagtgatagactggattaagaaaatgtggcacatatataccatggaatactatgcagccataaaaaatgatgagttcatgtcctttgtagggacatggataaaactggaaaccatcattctcagcaagctattgcaaggacaaaaaaccaaacacctcatgttctaactcataggtgggaattgaacaatgagaacacttgaacacaggaaggggaacaccacataccagggcctgttgtggggtgtggggagaggggagggatagcattaggagatatacgtaatgtaaatgacgagttaatggtatagcacaccaacatggcacatgtatacatgtgtaacaaacctgcacgttgtgcacatgtaccctggaacttaaagtattaaaaaaacaacaacaaaaaaaaccatgttcttattggaccactgcatacctgacatgtatttcattatttggtgaatatgaactttaagaggaaatttctttattatgaagttttttaaaactgaaattacagtgtcacaaaatagttaacttgggtcagaggcattccaaatgatttgctctgtaagtgaatgaatgaattgaaatctaacttcgagtattatacttcttttgacagaaattattttacaaagaaaatgtaacataaaattaagaaattattatttctctggttttgtttggcgattctaaaacaatcaccaggaaacatattacttttccatgagttcttacgaacacctttaccttgggtatatgaaaatggcctgctcttgagttggatgctttattccagatgtgttcacataaacaaagtatggaaagtctatacttgtatgtataggaaacaatgggtcagctttgaaattttttatgaaatgtacatagatttttctagacacgtacagaaaaatgagaagtcgtgtctagatggagccatctcttgagactggacatctccagtagaaatttgacttctagctagaaagacagtatcaaattgttctcaaatattaatttatcattcttctttcagggcttccagatgagcttggaaactgatttacagagataattaagaccatttgccatgaacttccttatgtatccccatcattaacaagacatarcttggctctattattatctgctgctcctttcctacactgtcagagaaggacattttttgcctaaagttaattgttccatctagtttctgtagctcatctcaattttaaaaattttagctccctagtttctcctcacagaccaaatatattaaaagtgaacttgtgaaagtcaccagtgactactgaacaaaatttaatggtttcctttcttactgtgttcaattccataaattttatcctgctgagtacctgtatcttgaaaccctgtaccctattagctttgatgacatgacacttttcccttctgctgactctgagtctagtactcttttatttcagtggaatttaataatcaccttaatatggcaaatatttaaacaaaaatctgaatccagtccagcctccggttttgttttataattcaaaatttgaaatctcaattattttatctcaatttcttttttctgctctattaccattactcttctggttgagttatttcctttattactgccattgcctcttgactcgtttctctgccttcagtctctttctccaccatttcatattcattctgttttatagtattcttcctaaaggagtgatatactgttaaggaacatacagggactccttgtttgcctcatcaagtccagctcttcattctggctttttcactttgcaaaagttgcccataccccatgcagcatcttaccattatagtattttctgttttcactgaacatttaccttttatcttggcaattatgtcttctggtagtcatgtgatatgcacgtactattatacattcattattttctccaggcttttgcttattttgtctcctcctctttcatctaaaaccatgctcattacttttccttgactgcctgtcttaacagccttttccatgaattttttatttttgaggttttgtttagtttttactaaattggctctacaaatcttttttctctagcttacttgtcttctgtaccacctagcttagttcttgatgttctctaatagttcrtgtgttccaggtttttcctgtctttctaataacatgtaagtatcttgaggtcagagagattgatacagtttggctgtgtccccaccaaaatctcatctcaaattatagttcccataatccccacatgtcatgggagagacctggtgggaggtaattgaatcatgggggtgcttacctccrtgctgttctcatgatagtcagtgagttctcatgagatatgaaggttttataaggggcttttccccttttgctctcattcttctccttcctgccaccatgtgaagaaggatgtgtttgcttacttttccacaatgattgtaagtttcctgaggcctccccagccatgccaaactatgagtcaattaaacttttttcctttataaactacccagtagccttgggtatgtctttattagcagcatgagaaggaactaatacagagatcaaatcatatttttgatagccgtcagataatagttgtttcatgaattttgcccgttaattaaaaataagactacatggccaagtgcagtggcccacacctgtaatcccaacattttgggagcctggggcaggaggatcacttaaggctaggagtttgaaaccagcctgggaaactttgggagaccttgtctctacaaaaattgaaaaatcagctgtagccctggctactcaggaggttgaggcaggaggattgctagctagatccyagaggttgaggcctatggtgatccgtgatcttgccactgctctgtagcctgggtgacagggtgagactcttgtctctaaaaataaataaacataagacacagaagctaaatatttaaatctctttagttttcacaggaagtcaataatgaaaccaggatctgagtagaaacagttattttaaaatcataatatcacagttttatcatatcagtttttatagttgtaaaaatttcacatcagcagagggcagtcaaaccatagttcattcaactatcttatgggaaattaaaattttctctgtgtttttctgcttaggacacaagctgtactttatataatcagtttgtaaatacatttcaaagctcttcagttggtaagctgatagaattgtattactgtttagccayggaaggtaaacagttttttttaataaatttaaataaaaggaattaatttttttagatcatgaaatgctttattatttggtgtttttgatggatggccactttacatagaaatttgttttttctgcctcagaagcagtatttctgttaaattgcctgttattaattaggctattttttattcaaaaatattaacttttatggaatacctttattttcccctatgaacttgagaaaaatgagtttttattagaggctrtagtataacactaactaaaatgtagtttggaaagttttattgagtttttcttccttaaccttttctttggctggctgcaaacaactagtgataatgtgtttttagatgtgcttattttcacctcttcctcctggaggttaagctagtactcattaaggaaaaaatacagtttatactaaacagtgtttaacatatactgatggtattactgtatttcctgttttgtgttcacaatgagaagattctgaaaaactgtctttgtgtaaatactttactgacataccagacaagtataatcttgtctgctggtaggcaggaaagagtgatgtcctggaatgttgttgagaaggaaatctctttgtgttccacaaatgatacccttaaaccctttaagaatataattttaaaatgacagctctgaatttgcttttccttccgtttattaacttttcatgcgtttaagttcagaaatgcatttagttgggaaaaaaaccattgtgtctgagaaagaagtatctccctggtagtttgtgggaaattattggtagaagtatctcagggtaaacataaaaacagatttaataattgttgctttttgttttcttagtttaaactttttctgatacttgagtcaggcttttggtaattctctacaggcttaaaaaaatgcagcatctccaacaaccatccgaaacatctacccaagaagtaatttggggagattgttgttagaacacaaattttttttaaagttagagttggagtttttaaattttattatttaatgtgagtcattaagacatatgaaaagctgttgtgtagtgttaacattgaatattctagtgaatggatttttatatacttaattattatagctgagagttcacttaaaattatactgatgtttctgttcagtgactgaaaaaaaaatgattatggttaaacccttaaataattgacaaaacagacatcacagactagacctgtgtgtgatttctgggtcagtggttctttttcttcttcttctttagtactcccatcattattacttacagtgattttgtacttcagctctcactctaaaacccagcaaaatggagaattatctgtaagagtctccaaatacaaggtttaaaatgcttgttaataattttcaaactttagaaaagtattatatgctttttttcatcttgaagttcttgcattgttaatgcatgtcatatgttgtatcctttgttaaagtatttgcttaaaaatatgtgggacattatccttcatatagacctgttttcataaatctgctctgatgaattctgaaatatggaggctactgcattttcaattaaaaatcttaaaggsaatactttaagacaaaagagctaagtaattcaaacaagtattaactaatatggtagtttcatggtatcagaaattcagattacttctgtgccatcccttaggccacatggtaaaaagtatctcactgtcacattagttgggttctcattcaggtcaacaagaattaggagataaggtaatagctcatccctgccgtttaagagcataacccataaattgcagctatcatttacatcccattggctaatcttagctacaaggtaatattcagctgcaagagaggctgtaaaataaatatattctctattttgaggggctgggatttaaatttggctttaactcaggggtttcattactaaagagaaaaactaacagtctctgcgattacctgttagcaccatcagctgtcattgtccactccttcctctttgaaacattcctctttgttttacgtgacacagtaatacctaatttttcttctatttctttgtcctccttgactcctttacatatttattctggtctgcctagccacagaatgttgcagtttgtcaaggctgggcacrggacccatcttctctcatccacatccatggcttcagttgtcagctgtgattcagtgcctaattcagctcagatctttgctctgaccgattcaaccatctacttacatgtctcaaaggcacttgcagttcaacatgtttttaaattttgttctaaattatatatataattatataatcttaattttatgaagtaaattctattaccatccttgatcatacacgtgagaaactgaaacacagatggttaagaaacttgaccaacatagctggtaactgttatgtgaggttttttgttgttgttttgtttttgaggtagggtcttactctgttgcccagactgaagagcagtggtgcaatcatagctcattgcaacctcaaactcctgggctcaaaccatcccccacctcagtctcccaagtagcagggactataggtgcaggccacagtkcccagctaatatatatatttttttaatttatgtagatatgaggtctctctatgttgctgaggctggtttcaaactcctggcctcaagcagtcctttcacctcagcttcccaaagtactgagatgacaggcgtgagacacgatgccaggttcagttctrtcagttttgataaatgcatagaattgggtaaccaccaacacaatcacaatgcaaaacaatttatttactccaaaaatttattcttgcagccaccactggtgggatgtcttctttccaccactgacccctggcaactactgatctgtcctgtagttttgcccatttcccaaatgtcatataaatgtaatcatgcmcatgtcatctttgagtataacctcttttatttcacatgttttcgagattcgtctgtgttactgtatcagtagtttgttccttttttattattgggtattattccgctatatagatgcactacagtttgtttatacataataaacaataaaggacattttagattgtttgcagcttttgctatgaagaatgttgcagtacacattcacagactggtttttatgtgaacaaaacttcttatatctaatatgattctaggagtggatttactgaatcatagggtaattaactgtatgcttaattttatataaactgccctattactttccagattgcctgaactatattcccaccaacaatatatgagcattccaggtgccctgcatacttgctagtgcttgttattgtcagtgttttttttttctttagttttaatcattctgttagttatatagtattatcttattgtggttttaatctgcattgctcttattaccagcaatatcaggcatctcttcatttgcttatttgtaatttgaacattttgtttggtgaaatgttttctttggatcaatttttaccctttcaatgggttgttttctttacgtattctggatcaaaatcctttatcgagcatattacaaaccttctcttaatctgtagcttgtcttttctttttattaacactgtagttcacagagcaaaaaattttagttttgaagaagtacaatttccttttttaaaatcaactctttacttatgtataatgtctcctatggggatttttaaaattatttttttattgcggtaaaaaagcacataacataaaagataccatcttaactgtttatttttcttttctatcttagcagtttytaagtttacagtttagtagtattaagtatattcacattgttgcacagcctccaaaactttttcatcatggaaaacagaaaatctgtacccattaaacaactctgcattacctcctccccccagtccctttctactttgtttctatgaatttgactgctctggatacctcatataagtggaattgtgcagtatgtgtcttttgtaactggcttattttaatttagcataacgtcctcaagattattttatgttatataatgtatcagaatttcttttttgaggctgaatattttattatatgtatataccacatcttgttatccattcatctgtagatggacagttaggttgtatccacctcttggctattatgaatagtggtattacaaacatggtgtgtgaatatctatttgagatctgctttcaattttttgatatgtactcagaagtgaaattgctagatcatatagtatttctatttttaatgttttgaataactgccatactattttccacagcagctgcaccattttatattcattccaatagtgggaacaaggttttaaatttctgattcttttcttttttcttttttgatagtatgtatcctaatgggtatgaggcgacatgcattgtgattgtgatctgtacttccctaatgattagtgattttcactatattttcatgtgcttcttggccttttcccccccagatttattgaagtatgattgacaaacaaaaattgcatatctttagagtgtacaacatgatgtttatatacacagacacatatacattgttattaactgtagtcaccaccatgctctacattaggtctttaatacttattcatcttgtggctgagggtttgtatcctttgactaatatcgcacttttcccaacccttaggtcccaaccattctattctctgttaataggagttcagctgttttttagattccacatataagtgagatcatgtagtacttgtctttctgtgtttggcttatttcacttagcgtgatgttttcagagttcatccatgttgtcgcaaatggcaagatttccttcttttttatggctgaattatatttgtgtgtgtgtgtgtgtgtatacatatatgtacattcacaatagccaagctatggaaacaaccagtgttcattgatagaagaatggacaaagaaaacatgatgtgtgtacwtatatatatatatatatatatgtgcatatatatttgcatgtgtacacacacatcacattttctttattcattctctgtcaatggacacaggttgtttccatagcttggctattgtgaataatgcttcaatgaacatggaagtgaaggcatctcttccgcatctcttccgcataatgatttcaatccttttttttttttttttttgagacggagtctcgctctgtcgcccaggctgaagtgcagtggtgcgatcttggctcactgcaagccccgcctcctgggttcacgccattctcctgcctcagcctccccggtagctgggactacaggcgcccaccaccacacccggctaattttttgtagttttagtagagacggggtttcaccgtgttagccaggatggtctcgatctcctgacctcatgatccgcccgcctaggcctcccaaagtgctgggattacaggcgtgagccactgcgcccagccgatttcaatcctttgtgtatacattgccaacctaaatagcaggcagagaggttctccgaagataatgggtttgttcgagactgcatagaggatttgcagttctgggatatgcagcctatggggaccacaggcatatccaaagaggttcaggcaaggggatgcttttaaaggtaaaggagaaaagtagtagtttattttgaaacaatgacaacattggttacggggcttatcacaggagctgacaccagttctttagtggaaactgtgtcaggcaagtgttcttgtgcatctggctagctgtccttgtgactcctgtaacaatctgcagtttagaacgttgtggttacaggcatatgtgcctaagagtccttcatacagtgtctgttatagttcctatcataggcgtgtgcgtgtgtgtgtgtgtgtgtgtgtggcctccctttgtaaactcctagctttatttatatatattttttgtttgagtttgacacaggtgacttcattttgattctgataccttttacaatacccagtagtgggattgctgaatcatatggtcattctgtttttacttttttgggtaacctagacattgttttcttaaatggctatactaatttacaatatcactttatattgttttcttaaatggctttactaatttacagtgtcactaacggtggataaggattccctagttttcacatccttgccaaaacttactgtctttcatctttctgatggccagtctgacagatgtgaggtgacatctcattgtggttttaatttgcatttctcattattagagatattgagcacttgtatttgttggacttttgtgtatcttttgagaaatgtgtattgaagttctttccagtttttaatagggttatgtgttctcttgatattgagtagtttgagttccttgtatattttagatattagctctttattagatgtatgatttgcatatgtttctcccaatctggggtttttctcttcactctattgtttctttggtgtgcagaagctttttagtttaatgcagttccattggtttatttttgctttcattgcctgtgcttttgaggttatatccaagaaatctctgtctgtggagctttttctcttaggttttcttctagtagttttattttcaggtcttctgcttaagtcttcaatttattttgacttgattcatgtataaggggtgagaaaagggtccatttttattctatatgtggatattcagtttgctcgtcatcacttattgtagagactgtcctttccccattgtatgttcttggcatcatcatcaaaaatcaattgactatagacatgtggatttatttctgctctctctgtcctattccattcgttgatgtgtctgttttgatgctaggtatggctttgcagtatattttataatctgtttgtgtgatgcttccagctttgttctttttggtcaagattattttgactattctgggcctttgtgattccatatgaattttaggattttttttttttttttttgcaaaggatcmtaagaaactactatgaacaattatatgtcaacaaatcatrtaacctagaaaaatggatagaaacatttaacataacaaaactgaatcaagagattggaaatctgaacagaccaataattagtaaggagattgactcagtaagtagaagtctgtcatcagtggaaagcccagaaccacatgactttatggctgaattctaccacacgtttaaagaagggctaatactaatcctcctcaaactcttctgaaaaattgaagaggagggaatacctccagactcattttatgaggccagaatcaccctcttaccaaagccagacaaagacattacaaaacaaaactataggccagtattcctgatgatcattgatgtaaaaattctcaacaaaatactagcaaaccatagtcaatagtacattataaggatcatttaccagtagatcaagtgggatttattcctggaatgtagattgcttcaacataagcaaatcaataaatgtgacttaccatattaacagaatgaaggacaaaaactacatgatcatttcaatagatgcagaaaaagcctttaacaacattcagcatcctgtcatgattaaaaatctctttaacaaattaggtacagaaggaatgttcctccacacagtagaggccatatatggcaagtctgcagctaacagcatactcaatactgaagagctaaaggctttttttctaatatcatgaacaatacaagatgcttacctattctcaccatttcttttgaacatagttctggaagtcctagccagagcaattagacaagagaaagaaataaaaggcatcctaataggaaaggatgaagtgaaattatctttgtttgctgactacatgatcttatacagttacacctctgtatctgtgggttctgcatctttggattcaaccaaccacagattgaaaatactcagaaaaaaatggatagttatgcctgctgaatatctacagacttttttcttgtcactcttcatcaaacaatatagtataacaacgtttacatagcatttacatgtattaggtattttaagtaatctagcgatcatttaaagtatatgggataggcataggttatatgcaaatactatgccattttatataaaggacttgagcatccatggagtttagtatcctccaggttgcctggaactaatccctcatagatactgagggacagctatatatagaaaatcctaaggactccacccaaaactgctagaattcataaacccaataaagttgcagggtacaaaatcaacctacacaaaccagtagcattttgttttacactaacaacaaactgtctgaaaaaaattaagaaaacaatctcatttacaatagtatgaaaaaataagtaaaacaattagtaaacaaggaagtaaaagatttgtaatttccaaatatttggaaatttttcagtaactcagtgtctttaactaataatttaatcattctagtaagaaaacatgctttgtatgattttagtctttacatttattaatttatgtaaattaatatgtgggttttatgatcacccacgacattgtcctaacttgtcgactgttctgtgtgctcttttaaagaaggtagtctgttggccgggtgcggtggcttacgcctataatcccagcactttgggaggctgaggcaggcagatcacctgaggtcgggagttttagaccagccgaaccaacatggagaaacccggtctctactaaaaatacaaaattaggccaggtgcggtggctcacccctataatcccagcactttgggaggcctagacgggcggatcacgaggtcaggagatcgagaccatcctggctaacatggtaaaaccccgtctctactaaaaaaaaaaatacaaaaaaattagctggggtggtggcaggcgcctgtagtcccagctacctgggaggctgaggcaggagaatggcgtgaacacgagaggtrgagcttgcagtgagccgagatcgcaccactgcactccagcctgggcaacaaaagcaaaattccgtctcaaaaaaaaaawatatatattagctgggcgtggtggcacattcctgtaatcctcgctacttgggagactgaggcagaagaatcgcttgaacccaggaggcagaggttgcagtgagccgagatcatgccattacactccagcctgggcaacaaaagtgaaactccatctcaaaaaaaaaaaaaaagaaaaaaagagaatgtagtctgttgttgggtgcagtgttttatagaggtcatttagtcagtggtccccaacctttttggcaccagggaccagttttgtgaaagacaatttttccacaggtgtggggcgggggttggtttcgggatgaaactatttcacttcagatcaggcattagattctcataaggagcacacaacgtagataccttgcacgcacaattcacagtagggttcacacttctatgagtgcgcatctaacggtgcggctgatcaggcagtaatgcttgcttgcttgtctgctgctcaccttctgctgtgcagaccagttcttaataggctgcaatctggtactgatccacaacccgggggttgatgacccctgatttaggtcactttggttgattatgctgctattcatgtatttgatattcttgaagaatttctatttggtctattcttttggttcctgagagagaaatgatgaagtctccaagtgtaattgtggatttctctatttctcctttcattttcttcagctttgcttcatctgtgttgaagctctattcttagatgcattcacatttatcaattgttgcaccctctacatctcttggtaatttttgtattctgacatctaacttcctcagattttaacacaatcaatccacttttcttttgctggtgatcacgtggtctcattttacattcttttaacatgtatgtattattttattacagttgactttcatatagatagcattcaatttgtatcttgtttgctgtacagtcttaatcaggtttcttaaagttgtgtttataccatttagtataaatttccatatgtttgggtttatgtctgtgactttattgtttgctgtttgcttccgtttttcattcttcggttttcctttttctgccttcttttgaattattggaatattttttattactttaattcatttactggcattttaaaatttctttgttttgtgtgttgctctagcaattacaatattcacatctaagttttcacagtctacttagagttaatattttatcacttgaagtttctatacattagtatagaacccttacaatgatctaggtcaagaagatagggaaaatggatatttgatgacagctgggtgtctgccacaaaggacaacattaagttgccttttagcccacacttctcttaatcttttctgtactgcttgttatgcatcctttaattatttgttttattctatattaatttcagcctatagtgtgcaattatatggaaaataacgttatgtccatgcctcctttcttgggatatttcctaaattcagtatgagattgttgatatagataagaaaactgacttgcaaagagatttcattgccccaggtaacacagctaagtggsagagctgcaatttgtactctgagtctggttttggggtctgcacatttgaccacaatgctactgcctgtattttacttaagataatagttatgtttatgacaaacctctaagtatgtatgacttctaaatttacacattctttgagtgttctaatttcattgtcataaaagcttactattttctcatttttaagacatatttcatacttcttaagatagctcttaaatktattccagaaactttaaacatttttgatattgttgaactagttttggaatcaaaacaatttgtgattcccacataattgcagttaaattttttcagtgtaattttaaaaataccttatgggaaaatactactgcaagttgtgtaacactttaattatctattttttgtaatcataacagcgtacacttaacatttggaaaaaaaataaatatattcaaaatatactttttcatttttttaaggtaatatttggtatttataggtcttcaagcccaggagcctacaaccgacagactgggaaccatactttatactattagtgaataataataacaaaaataagatttacattttttcttaggataccagagttgaataaattcaaatttagaaacacatatacatgtatatgtataaaatatatgtatatcaaagaactagaatttttaatcagactcaaaccttaccagtgaaatgggaatactctttacattatccacctaaaatgttcctattaaccatgtggttttaagaggtatttaaattttggaatttttaatagctatctgtttcttctgtaactttgattatattatagcttttcttgaatgaggagataaaacagatgtaaatattaagacaaaagcttgatgcctatgaaacaaattatttccaagtacatagagtgaaaatactttaaaagcctttgaatttggcaactttctctttgcattccctttcctgattctgtagcaatcactgtcttgttcttaatgaactggtactcaaaggtcattcagaaagattcattaaaaccagtagggaaataattctacagacttcctttaaccaacctgtagttttgttttctttcttaatagcctcaggtctcagacacaaccatcttttatttattttttctttctttctggaatcaaataacttttaaagatttgagaaaatcagcaccaatatttgaagattaaaacttgatccatctgtcagttagaattttgatttggaaaagccrcaggtaacagtgtaaattctagttttacaaatgtagtaataaagaatatacttcagtggcaatttaaacttcatattagtgaattaagatactcagtaagtttcagggtattagattgataaagcaatacctggattaatgactagtcattatgaggtgtacttttatctttcatttaagtcaaaacttatgttgcattacatgctttacaaaaattgccacattattacrttatggtttggccataaataggagcaattttgggaaccatttattttgtgaatggttactgattttctgaatcattcaagttctacattctattaaattttataagcctattatttaatatgagctttttctgttttcagactgatacccattatttttcagtcatagcagagaaataggtttccaggataaaacaaattgttcaggtattcaagcagccctcaggagtaggcaaatatcaacagataggtcactgagagatcaagggatttactcttttctttggtataccatagttcttgaaggctaaaattttggtaactgtttcaggaaaataaatactgtactatatttcgtttctttccttcaatcctgwtatgtaaagtaaacaaacctgttttcagaatatctaacctttagttgagtaaatgacaggtaggaaataaagctgttgatacrggagaatgagtaagtgaaaaaatccatcctttgtcaaccactcttattttttaaattgaatctgctttcagtttcagtagttgggagtgctagatgtacatagcttaatggatttggtgcttaaaattctggttttcttcttttacttacattccaacatcacaatagaaaataatgcaaatagccttctaaatgattgatatatgatgatatgttaggcttatttattgagtcaatgcttcacacctgttctgtgtcacaacacctcccttagaggataaggttttttttttttttwaaaaagcgattctttcttgtaatgccacaggcattataaatctctcaattgaaaaatactgaattaaatttgcttcttatttaaaactacttaagggtaaccctttgtatacttgttttttaaagttgattgcttattatcacattgctctatgtgtattcccattttttaaactttgacaagatactaatttttatattcatggtaataataatcttaacattatataacattttcacaatatggagtttactgaaaacaaatctaaaattttacatttaagttcactaaagtaacacttgtaggatgagaaagattttacttgtttggtggtacatggaaatttgaccccacatggaacaaaagttaacattgtcatgaaactactaaaaaaaatgctcgtgtcattttagcctacattaattatagcatctagattgcataactaataacttcatagtattctgtcctggtgagatgacatctagaatataacacacaattttgagatttcatgatttgcaactaattttggacataacaggcaaggtccacagcatatttttaccatggataatagaatgtaaaatagttactgttttcatgtgtttaaaagtctgttctctagaaaagacatgattttaaaagaaagtttctagcaaaacaaaaagaataactttgtggtgaattggaatttttcactaggggacttgcttgttctggtaggcattgatctcccagttgttctgggtgcttttaaaaattatattacatttctgctgcattgactaggaagttaaaattagccaggcatggtggcgtgggcctgtagtcccagctactcaggagactgaggcagaagaatcgcttgaacccagaggcggaggttgcagtgagccaaaattgccccactgcactctccagtctgggtgacagagcgagactcggtctcaaaaacaaaacaaaacaaacaaacaaaaaaacagtgttactctatagtgtactgtgttgccagatttgttttgcccacctgtaggctaatgtaagtattctgagcatgtttaagttaggctgggctaagctatgatgttcagtagggtaggtatgttaaatatttttttgatttaatattttgagcttgatgggtttatcagaatggaactccgttgtaagtagaggctcgatctgcatctttggagaaacgtctatgcaagttttttgcccacttttgagctgggttgtttgttttttgtttgttgttgttgggttttaggtattccctatatattctggatattaatcccttatcagatagatgatttgcaaacattttctttcattctgtgggttgcctttttactcacttgccacttttttgtagcaaacgtgacccctcctaaaaggggggatatatgtattttaagaccattccttggcagtattgtccttagagctttaggttgactatttgaattcgtatggtctttgactcatctcatcatctaaaactccttgatgttttcctcctttctttaatgttatatagacacaactgggacagctgacagtgaatataggttatatttttgcgaagaatttagcaagagaggttggctgtttggcattaaatatctgtatcactgtgaagtttttaattgtttttggatactaattatcactgaacatgacctagaacaataccttattacatagagttactcatttgtcaaatgtaggaatgaatgtatgtatgcatgcatgtaagtacacatgcatatagccttggtagttactacagtgctatcatagatgtaaagtctttcacaggcctgggtagacagcagtcatgttttattcatggcctagtctagcatggttcctggtactcttaagttttggtgaatgttcgtcatataaataaatatatttaatttagaaagcatcagaaaaactaacatttggataaagcagatataattttgtattatatatgtgagtaattttctttcatctttaaattgtcatatttccaaggaatctattcattgttgatttcatgtccctcttaaacaacttgagatacgttaactttggtaatctgtcatagacttcacttcattctgtggcctttaatttaagagaatggtagttctttagatgctctctcagggttaatctcccaacagctggaaaaccaagaatggctgtgaaaagtacttctttacctaatacaggattgcataactacttgcttttcccttaaaaataatctgcagtatacatggatcttaaaataggaatgataactcttttgtagaaatattaggggatcagaagagataatttatacgaatcatttggcttacaatttgttgtaaagtgaggccttgagacgcaatagctattacagggtgagcattctaagttggaaaattcaagacctgaaatgctccaaaatttgaaacttttgagttctaacataatgcttgaaggaaatgctcattggagcatttaggattttggattttaaggtttgggatgctcaaccctaaaccagtaagtatgtataatgcaaatattacaaaatccaaaaaaaatctgaaatctgaaacactctggtcccaagcaattcagataaggggtattcaccctgtattattagtttttccagaaaaaaaaaaraaagattatcaaagatacacacccgactttagcactaaaatttttaagttgttgtaccttcaattgctttatttttccctttcaattctaatgttaaaaaatgtaatcctgttttacaaaatatttcagcaagttttcagcagtcgtcgctattacattaactataaataatcttttgggagacctatcaacatctactttctctttcacaatttgataattaacgtatatcacatctgtgcctttctttctagggatttccaagatctgatggaatttgcaatggttgatgtatatatggctcttatccattgtcagtaacccaccttcttatgagcttttccaattttcgggcaaataactaagtacagtatttgtgctgatataggtacaagagtttaaagaaggcatgacttaagtgttactaagaggaaataaggagaaattatgttaataaattggcattatatactaataaagttagtctccaatctgtggaaacatgaagaatagaatgtaatgctttgcatttctcggtggatgaatgattttaaaatttcatacatgggggagaaaataaaaatactcctgaacccaaagcttgacttcattcagggatatgcataaacttctctctctttttttttttttttcctttaacctgaaaggacatttagaaagctaaatctatttttccttcttttcagtcagaaagtcaggcctcaccagcaacagactactggtgttttgtaagggctatataatgttttcatcgtaatgctatataatgttttcatctttgtattcgttagcccagactttttgtttagtactaggaagtatttccacagatgttgagtgagtggataaatgaattaacttgtgtggtatacctggggaaaaggcagtaaatgggtagaaaaactcaagaataatctacacctatggggttgacaacttttccagttgctctaggaattactgtaatcattttctttctgttatactgccttatagatctgatggaaattttgaaaagagygtgttctcattgtttagctctatatatctgttggcttcatttgcttttaatatttttttctaatagatacctttctggcttgcacagcaaagttcaattaatgtaaggataaaatgtaaattatctaattcagcttatttacatgctgtaagtaatatagtaatgctaactgggctttccttggcttttgtttcattgtgatctgagctcagattatagtttgatctgctatgcrctgacctgggtgccagatgcaagggaagccagtaaataatactataaagagagatgctagctttagttttgaaaggacgatgacttgtaagtgagactgttgtaaaccacacagtaattaaaaagctccataattaaaagggatatttcctttctttaacctgtcttaaatgttagatatgattaaaagcaaaagcatttctctcaataaagttgggggaaaagtacttgtttttatagtcagtttttgaaacataggaaaagtgacctcaaagaacctgtgttgtaaaattttcagagtcataggaacttgaactttgtttcttgattacttgatgaaattggtcatactagtttatgaatagttctgaatggccttgtagtcttctgttggttttggtttcatctttcagtagatggacctgtggaaaagtggaactggctttgaaaatgtactggaagcarttattttcctaagacaataattttttttctcttttccattttctttagaacatacaggctagaagatccactcagcatttaatgcatatgactttacattgctgtttatctttttgtttatcccgaaattggaagcttctaaaaggcagagattcactctcttcctgtggtggttctagaggctgtgccttgcatagagttaatttttaaaaaataattaataattatttttcttaccatttctattactcatttttcaatttggagaataattttacctggccacactgatggaacttgcatacatgggccagctcttttactcagttgcccaatttttgaatgaaactgaaaactgtggacagatacatcagggaagaggaacatacagagtaaaagacataaaagccttaaagttgcttcagtttcttcatttcatcttgtaaattacacaggagtccttcagataaaactcactggttatatgacaaattaagcaattagattactgcacacctaataatagtagcaaataatgcactttcaatctgctaatatgttaagcacttttcattatctcttccttttacatraggggaatctgaagtttagggaatttaaaacttccacaaagttagtagtcagtagtttatatactagtattaaatctgtttaaatccaaagccggtgacattaacagtttccaaacgataataacaaaagtgaaaaatgttagtatcattccttgagaattcactacataaaattctcttccaaatatttactcattttatagattaggaaactgatccccaatgaggtatatccttttggtatattggttaaagaataatatrtctacttgagagtggcatcctaattactgaaaactggactacgaacttttaaagtttaattaacagtaatttaatgtatttttatgttatttcttaatctttggattattttttctttttggaggttgtgtatactctgaatacttatagcagtacttcagaacaatttagaacatatttgtacttctaatgcaaatttaatgtctagaatcctgttaacacatgtgataaatgccaacagaaagagattgatttgctgtcatgaattagactgacagatttctcaacaacactagatgcaagaggccactaaataggaaactaactttgaacctaagattttatccaactaacttatttaaatatgagggagaagtaaggatatttgctcatatacaagatctcagaaaacttactgtaccaacactatttctgaaaagcaccaggcaagaaaagtatgtccagaaggaactagtgagatatagttagtaaaaggaaataaagaacccaagaaagggtatagttttatagccacacaatggggagaaaaacggaaaagaaggggaagaaaagaaataagagccaagtaatttgttggcttagaattaaaactccaggtaatattagtctttcagcagttatggggacaagatgggtaaggaagtcagttagagatcagagtaggtgaaaattttgaggttcttgtattcatcagggaaagtatttatgaactttagacactaacagtgaaaaatatgcatagttatgaaactcaaaattaagctctctgtttaataatagacatcagagataacatgaacagatactgataaattgagaaaagagcttcagtaccaaaygaaacaaagaacacagatttccaggtgcttttttatctgatcatgttgcagcaccattggaaccattgtgtcactttaaccaagcctccaatatttttattctttcagatcacaaggggtggatgccaaacctctcatttttttcctcatgattacactacaaggcaaagcgcacagggtttgagttcgttgcagttgctagggacatacacctagggactgactactagggcaacctatgctgtcatgtcacattgttcataagtcttccgtsagcaaagatctgtcccaacaaatgccccatactcctttcacttccaagttattttctatcctaaacaatttttccttcctttatactggaaactccaagatctataacattttatsataaacttgatcttattttatattatatatttgtgttcccatttcactcttctgttatcttactctaacacttaaatgctgtatgatcaaagttaactaatttcttaaatttaatgaatctctttaaaccaggagatgtcatgtcttggttgtgcatggtatacataggaatgatagtttaaggaaacccatttctagatctttagtgcctaaaactgatctgcttgagaattcacttgtgatgggggtggaagtttctcttctccaaactcctctttacctctgaagcatcaaacaagtgggcagtgggaaatacaggtattacgtttgagagaatagatggcactaaagccatctattattaaactggtactcagtaccagtttactgagtgtggtctgaagatcataataattaccatttgcctttttcattcttattttctcagtagttacaattaaaaaagattttcagttgttatctgtcatcattcctgatatataatatagacagatttcaaatacttgaggaatatgattagaacagaattacttctcgcttatttgtatgaacaaggtttctctgtactttattccacaaattttttttagaaattgaaatagaatctaaaaaattgaattgtagcaataagtaatagtttacaatgtctataaaaattcactggggagggagactaataagaggattccagctgtctcattaagaaacgaactttctataaccttaatgtttaattatattttccaaaaatcattaatacatttatgtaattgtacatgaatcattgtaatgctcattcaatccagaagaaacgtaatacttagaaccttatgttcatatgagtgaacaytttttaaaatttcaaaatatgtgcatatttttctaagaattattacaagatgatcagagaaagaaggaaattctattgggatagtagagtagaagtacaaattcaaggagaaaaaaagagcagtgtaaaatttctcaaagatatcttttaaatagatggtagtgttaaatcactgtatatttaaatctgttgaatatgttgaaagagttgatgtaaaggtcttattttaaaatctcaatatttacaaaactctggaaattacatcctttaccactatttaaacatgggtacatgtgagaaggcaaaaatctcaattttcttttttaagtatacatacagttcctttttagcactaagagctacgtgtgcataatgattgagaccagaactccacattttgttgaaaagtggggagtgagggggagagagagaaatgcttttaaaattaaacaatgaaacttttccggggagtagtgaagagtgggtggttataaaatgacttggaagcagatcagctggaaaggtgaaagaatcagaaagcaaatatagcagtggataatggagttgatctgtagctagcctatagcaactgcctttactatattttaatatgtgccattaagtgtgtctcttgattgcttctgctttctgccagtatggcttactgttgtaactagagttagttagctggcccactgataccaccaccagagccttttctaatctattatagatttctaacgtgggataggaggccaacaatgtttctttgattacaaataggaggtacataccttgccaaaaatttgcaacatgatagaattgaagtcagtacagaacacacacacactctatttttttttttttttttgagacagagtctcgctctgtcgaccaggctggagtgcagtggcacgatcttggctcactgcaacctctgtctcccgggctcaagcaattctcttgcctcagcctcccgagtagctgggattacaggcaggtgccaccatgcccggctaatttttgtatttttagtagagacaaggtttcaccatgttggccaggctggtctcgaattcctgacctcaggtaatccgcctgcctcggcctcccaaagtgctgggattataggcgtgagccacggcgcctggcacacacacactgtttttataccactgttactttacagtttgcccaagttatgacagagatggcacttatacttagtaaataaatttgataagttacaggcttacaaatggagaaatcaagaatcaggtgactaaagtgagatggagataaaactagataagatgagtctttgctgcaacacttgacaaaatcctgggagaaaggataaaaccatctaattcataaaatttataataggccaatggactggaaagaaaaagaaatacaggaaagatactgtggaagagaaattacagaaaaaggtgaggaaaaagttaatgtctggggatgggaataaaatgagaaatggggtttagctgtctataataaaacaaatagaaaatgaagaccraagctttttctctgcttcgatttgtacttttcaatttcataatatgtttgtctaaatcagtgattatcaaaagggctctaaggtgtgcatctgagaattatgcatgtacatcagaatatgcaaatgttctcttttcttcataagattctggtacaacttaatgatcttaaaaaatgcttacccaatcccacctcacataggcacacacaaaaaccactggatatttagatggaactgtgctgttcatttcaatggtgttgaagcctaactaatgtgattttcatcatgtagcaaacatttaaaacttttgaatttcctaagcattattttaggaaatagcttttttttttggtcagagtctcactctgtcgcccagtttggagtgcaatgacatgatctctgctcactgcaacctccgtctcctaggatcaagcaattcttctgcctcagcctcccaagttagctgggactacaggcacacgcctgtagttcaacatatgcaaatcaataaacataatacatcacataaacagaaccaatgacaaaaaccacatgattatctcagtagatacagaaaaggcctccgataaagctcaacacccctttatgctaaaaatactcaataaactaggtattgatggaacatatctcaaaataataagagctattcatgacaaacccacagccagtatcatactgaataggcaaaagctggaagcattccctttgaaaactggcacaagamaaggatgccctctctcaccactcctgttcaacatagtaytggaagttctggccagggcaatcaggcaagagaaagaaataaagcgtatttaaataggaagagaggaagtcaaattgtctctgtttgcagatgacatgattgtatatttagaaaaccccatcatctcagcccaaaaactccttaagctgataagcaacttcagcaaagtcccaggatacaaaatcaatgtgcaaagatcacaagcattcctatacaccaataataaacagagagccaaatcatcagtgaactcccattcacaattgctaaaaagagaatacctaggaatccaacttacaagggatgtgaaggacctctttaaggagaactacaaacsactgctcaaggaaataagataggacacaaacaaatgaaaaaatatcccatgtgctcatggatatgaagaatcaatatcatgaaagtggccatactgcccaaagtaatttgtagattcaatgctattcccatcaagctaccattgacttccttcacagaattagaagaaactactttaagtttcatatggaaccaaaaaatagcccatatagccaagacaatcctaagcaaaaagaacaaagctggagacgtcacactacctgacttcaaactatactgcaaggctacagtaaccaaagcagcatggtactggtaccaaaacagatatatagaccaatgaaacagaacagaggcctcagaaataacaccacacatctacaatcacctgatctttgacaaacctgacaaaaacaagcaatggggaaaggattccctgtttagtaaatggtgttggaaaaactggctagctatatgcagaaaaaatgaaactggactccttccttacaccttatacaaaaattaactcaagatggattaaagacttaaacataagacctaaaaccataaagaccctagaagaaaacctaggcattaccgttcaggaagtaggcatgggcaaagacttcatgactaaaacaccaaaagcaaaggcaccaaaagccaaaattgacaaatgggatctaattaaactaaagagcttctgcacagcaaaagaactatcatcagagtgaacaggcaacctacagagtgggagaaaatttttacagtctatgcatcttacaaaggcctaatatccagaatctacaaagaacttaaacaaatttacaagaaaaaaacaaacattcccatcaaaaagtgggtgaaaaagtgggcgaaggatatcaacagacactcctcaaagaaagacgtttatgcaaccaacaaacataagaaaaaaaggtcatcactggtcatkagagaaatgcaaatcaaaaccacaatgagataccatctctcaccagttagaatggtgatcattaaaaagtccagaaacaacagatgctggagaggatgtggagaaataggaaygcttttacactgttggtgggagtataaattagttcaaccattgtggaagacagtgtggcgattcctcaaggayctagaaacagaaagaccatttgacctagcaattccattactgggtatatacccaaatgattatgaatcattctataaagacacatgcacacgtatgtttattgcagcactattcacaatagtaaaaacttggaaccaacccatatgcccatsaatgatagactgaaataaagaaaatgtggcacatatacaccatgaaatactatgcagccataaaaaagaatgagttcatgtcctttgtagggacatggttgaaactggaaaccatcattcccagcaaactaacacaggaacagaaaaccaaacacctcacattctcattcataagtgggagttgaacaatgagaacacatggacacagggaggggaacataacacactggggcctgtygggggatgggggtgggaaaggggagggataacattaggagaaatacctmatgtaaatgatgggctgatgggtgcagcaaacccaccatggcacatgtatacctatgtaacaaacctgcacacctatgtaacaaacctgcacattctgcacacgtatcccagaacttaaagtataataataagmaaagataattagaagacaagctacaggctgggggagaatatttgcaaaagacacatctgataaaggactgttatccaaaatacacaaagagcttttgaaattcaacaataagaaatctaacaactggatttaaaaatgggtgaaagaccttaacagacacctcaccaaagaagatatccacatatcaaataagcatatgaaaagataatctacattatacatcaaaagagaaatgcaaattaaaacgagacatcactacacacttgttagaatggtcaaattccagaacactgacaacaccaaattctggcaaggatgtggagcatcaagaactttcattcactgctggtgggactataaaatggtacagccactttggaagacagttggatagtttaaaaaactaaacactcttaccacatgatccaacagttgcgctccttggtacttaccaaaaggagttgaaaacatgtccacacaaaaacctgcatacaatgtttataggagctttattcataattgccaaaagttggaagcaagggatagctgacatctgatggataaaataataaatagaagagaaacttgggagactgagatttctttaacagcggttataatagctaacatttattgaatacttaagtggcatgcagtgtcttgaatgcttatgttaaattatatatcttcccaatarcaaccacatgtatctgattatcaaagaattttcctcttgattacttttgtcattcagatatttattaattcttccattatctcagtgggcaattgagtcatgtcctagcttcctcttttaggtggaaacttgacaggcctagaatgtccacagtggctcacctatrtgtctggcttatctgggactttctcctgtagcaccttcgaactcttccacatggcctttctacagcatgggcttctcacagcatggcagccgagttccaaggcagaacatttcaagccttggaaaggaaaagctgcagatcyctgaaggctcactctgaatttatactatgtcactttgccaattctcttgtcctttgttttgatagagcatctcacagggctagcccaaatttcatgtagattcaacctcttgatgggtagagaagaaaactttttgtacccattttttttcttcgacatttattttaagttccaggggacatgtgcaggatgtgcagatttgttacataggtaaacgtgtttgcacccgtctttaacccactacagatattatgatagtttcctgtgttgttattattactgtaaaattatatttataagggttaactgccttttttacttgtaataacatgaacataaaaaataccaatgcaacatgtaaaggtagctccaaaaattagtaagcacaaagaaaatcaagcaaaataagcacaataaaaccacagtagggcatatcctaatgaaactgttgaaaaccagtgataaaaagaaaactttaaaagcagtcaaatggaaaaagaaaaaacaaacccacacattaaatacaaaggaaaaaaagtaataattgtcattaacttcttggcagaaacagtgcaaaccaggaggcagtggaatgctgtctttaragttcttaaagaaaaaactgttaatctagaattccctttcaagcaaaaatatcccttaacatatgaaagtgtagtaaagacatttgtctttcaaagacttytgaaagacaaaattatcggacaaattaaacttgtgagaatttcttgttagccaacttgaacaacaccatgagaaatgataccaagttcttgaggctggaggaaaatgaagcagatgggaacctgaatccattcactagatggaagcttgaaagaaatggaggagagggttagacaatgtgaagatttgaataaaaataagggagcttttttttttctcattttccagtttatttaaagatactttactgtttaatgttaaaaccgatattatagagttctgtaatattcatcaaagtatatacatgacaatattgccacagatgacaagagaaaggaaaatggaaacatatccttataagctcttaaagtgataaaataatatttgtagacaggtcaacagtttaaagtagcagagtacagcatctagctcccaagacaattgactgcacatctaaggtgatactgccctatacaggctaccaaaagtgtatgataagtgtccatagtgagattttaagagtaaaaactgtctgaatttaaggattaaaaactaaaaaaatagaaacagttgaatttttgaaacagtgaatattcaaccaatcctagctttgtcagttagtagctgtgtaaccacagcacttaaatttctttggaccttaatttccaaaaggagatcattgatatcaactctataaggaaggttatgggatggattagagaaaaaaatatattaagagaaaagcatagtgcctagtgcttgacatatatataagaaatttaacaaatgtaacacgtattgttaaagaaatttaaaaggtcaaagttagttactttggagacctcagtaaaggtgaggaagcaatacaacagatgattttgacaaacattagaaaatctgaatctcttgccaacatttttttctgtccacttctgcccctgcctgcttccctctttccctcttttcttccctccctctctgcccctcctccttattgttctcttgatctgtgaacattctcttgaatgtttctttcctgttgagtatctatccctatttctgtttatttgtttgtttatttatttagacacagagtctcactctcgcccaggctggagtacagtggcatgatcatggctcactgcagcctcgaactcctgggttcaagcagttctctcacttcagcctcccgagtagcgtggactacaggtgcacaccaccagacctggctaagttttatatttttatagagacaaagttttgccatgttgtccaggctggtcttgaatgcctgagctcaagccttcctcccaccttgaccagtgctagggttacaagcataagccactgcacccagtcttatccctattatgtaattttttttctcctttcttctcattgtctttttttccctgtcttcttttcctccacattccttcttgctagtcaaaatagtgaacagagttacattttttagtatatgcaattggccttgtgtatcttttgcttttgcatctacagtttcaaccaactatgaattgaaaatatttggggtcggggaacaaaaattaacaatacagcattttcaaaatttaaattgttaaaaaaatagtataactatctgtagcatttacattgtattaggtattataagtaatctagaaatgatttaaagtatacaagaggatgtgcgtaggtcataatcaagtagataccattttatataagagacttraacatcctcagattttggtatctgcaggargtcctggaaccaatccctcatgaataccagagaatagtattttattttttgagcaactaaaatgttgtttttctgttagttttaaagcatagtttgattttgttttaaacaaaagttcatcttggtacctgtattagtccgttcttgcactgctctaaagaaatgcctaaaattgggtaatttataagaaaagagattgaattggctcatggttctgcaggctgtacaggaagcatggcagcttctacctctgaggaggcctcagggagcttttacttacggtagaaggcagagtgggaacagatattataaatgttaaactcgtgtatgtaatttaaagggactaacacccaggatatggctagaccttaagttaggactctcagctacatggctgtgtttagtttgcaagtttatctcttcatcatagttccttcaagtatgcttgtcatttctgttttgaacagaaaaaaaaaatggagcaaaatcttgaagttgtaatatrgaagtttgaaccaggggtagaatactgaaacaaacatgttaaaagatggggtctaggcttcacattacgtacgtaacccttcaagggcctattctctatgctgtagcttttcaattaatgtcaataatagaattcttagtacaaaattcctagatacctagtcaccatttttaaacattagcttgtcaggaaaatgtgccaaaaagttccaaaacatgaaattacaaataaaaacttagaaaataatccctttagcaattgggaactgcctcagtacctactcagattggaaaccctcaacttggtcatgttttttatcaccaagacagctggtattgtttacaacatatgtctgagtattatttttaagtttctaattgccagtatctccagtttttaaaaggacacaaaccaacctctttgtaaaacttctgccctccaaaggctttatgttctctaagatagttaagaagattaaaaaaaaaaaaaaagaaaaamaaagaaactcctgttcttaatgatcccatgckgatagtttttttttggataaagtgtaggctgctgttcatagagatgccaagtacatatgaaaggagggactcatatggaaggtgaacttattaccagaaatcctaacctgcaggtagggtttctttcttcctcaaaataaaaattaacccatggggtgagacgcaaatttggcaacaacactgaatgatctctctacaagcttttttttttcttttttgagacagagtcttgctctgttgctcaggctggagtgcagtggtgcaatcttggctcactgcaacctccacctcccaggttcaagcaattctcctgtctcagcctcccgagtagctgggattacaggtgcctgccaccacgcccagctaatttttgtattttttttttttaagtagagacagggtttcaccatgttggccaagctggtcttgaactctcaacctcaagtgatccacccaccttggcctcccgaagtgctgggattactggtgtgagccaccgcacccagcctctacaagcttttattcatcataaccatacacatttattgttgcataccataagaagcrtaaagctttaaaagccttttctggactaggccacctctaccccctactttgtatggtttacattggtttctatgtgaatcatttgattattgcattcatgttttatctcccaaatactgctagctcccttaggatgaggttattgttttatataaaagatccctttcaaaaaagtagtctcaaaaaaagattgtaactcttgatttacatagcaaagtattaattaacagcatcttccaagatcagacgagattgagcgtgttcggggtggtatggcagtagacaagtaacagcatcttaattagttcacgtaaaacaaatctctagccacattcactccaactttcaatatcacaaaatgtgtggtatttcctaaaaacatagctttctatgtcatcatcaagtgaaagtaaatacctcccccctctataaaagaacaaaacctattcaacttaaataatgaaatatgttattgttaaaagaatcctagagtcacagaaactggatactgaaaaggaagtttgaactaagtcgatagcattgggagtgggtgtaaagagtggctaggaatgacatcttccttgttccccatacgcacatataccactctattttgccagatacaccaggcagctttttcaaatacacacacacacacccacctttacaccttaacctctcactgtggcattactagggtagtgagcctctgtgaatgatgaaagtgagtagtgtctttggtgtgttgagccaaaaaatagattgaaatcactgacaataccaatcctcatttgacacatatgaccattacagctttgagaagataaaatgacttgttccaaattacttttggcagagaaaataacctgaatctcaggtcaagttgtgctctatttcttytgtacatttaaaagtgtggggatcctcttggaattagcctgtgaaatgtatttgcattgaaaggtcaatctcaggaatttcagagcaaaggttttgtttgtatgtatgggtgaaaggacacttacagttttagtatcaatgcaatttgatataaactcattagaaagtctaagtttactaagctatgtattaatttaaataggtataacaatagtagagatgaataaaacatcacttcagtatttcatctctcttcatcttgacaagtgaagttcaggtgtggtaatatctattatgtaggggctccccaaagaacttcgggtcaagaaatacagagtacataggcagtatataaacatacttattattgcatctagtctatggaaaaaaaatacagaaagaacatttgagcacaataaatctcccctaaagagagttattacttgctgcaacctgtctgcagcagtcagaggaaggaagtcagcaagaaagggaaagaatgccaggttgcaaataccaaacggtcccatcatttgcaattcaagactaagagcagattcctaaaactcaaagttcaaattcagctgctaaaattacaatggtctcctagattttagaatcaatttttctaccagtaaaggtgatcttaatctaaaatattaatagcgaaaaccacagaggatatgtggtaaaagagactgcagaaattatgtctaaccttcttattttcagatgaggttaacatggattagagagtgtttatttgactcctagtccagtgttctgtccattacattttgttaggaagaattataattctaacaaattacttccaaatgccaggtaaatcaggcccgattaaaagtatgtcttttatagctgttaaatggttctgaaaaactaattctgaaggatttatagataatttattatttcrttttcttttgtaaaagttttggcaagtttttaatctgatattatgatgcttttggaagctaacagatgttgctctgaaagtcatatttctcacttaattacagttttaataaagcagcctgggtaatgttagttgggggagtatttaggacacataggagccaagtcagatagaagtcatagaagtgttgcagtcaagaggcgtttgattataaggtgcatcattactttgtagactactaagaaagaaaatgcagccaattaaactatgatatgcattgtctctgatttctgcatttaaaaaatgaagaaatatgtttcctatagtcattgaaatayagtaagtcgttggttaggaaaggtaaggacctttctaaaggggaagaagcagagtagaggtgagagtgcatagcatgtagagcctgggttacaggctcctctgggaagcagtgggatattaactggaaggctgcaggacctaggaccgggaggtgcaggaagtgaggacagtgcccagacctaagccaattgtcctgagtctcctggttccatttagttagtgaacaggataatgtatcagaatcaatcttaacaatttaagtgggagagcagcattcaaaatcttgagactctcctagaatttagaagagaaatgaagtgattaaatgccagccaaaagcatttcagctttattttttaggcaacagtgggcctctgaaaagcaatgaaataaacaagtttttagaatatgaatctaacatgggtgtgaataattatggtctgccaaaaatcttgtctttttgttgttgttgttgttgttgttgttcagagactccttctagagtaacaatattggtgtgatgactagccttttttctttctattttaccaagttgtgctacttctctgagaaaaatccaagttttacacttaatagtaaagaagccagtggttatttatatgagatttttacccaccctaaccttagactcagtgccacaacacagcatgctaaattaggttacatccttaaaaaataataataataattcacttkgggtggagtacagacctgcccgtagccatcagttttactgcaggcaaaataaagacacacctcttcctgaaaacacagacaacacaaattactgtggccagcttcttatattataatttttacatcagctcatccctaactgctaatcacctaatactacaatgtaaacactgccccttccaaagaccaggcttcctttggtggtattctgtgataacctgtcattctgtagtatccttgacatgtctccctcttacaagattctctcatctctgcctgtgttttatcacctctgtcctatcactgtgaacaagaaaatgccttcctatttgtcccttgctaaattcctactcatcttttaagaatcagaccttccgaccacctccagcaggagtttgggcttctatgcatagagcagttacctctttctttttcttttgttttttttaaatacaagtagtatccccttatctgcagcggatacattccaagacccccagtggatgtctgaaaccatgggttatattaactgctatatataggtttttttcttatacatacatacctatgatgacatttaatttataaattaggcatggttagagattaacagcaataattaataataaagtagaacaattataacaatatgctataataaaagttatgtaaatgtgttctctgtctctctcaaaatttcttattgtactatactcaccgattttcagactgaggttgaccttgggcagctgaaactgcggaaagagaaactgagtctaggatgactttctrtctcaattcttgcattgtattgtacactccttaaggataaaagccatgtttcttcagaatcttatcccaaaaacttagcagagtgcctggtacataatcagtggtcactgaattttttttgattgattagatgatggagatttatgtatgtctagctataaagtttatgtttatcatatacaatattggcttaataagatattctttggcctcaaaattagaacctaataggaagcttaagacataaaactaatttgatgacaaggaagcatgaaataagtgctctaaaaagaaactcaagaacatttaggaaggatataccgcatccagcaggggtgactaagtgataataattacactaagtcttggggaagaaaggatgctatttcaggaggtggaggagaggaataggtagttattccatatggaaataatactctaggcaagggatacagacatgaaagcaaggaatgtatttgaaggatggtatcttctaattgcatagttcaaaattctaaataggaggtcagtggctaatagagctaggcaaggaagttgaaatcacattatggaaaagtttagaatttagtaggcagtagagagacgtaatttctgartagaaaaaaatactgtcatgagattttacaaagrttaatccctgctctgactggattagaagaaacagaaactgtaggccaggggtgcagggttcttmaggaaagaaatataagacaagaagttaaactaaataaaaataagacaaggatatatatgagtgatattgtaatgtataaagaaaagtgtctcattagacttgcaagctggtccatttacatttgatcatatttttagagaaacatgaacaagccaaggcaagtccaaaggagagtaatcaggatttgacggggagggagggatgagggtctgcaagtggtgagttcctggttaatcagctggggaaaaaaaaagaccaggaaggaggaatgtgataggcagcttcagttattcaaaggactgtcctctagaagagacaacatccttattctgttacttcagagaggcaagaagagacactataaaagtggattgtgtccggaagagtgtgaccaagatatggaatgatttggaaactgtgtcacacaagaagaataaaagtattttttatgataaaggagaattttaaggaacttgaacaccaccttcaaatacatgcaaggaaaaatgggacttttgaacattcagttaactccatataacagaaccatctaatttatagataagcaacttttctctttaccaattatagtgggccatctgtcaaatattatagagtacatgagtatgttggaaggaaatgttgacagtgacaaatgtttttaaaagggaaaattaatagtgtacactacatttattttattagtatctctaatatcagatggaaaagaaaggagaatcaatgggcccactgatggcttagaacttatgtctataaaatttactcatattattgcattaatatttcagaattcatagtctcaaataaatacaaaatatagagagacatatcaggaagtttaggttacctatgtataaataattaaatctctttattaaaatgaataccaataccaaattttattttataaggagtcatcatggcatagtatgaagagctgtgggttgacatcaggcataccyaaatttgaaaccagctctgctacttactmgctattttaactttagcatgttatttggcccctctgggtcatggtttaatcatctataaaacaaggatataattcctctctctagggttattatacagattaataataatgtttatgtagtatataaaaagaacctcatacatatttgatatttaaaatggcaattattaatgttattatctgaaaaggttttaacaagcatgctacatagatgcaaatggtaaagtggaaacaatgtggactttggaatcagactgacctagctttgaaggctagcattgtcactcactagctgtacatccatagtaacgtgattaaccaagctgaactcagattatctgtaaaataaaaacactgcctgggccaggtgcagtggctcacgcctttaattccagcactttgggaggccgaggcgggtggatcacaaggtcaggagttcaagactagcctggccaacatggtgaaaccccgtctctactaaaaatacaaaaaaattagctgggcatggtggcgcgtgcctgtaatcccaactactcgggaggctgaggcaggagaattgcttgaaccgggacccaggaggcagaggttgcagtgagctgagattgcacggctgcattccagcctgggctacagagtgagactccatctcaaaaaaacaaacaaaaaaaacccaacactgcctgtctactccacaagttcagagtagtaaattaggtcatgcttattatttttgtttttaggatagtctggtatgtagtaaaacctcagtgttaatttcattttatttccccaaatatatgaacaggctgtaccccacttatgacctcttaacatgtattttacagacttacgtggattggaagtcctggctgggctccacagtccctgagggaagggagagcttcccttttttgaacatccaaaccccagggactgattcacctaactgctctctattaggcaacccttgaaaggaaacttctgagttttagtaaatgaagagaggacagagacccatctcttgttttatgcagaagtaaagagtttaagtgactaatgtccaggcacacttactgtaattactcctctctaaaccttatgtaatacttctaaagccctacatctttcaagagggtgtagtgatcagaggtaaggtttaaagtctaccacttagacctggtttttaacttctcatcaaaataccacagtctgcattgagtgttctgatcaggcttgtttycttattattgaggtaacttactttgctctttctctgcacatttaaccatggtgttctttttattgagaaaaccaccccttttgggctcttatataaattcagagctatacttcaagtcaccccaagatctgccttctttgtgacctctagtgatccttctaacccatagtgatttttccctaccttgagctttcacagccccagttcttccatattttgtcacttactttgtattttgagttattttctaattatttcatgtgtgtaacttactttcccaatagaaatttaagtctttgaagagaggaaactgtattattggatattttttgttttattttttgtttttgagacagagtctcgccctgtcacccaggctggmgtgcagtgacacgatctcggctcactacaacctccgcctcttgggttcaagtgattctcctgcctcagcctcctgagtagctgggattccaggcacctgccaccacgcccagctaattttttatttttgtatttttagtagagatggggtttcaccatgttggccaggcttttatatcccccactatgtctagcaaaaaatgtaattgtataattatctaattaagatttattgaaatgctttaagtttttagattctaattgaagtctctatgccaatactttattactttttttggttcatttgcctttgagaattttcttagcatttttaatttacttyaataattgagcgattatgacaggaaatcatttcatgtaaaaaacagaccaagtattctggttcctagccagttttctttcatttagatatgatggtactaaagcaaacaacaaatgacacctctacttaattagtgattccgctattctgaatatatatttcatggcaataagagtttgttgaagtttgaaggcctttttacagtctctaaaaagacttaaaattagtgttttcattcaagttatagatggttataatctcagacagctgagacttttcattttcaccttaaggttaattttatttggagtgaactgtaaaaaaaaaatactttggctttacaaaaattccttttagtgtaaaaatgactgaaaatattattattccctttatatgaaatgtccagctaaggaaaattatagagaaaaaaggtagattattagttgccttgggctagagttaggagatgccttggggattaagtataaatggacatgaggcaacttttgggttagtgaaaatgttctaatactacattatggtggaggttgcacaattttgtatatttcctaaaaattattgaatcgtatgcttaaataattcatgaattttgtggtatgtaaattatgtcttaataaagttattaaaaataatttatgaaattacagggttaaattttattttataataaacataataaattgtccttagtatccatttatgaaagtaaatatgttgcttgaaattatttcattagaaaaactattgctactctttagttgtatggctatctgtaggtcttgtatgtgatttatttattaataaatttatattgaactaagtagaatttttaaaaatatggctactcatatgtaaaagttactggaatggtcttcttatttttctgacctttttatatccatataaattcggatgatttctcattgatatttatgatatyctgctctgaaaataatataatcaattacttgcctttttaagtcaagtattctaccctagttgactataaagtgaattttttcaaaggaagtcttaaatttttcatatatctcttaagattaaatttgagagatgttcacattggggggaaaatcaaatttagtaagctgtgaactttggcaatgcaagattgaactactgccttaaatatttgttaatatctgctcactattccattcacatagcataagaatttcccctatgcctgatatttttggcttcatatttttaatttctatttctggatttgttttcttatgtccaatggagcattgatgctgatttttttacttcataaatacatagtatctgtgatggttaatactgagtgtcaacttgatggcattgaatgatgcaaagtattgaccctgagtgtgtctgttaaggtgttgacaaaggagattaacatttgagtcactgggctggaaaaggcagacccacccttaatctgtgtgggcacaatctaatcagcttcagacacagccaggatataaagcaggaagaaaaacgtgaaaaggtttgactggcttagcctcccagcctacatctttctctcgtgctttatgcttcctgccctcaaacactggactccaagttcttcagctttggaactcgaactggcttccttttgctcctcagattatgtgagttaatattacttaataaactcccctttatgtatatatctatcctgttagttctgcccctctagtatcaatcaaaatttgaagtatcaatcaaaatttgaagctacaagagaatttagaaatcatccagtgcaacttattaaattatacttttgataggggatgctaaatggttagggaacttgtttggatctrtggatttcgttggttatatactcagctcttaattgccaaggaatagtcatgatgaaccagcagactttcctcacctagttggggagaaaagaattagattaattttcggttccttgaactctagaaktctataaatctatcaactgtaactatgtcaaatataatgctatggatgttactcttcttaattaactatgtctaccttcactttctcatagtccagctatcattaatcttggattataacgtatggatcctatctgcctggctccctgaactttttatagaaaggagtatatactatattagtaaaagcacacactctggatttaaactccctgggtttgggtattggttctgccactcatttacactgtgtccttggacaggttattatcccctcaatatggggagaataaaatgcttcataaactggtgaggattaaatgaattaatacatgcttgaaatagtccactgaatataataggaactcataataagatgaataattaatataactcaaaccaactggtttcagggccttatagtatatataagtatatcattatatatttatatattatatatatttgatatatatacttacatatagatatctatatataatatacttatatgtaggtatctatatatatagctttttggggggtcctrcttagcctttctttctccataggtttaattgtagagctgtgtttcttttttttgtttgtttgtttgtttttgagacggagtctcgctctgttgcccaggctggagtgcagtggcrcgatttcggctctctgcaacctccgcctcctggtttcacgccattctccttcctcagtctcccaagtagctgggagtacaggcgcccgccaccatgcccagctaattttttgtatttttagtagagacggggtttcaccatgttagccaggatggtctcgctctcctgacctcgtgatccacccacctcggcctcccaaagtgctgggattacaggcgtgagccactgtgcccggccacagctgtgtttcttaaacttaagtaatgaataaatgtattgtaaagaaaatacctcaaacttctatgaatatacctacaaattccagttgaagaactacattaattaaatgctgccaccttccatggtagcttggttccaacacaatcagaaactctaatgcaatttttgatgttgaaatcaggtaaccagtactttattgtaagatcttcagctgattgagcattttaattttgttaggtcatcatcaaaacaaaaacagaaattttaagcatatgaaatatcttgagactatttcagcagaccctagttgagaactgttgcttcaaaagtaaaaataacacacctatgcacaccaaactgattgttttatattcaaaactccagtatcactatttgttttgatcagttgaaattacttaagagtaataacaggcctgctgccagtggtggtagcaactgaagctgatttttatcagatcaagagtgagccaggataatgccagtttggggccagctctaggtagaatgctaaaagttgttgagacttctgtcttccttctgttaccctactacattctgtcatccttcctcctgtctgtgccctttgtcagtgcccttacccctaaccccaaaagctcctcactgagatgcttgacatgttacttttcccagcatatttgtgttttaataaagcaaatctaagtccctgaaatacctcaagacttgttagaatctcttaaagtgaaatttctaacactctgagttcaataagaagaaataaaagtacatatatttttatataattttttatgtttgcaaaccaagaaacatgccatttctcctagtaaaaatgggggaagtgaggactactttgccttttctcctggasagagtagtcctcatttcccccttttttctttataaaaaggaaatgatgataaaaaattgttaattggataccacttcaaatggggattagttatgcatagaatatttcagatatattagtatagaagtcatttaagatacaagcattttatccttttgtaagttcttttgtctaaagtttgttaagaggaaagccaaagattattttgttgtatactaaaagctgtaaatattattaatttatgtcctakacttccctatggaaaagggaaactcagtattaccatgaacaggatccattctttatatgagtagttagaagctaattgtaggttattgagatttaatttagtctctggttatcatgtttagaatcttatgacatgatttgttttagagaaataacctgcttgcagttaagtacattccttagatgtcagcctggttaactagtgtctgtcctgagttggtaaatgtctacttagatgccagtgatgcgaatagaaactgtcgtgtcagcttataacattctcagagggttgcactttcaatgcagrtggggggaaggacaaagtaatagcttcttgttgggattacagtaagtgagggctcaagtgaagatctcttagttccttgaatgatcctttaaaaggtaatagttttccatttttttgctttcagttcttgcatatgtaatgaaaataacgtgaacttagaaatatgggcttagtaaattcttagtaaattatgttcacatgctataagattttaatcaatgagtttcaaatggggaagggaatttatatttaataccaacctacggcatgcctatattttaaactattaatcatccagtaacccataagcctaggaaggattagtccgasgtattacagtctcaaagagatagagcctggctatgcgcattgttctgtctgattatttttcattttctcttttgttttgtttttttgtttctagcctaggcagagtgcagtggcatgatctcagctcactgcaacctctgcttcccgggcttcaagcagttctcttgcctcagcctcccaagtagctgggattacaggcgtgtgccaccatgcccagctaatttttttgtatttttaatagagacggggtttcaccatattggtcaggctggtcttgaacttctgacctcaaatgatccgtccgcctctgcctcccaaagtgctgggattacagttgtgagccaccgcgcccggcctgttctatattattttaaaacctaaaccctttcctcttaaacaagcagacatctgtaatatatgtaacctaattgtaaaatagataaacgtaacagagagtatggttggtatagtttctggttagtgctaaatgattggaacaaagaaaggagagattactctggactggaatgatcaagaaaagctatataaggatacaacttgaggtggactgtgaactctgkgtagaaacagagttagggttcgttttggaggttctaacaattgtaatatttttagtagttacaagtagagctctgtcattcccatcatctaattataatgtgcaaagactgattgcatgtactctttgactacagttcttggcactaataaccctaaacaaagctggaggcgctaattacctccttttcctaatctgaattttgatgtgcttttgaactagtaagtcttctggcattctaagaagacttaccccatcactggggagacatttacttcagcattcagaaaactagatttttgaattaaagttttttagaggagtttttcacgcagtagcacaaataaattaatcagtgtctttatttttctatacccctatcgtcattgcctgcatataagaaggagataagtataacagtttactcatgggatatgtgtactttttgatagaaaacatggagactatgaaaagcattcattttgtctcctggttgtcagattctgtctgtaactgacagtatgatcctatatcttttaaatgtgctattacctgagtttcttttggtaacactaaaggtagaaagaaaaaaagttaacttagggtaaaggctatttgttcctttttcattaaaaaaccaggaaattcttttttgattggtgacatcgtattaatatttagtctgatttattagcatgaggcaaacagcttttttccccagagtgttgacttagagaatgtggacttatataaaaataaagataatttagtttatgatttttcttcttttttcaaaattcagtttctttcttaactttttgttggactttttctcactttttaaaaaaaccgttagttttgtgacttgggcaacctactcggcctcaattttcttatccctaaaatggggttattaacccacctatttaacagggtggttggtaggattaaatgagatcatatctgtggaatgattcaaacagttagaacggtacctcatagttacttagtgagtaagtattagctattgttttaaataaaaccagtaggatttcaaccacactggcaggtgtgcccagctctgccctttgctagctgtgtgaccctaaaaatgttacttagcctctttgtatttcagtttccatgtctggaacacggaagtaatactgatgcctcccttgtagatttttgtaacaattaaagcagttaatgcttataaaagttctcagaacaccctggcacatagtaagtctgttgttataaatattttcaacattatgactgtttttgtcaggatgggtttttttaaagcaatgcataaaagtactataaatatacatttgttctatrtaatggccaactaaggaaacaaaagcagataaggtaaaagcacaagaaatgaggaaacagaaagaaggcaaacaggaataggcagaaggataagtactaaaaaacatacatacacttccagggagagaggacagatcagaaagttcttcctatttctaaaatttgtttatacacacacacacatgaaatgaaattctagactatagtaagtgatctttgggctatttcctatatcatagcattttcacattgtattttgtttgctcagttaattatccatcttcccctgcaagctcttgagggtaagaaacattatgtcttgttcatctttggaaccctactgtctagcatgtagaaagctctcaatatttaaattgaatttaaaaatagggttttgcaatactaacttgtatttttccataaatgcttttctaatattttccataaattttccacaaatatgccttgatattttatatatatatagrattccttgactgtgtgtgacgtagtttaaaattttcctttttctaaaatttttattttctttttaatttggaagtctccattcttattaaaattaagtgcttatgctatttaatataataatacttgttacacctttaggaaaacatagttgttcaccatgctttatataccatgtgtgaacttttctatatttttttcctttcagagtgtatygttctttttgtttgtaaagcagcatacttgatgctgcaaccagtgactttttgccatgcattcttaatacttcttggaatatttggtttaggaagtggggtaattagtacataaacactgtgtagcagaactaccctaattagtgccttttggcctggcttcaatgataaacaaagtaagatgtgtgtcagcattcatcctaacactttataaaaattgttatagccctatggggcagcatacacaagataagttaaataatgtagtagttgagaccatgagaaggagttttgtctgtctatttaatagtctttgcatgataaattagcttcctagctttgaaggcttcattagtcttaattatccagaaagcataaacttagccatcaaagtgtatccctaataacgttttacatctttagtgaaatgttgcctctttaatctgtacctaaaccaatttcactatcttyctataatctataggcgaaaaagagcattagcttagaccatcaaaatgaaatgattcaggaactgggttcagaggcaaaacatttctcacccattttatggggcctttaggaaattttctttcatttagttcactgttacttaagtctgttatttcagaagaccactacttcctatttttgaagtataaatactttaaagattttcccattaagatgttgctttgttggtttacaatactgggactactatataggaacagatcattttttctagagacaaggaacagaactttctgctagacagctcatttcttagagacactctaagcttaaaatttgggactcattatgaagtctaggtacagtttctgaagaatctcatctgtattaagaactggttgttcaaaacctctttgtaattaattttcttacattaaatcacaaggccgaaaatggaaagtaaatatgtaaaaatgtagaaaacttaaataggttaataattgtcaaagatattgaaatggtagtcaaagccctccccaaaaactaaacacaaacacttgaataaacagacacactttcctaagccaaatagattttataggacattgttaccagattttcaggggatgtaactcctgtctcatatggatgctttaaaaataaaaaaaagccaggatactatctggctaattttgcaaggcttgtacaaccctaattccaaaagatagcacaagaacagaaaagtataggtccaccacacttatcattacaagtgtgggaattytaaatcaaatttagtgaataagtccaatggtttttttttttttttttttttttttttgagtcggattctcaccctgtcacccaggctggagtgcaatggtgcaatctctgctcactgcaacctytgcctcccaggttcaaatgattcttctgcctcagcctcccgcgtagctgggcttacaggcgcccaccaccacgcccagctaatttttgtatttttagtagagacagggtttcaccatgttggccaggctggtctcaaactcctgacctcatgatccgcctgtctcagcctcccaaagtgctgggattataggcctgtgccactgcacccagctggtaattttttaatatagtattttatctaaggaagttaaggatggtttaacatttaaaaaatcaaagaaattcactatattaatggtgaaaatatgtaataggcaaaaaaattatataattgtctaaaagtatgctttgaaaagcatttgataaactttaactatataattaaaagtttagaaaattaggaatagaaggaaactttacaaactagttatatacaaaagcctacaacaaatatcaataccaaagctttaatcaaactttatacaaagcaagacaaatayatattcttgatatagatctgactagtccaataagaaaaaaaaagtgaaataaaggtggacagagaaatggtggagcagaaaagagaaactaaaatagataaaatagtccttacttggaagttatacattgtctatgtgggcaaattattagaactagaagaagcaagctatatactgtcaatagtttcaagctatatactttcaagcaagctatatactttgagtatactttcagtagttttgtttttccagatttagcagtgactacacttcaaaattcacagcaattacaaaaagtataatgcatttaaacattaacctaacaaaaaattataatagctttatggaacaaattacagaactttactaaaggacgtaaatgaaaacttggttaaatgaagagctataacatgtctattggtggggcacataacarcataaagataccaattctccccaaatccaattccaattaaaattataataagacttttggggagcctcagttaactgactctgatgtagaaaaagtttcttagatagctaagtctattttgaaatgtatcaggaagagggatgatttttttcaaccacattttaatccatatttgtaaaagtaatatggaactggcatagaaacagatgattacactaatgaaacagaagagacaggtcaaaaacagaaccatggtggggaaaaggaatgttgcttagtaggttcttgaagactggtttacaaaattttaaaaataaagttgggcccctacttcacatcacataccatgtgaactccacagagaacaaggacttaaaagtgacaggtataaccacagagctaatagaagaaaatgtaagagaatatttttctgatctttttttaaaaaaaaatatatatatatatattattttgagacacagtcttgctttgtcatccaggttggagtgcagtggcacgatcacggctcactgcaccctcaacctcctgggcccaagcaatcctcccacctcatccccctcaggtagctgggacaacagctgcatgccaccatgcttggctgatttttgtrgagatggggtttcaccattttgcccaggctggtcttgaactcctggggtcaggcaagccatcatgcccagcctattttctaatcttgatatgaggaagaacttcttaaaccctactgcaaaagcacaaactatcagggatacatttttttttgctttacattgtcaaaactaaagatttttgttcaatgattaaagagtaaaaaaattaacagaatagtgacagattggaagaagatatctgcagtgtcataagcagacgagataaatatgtagaccataagaaaaatgctttcaaatcaagaagaaaccaatatatacaaaagcaaaagttgttactagacaattcatggaagggactccttactgtctaagtgtataaagagagatgttcaaccttatgaggaattagagaaatgctaattgaaacaacataccacttcccatctatttgggaagaagtttttgaaaaatcagttggtaaatcaaaatataggtgaggatttggggtaatgaggacattcatgcactgctggttgaaatgcaggctgacacagctggtctgaagagcaatgtcacagtcctttgtaaaagtaaatatgtttataacttgtcacccagaagtgccatttcgtgtacatattctattgaaacacatttcagcttgataatgttgtgtatcccaggatgtttactgtggaagtgtttctggtagtgtggggttgaggacaacttaagtgtccatcactatgagaatggtcaagtaaaatgcaacggatgcatcctgtggaacgttctgtaacagagcaataaaataaatgttcaggcaatgccctccagccagagactcctgggaacatacacctggagtggaacaagttgggtttattcctccttgtatggaggggtaatgcacaccttgcagaactgggrgtgtcttagcaagaggatgttaggagggaattataagagctgagcttgtatgagatgatatgggggagagcttaagaaagtgggcattgtactggattgcttactttcaggaggcagagacaacgccatgattgrttatcttaattaaatcatctgtaaggagggaagaattgagtgaagctaatggtgtarttggtraagaagyagtcactcttactagctggaactgggaatatatgtttattttgtggcttggagagtgttcatattttgtccatacctgaatatgcagcggtcttgtttttgtcttgatctgttactgtcacagagtggcctcgtctaatgttgctgttctgtgaaattgttcatgttcaacagaataccaagtgagtctcagaccagctcatgataacataaaggccatgctagtaatacaataccagagcagctctcaaatatcccttctgtttttcagtactacaacaatacacaagatcttaaaaatgtagtagtgattattaaaaagggcttacagcaagwcctataacataatattatttatataaattacagacataataaataaaacagtagtatgtattattcaaggatgaatatatgtatacaagaccctataccaaatacaagggttttcatctctagtgtggtcggasggaaggggccagtagccaatattgggggtgaaaggaaatattaaataagagaagagccttgtatggaccaatgtgatagtgtgctatgtagattgaaaactatgataattcattttcagcagctaaagtcttaaaacaagtctacacttctgcagaaaagtggtaagggaaagagtgggagaggacctgtagcccagcatcttatctatatttactactcttgccttgtgggaggtgggggaagggggaggaggaggaataccttctttaagcttttcctaaatgtcttacatttcccccaaaaggaatgagctgttgtaatgatagcatgttgatgctggttaaaataaaacatgcccaccagtgtaaaatgatagcattaatatttcttgtgggaacttgatttagctttaaatgtacccaaaagctttcgaagtacaaaagccctcatattagctccagagaaaccaagtttattatatcttaaggaaaagatttcttcatgaaccttaaatttagtgtctgtgtaatcatgttattttgtcatttactttttaactgtagaaaagagcttgatttgatttttttttttttttttttgagacggagtcttactctgtcaccaggctggagtgcagtggcacgrtctcggctcactgcagcctccgcctcccaggttcaagcaattctcctgcctcagcctcccgagtagctgggactacaggcgtgcaccaccatgcacagctaatttttgtatttttagtagagacggggtttcaccgtgttggctgggatggtctcaatctcttgaccttgtgatccacccaaagtgctctgatttgggagaccttggcctcccaaagtgctgggattacaggcgtgagccaccgtgctggccagaccttgatttttttaggagtaaagagacttcctacctccactctagtcctcttatcagtgatttctttttaaaaaagtaaatgtccttgtgtcttcacttcatcttccttaataagtatttagaggcagtattttcgatattaacagcatagattctttaatttaggaaagaagaaaacttaaytttgatttttctaactttctgctcagctcttccaacgtgaatatgtaggtctctgtctcccggggtcctcattatgctttactttgccctttccagtgccctttccagtgtttcaaccacattgagccgcatggccgcataggggactatgaagatcagctcatgcatttgtgaagcactgcctccttgtgtcttactgttctctttcttaatkggctgtgttctggaatggtgtcttggtgttatgttttaaaacattattttgcgtaatttatgtcattttatagtcagccaggagaaagtacactacattagttttatgtcatcaaattgtttaatcatctctataatttacatgaatcttcattaataatacaggaggaaatacaagactctttctataaagctttgaaaatgctgagtttttttgaaatagatttagagggtacaaatgcacttgttacatggctatactctagtggtaaagtctgggcttttagtgtaaccatcactggaatactgtaccttgaacccattaggtaatttctcatcccttacccgtctccttctctgccatctttccaagtctctgatgtctgttattccactctgtagccgacattaatttttaaggatagttactctttatatactacttctgtaaatccataacagatccccaggttttttccttgtctattaggaactgtttaaaaaattttgtttaagaaacaaatgtatctccattcatattcttgaacaacacytctaattaatgaattactcagaaattttgctgatgaaaacatgttatgaaatctgtatattgtataagacctttgcttccctgagagaaatcactcccattgtttcttcaggaacttattctttcagacttgcaggtttgaactcttgaaaatttctatgtgttttctctctgaatatgtagaaattccatgtttgttctatgtagataggattaagatggaactgtgttctaaaaattgggytgttttttataaattgtccaaatttacattttcctaaaaaatatattaagaatgttagcttgcaacctcttttaaatccataatatgctgacatattatctttgcaataaagaatattggaaaaacaatactgctgcaagtgtacaaatggtatttaattccacatgctcctgtgcttccatcagtccctgcacataggcttctctactcctgattctaaagctcatttacactaaaaaggttattgaaaggtacttgatctgtttttgagcttaagaaatagagctaatggacagtgtcacaattgtacatgcacatgcagcccattttccattcctagatatatcatttacgttttctacatcacctacactcttgggtccagggttatagagcatagtaagaagccgaaaagaatgaataccttttgaagaactattttcaagctagtgtacctaattagatgaggaccataggcagtttttccttcagatgccagcaatctagaaggaggagtaggatgggagcagacaggttgcctccccacctggataactgagtgtggttttctgcagttcttaaaattgtcagctcacacatactacttacttacttacttacttacttacttacttacttatatatgtctgtaagtacgtgacagagtctcactgtggcacccaggctggagtgcagtatnatgatcttggcttactgtaacctctgcctcctgggtccaagtgattcttgattctcatgcctcagtctcccaggtagctggcaatacacgtgtgcacagtcacacctggctaatttatttcattttattttatttgtattttagtagagatagagtttcaccatgttgcccaggctggtctggaactcttgagctcaggcagtcngcccacctcagcctcccaaactgctgggattacaggcgtgagccactgcccccaaccaactcacacatactttaagtgggactttatttaatatcttcatatcagcgatagaacttgatgtggttttccatacatgtacacacacataataaatatcatccctttgacaatactataagaattagtgcctttatcattggatattctcttaaaatcattaacagaaaatgtgttctttctagaggaattttatcaaaaaatttataaggtgtttgaacatgtgattacaaaggaaagggaaagctaataaagaacttagtagtataaccatggccaggcacagtgactcctgcctgtaatccccgcactttaggaggctgaggcgggaagatcacttgaggtaaggcattcgagaccagcctggccaacctggtgaaatctcatctttactaaaaatacaaaaattagctgggcatggtggcaagtgcctgtaatcccagctactcggcagagtgaggcacgagaatcgctcgaacccaggaggcagaggtcacagtaagccacgatcatgccactgcactccagcctgggcgacagagtgagactctgtctcagaaaaaacaacaacaacaacaaaacttagtatgtaactatttatttagctatttttcaggcacattttagaacaaaagtgattttttttcaaacctctttaccctctttggtggtaggagacagatttcatattcatagaggtccatatgtggtacatatgttacttaaaacttgtggttgacactgtagtgggaagtaacagtagggtcactactgatatctaaatccctgatgtttctagtaggtataaactagagtgtgatttgtttttgtgaggagggaattatatctctgttaggtaagctaaattcttatttttggcattcatactgtaattctctatcctgattcttgtgtttttgcacattgtagacaaatattaaaaatcccacttgacatgattctaaatcagaaattcctgagaatagagatgtttaaaagatgaactaaagctaccttaaaacatttcagtattttgaaagagaaaaggatattgtatttaattcctcctttataaagaagttttaactaaactttaaaattattttttattatctggtgtaccaggattgtgtgggtaatattctttttrtttttaggtctcattcagtatctctgtttttttgataaaacaagggtcagcaaactttctctgtaaaggtctgggtagtaaatattttaggctatgcaggccacatataatctctgtggaatctcctctctcaccaccctctatactctcttcctcctccccctctttttttttttttttttttttatttgagacggagtctcactctgtcgcccaggctggagtgcagtggcgcgatctcggctcactgcaaactccgcctcccaggttcrcgccattcttctgcctcagcctcccaagtaggtgggactacaggcacccgccaccgcgcctggctaattttttgtatttttagtagagacggggtttcactgtgttagccaggatggtctcgatctcctgacctcatgatccgcccaccttggcctcccaaagtgctgggattacaggtgtgagccactgcgcctggccctcctcctctattttttttttacagccctttaaaaatgtagaagctggccaascacggtgattcacacatggtagttccggcactttgggaggcaaggtggacagattgcttgatcccaggagctcaagaccagcctcggcaacatggcaaaaccctgtttctacaaaaaaatacaaaaattagttggacatggtcacatgcacctgtagtcccagctactcaggaggctgaggtgggtggattgcttgagcccatgggatcaaggctgagattgtgccactgcacttcatcctgggtggcagagagtcagaccctgtctcaaagaaaatagtaataataaataataataaattaataaaaatgtagaaatgattccaagctaaagtgctctatgaaaataggtttggcccactggctgttttggggcctagttctagaycaagttctgccccaaactaattgtgtgctttggggtagtttgtataattggttttatcttctctggctattttatgaagataatctagtagtcacttcatatgtgaagaatttatgaaatacctatatatttgcttttgttttctaattttagatacacactttactacagaaaataatttagtcatgttaagtttgattaatgctaagattagtatcatctgaggtcaagctatatggcatgtgaattcagtgtcagaaagtctgaatttgggtccttgatttgctacttactagactctctggttgcaggtaagctctgaaactctgagtttctacttcctgttcatcaaattgatgaaatgacactaactctgcctacctcttaaaattctttaattattttttaattgaaatgtgaaactaagataccgttataaagcacaaaacattaaatcatcattaggagtcattcttttaaactacatgttttcataactgaatttccccttataaattttattatggagaaaaaattttaatttaaaaaccactaactagtaaggccaataattcttcatagtatagcatctggcaaatagacactcagtggctagttatctaaggtaagtcagtagcttttccaactagaacttatacctaggttttaattatattgttcctttctaactaacccaatggtatcaaatgctctctggaatatagataatgaagctcttaacatagtgcctcccacatagtaggcactcagaaatttgctgactaattctaggacttccatctgcctaggtattagatgtttccatttacctctcagctgtaaatactgcattttttgtgcttaaagtataaaactgttgtctttccttcttagtttgcatttgctccattccctcagtagttctctttatctcctttgtcagtgacagaagaataaaaagaaaaatattccctggggactggataggttctgtccaattgaaagatagttaattcccagtttacttttttcttgacccttcttccctcagttagttatttccaacaaaagccacttgaaaccaaatttcatataataaaagctgtgctttggctagtggtagctcatctgttggggagaaggaagcaaagaaggaagctccctagaaatctaagatggatttttcagttttatttggttttgcgttatacacagtttaaggggggaagaaaacagaaataacttagtacagtactttccaaatctagctgtacatcagaatcaccagataagctttgaaaaaccaaggatttcctggccatgaaccagacttattaaatcagaatcttggagggggtcagagctatcaatctataatttcagaagattcagccaggtttgagaaccagtcagtaccatggtttttagagtaagacagatgtgagtttgaaatctggttctgttacttactacctgtatgaatttcagcaatttatttaaccacccttcaaaaaagtaaaggtaatacaggtagtaaagcttcatttcattgaggtattttgagattaaatgaaataatataacatgtaaatgcttgctacataacaatcactcagtaaatcattgtttattgttttacatgattgtattatcattttctgacagatggtatttccttaggaaaaaagttagactaaatttaaattttaaatagaattctttaaaatagaacgtgaataaaagtttatttcatgacagtctcaaattagttatgctacatgtgcattatcagcattttattaatagaaatatgcaggtatagagtattcactctgtagttttcttacaagacttgacactttttagagtattatgtacatgttgcacataggccaagatgatagtcacattcatttggcaaaaactatttagatttctaatctaacacaataaaagaaaaatggaaaagaaagagtataaaatttttttatgttggctgcttgatttacatgaggcccaacctggtttttcttgtttgttagttttgtttttttgagatagggtctggctctgtcacacaggctgggatgtggtggcatgatctcagctcactgcagcctccacctcccagactcaagccatcctcccaccccagcctcctgaatagctgggactacagacattcaccaccatgcccagcttgcttatttattcattcattcattcattcattcattcattcattcatttatggtagagatggggtcttgccatgttgcccagactggtcttgaactcctgggctcaagtgatcctcccaacttggcttcccaaagtgtggggattataggcgtgagccaccatacctggccccgacctgattttttttttaaactaaagccataactaagtaaagggaagctggtgtatgtaaaaatatgagatatacatgttgattttagcgaacatttaggtttctctgaaaatctgatatcaaataactctacctgaaacaaatgatactggtctgttttgtgttaaaataagtatctatacacactactatgattttggcattctaagtattctgagatcttttaaaaatattttttagacttttatgtttgtacatattttgagaaaataagtctgattgtggttcatgttccactcctcatacttttctaaagtgctgtccgacttaagaagaaaaatcttttgcccaatgttttggaattgttctatgatatttctgccagttatatatataaagtgcattccttttagtaaggtccagcatgatcatttctttttttttttttttttttttttttgagacggagtctcgctctgtcgcccaggctggagtgcagtggcgggatctcggctcactgcaagctccgcctcccgggttcacgccattctcctgcctcagcctcccaagtagctgggactacaggcgcccgccactacgcccggctaattttttgtatttttagtagagacggggtttcaccgttttagccgggatggtctcgatctcctgacctcgtgatccgcccgcctaggcctcccaaagtgctgggattacaggcgtgagccaccgcgcccggccccagcatgatcatttctaaagtgaaaataaacagtgaaaagccattagtaasttgccartaatgttgattctttggttagcgtgataaatcaaatttcccagaggcagtcacataaattatagcattatgttgctaagatgaatttggccaaattatgcttcatttgtagcagagtcaatcttaaaactcaggtctcgtaactgcctgccaagactatccctttattttgtaggtgaaacctaggcaaagccaatttggtgctcactcaccccttcccagaaatgaagttggttgatggctcttttgaaagtattaagttcaggtatctgaaaaattggaggaatattagtaatagttaacctttagctactgagttggtgctgtacctgtttatctcgtttaatttttattctatctcatatgaggtagatgttgttatgcccattttactgtkttttattatctatctagtattcaaagrttcataacatcaaaaaagtcataataactgttacaatagctactgtagatccttatttttgacactaccctttactctgttttacatatcattttatttgtcatgcaactctgtgagagtctaagtatgaatgtctacattttaaatatgtaccaccttacactaaataggttgaagtaattttgcccaaactcacacagctaatagctgaaataagtgaagttttaactcaggtctgatttcaaatttcatttctttcctgctactttatcttacttcacatatataattttacctcttaccaaaataagactagtgttacctaggaagtggggtaggcatgatagatatgtttttttcttatacatgaaggagttcttatgattctcacgctctgattttctaaactaaaaatatgttcctgttccattgttatcaaaatgtaaaaatcagttaagtaccacaatatatgggggctttaaaaagttacttagaaaatatgcattgtacagtgagccgagatcgcgccactgcactccagcctgagcaacagagcgagactccgtctaaaaaaaaaaaagaaagaaagaaaatatgcattgtattgatgtttctaattattagaaatctcccactatgtttcaaggggacttttgttaggtcaagttggaacatggatatttacggactatatcatggtgtcacataggtaattatttgttttctttgaagctaaacgaaattacaacagtatatcattcaaagtgctaagctttggatcataagtagttaatctgattaaacagcttagtcatgcattcatgataaggatataatgacaaaaattctataggttttaataataatatcttagtctaggaattctggcataagaattattttggaaatagatcatttatgtgtttctgttttcgtttacaactgaaaatagtgtagtaatattgattcatctaatatgaatattatgactacagaataattagaatcccagcaatggaaagtttgaataaaaattattaagtgtaaaagttttacttcttaagatagtgccttttcagaatgaggcaatttgacatcattgtttttgcctaagacagcttttagagtttagtctagaagttgttcaaatagaagttggtgacaygttgaagctgaatgccttcttttcttaaaaggtaggaaatgctcttctcatttgtaagttttagttttctacagtctaataatcttataaaaggtacatcgttttaaatttgaaatgtagttggaatgtcttattgaatgtcttcagtgatgacttctggttttctaaggtttcatttttgaaaaatatgacttttagggtcataaaaggaaaaaataaaaactgtatatacagttttgtgataaaagaactgaatatatatgaggttggtggtgtgcagtgtaaagctggcgggtggggagggttgtttctaagaagttaccttaattaaaaagagaataccctattcattggccattcaaagtgggaatatagatatgtggggtggagagggggacagctttgtacctgcaaagctctaatgaatgccactacatggtggagcttgagaactcactgagctacccaaaagactagtttgtcattgcagtggctcctagacattgctttaygaggaaagaaaagaggaaagaggatgagcctagatacaaagggaaaggcttgggaaaaagaaactacatccatgatttttatagtgcctcttttgttactattgttttgtaaataarataggtagcaaatccagtcattcaaaattataaataaccactaaagggagaagtcaatgctcactttagcttggtttctgctgttgttctttatggtgtgcatttgtgtttacggtactctccgaaatagctcttcacagctactttatgtataagctctttgtcacatctaatggaacttttttgaagttgtttgcatcaacttgaatctttagttgttccctaagttcattctggaatggctgaaaccacttataaagaagaaagtattaagggcattgagttacccaacgtattarttgttatcgctgaattctacttttaaccaggaatatactttggtcttcgttcaaaagcacatcatttttttgtaattaaaatatatatggagacaatatagtctttaatttagttattaagaatattggtattctgtttgaaacttggaaattctgacatcaaaattatatttattactgattagacataattgtatcatttggttatttttatatctaagctaaagtgatcctctctaatcctttatactctaggttttttttgtaaggatataatgccaaaaattttgaaaaaaagaaaacaggcactgtggctcacacctgtaatccctgcactttgggaggctgaggtgggagratctcttgaaccaaggagttsaagaccagcctgggcaacatggcaaaaccccatctgtccaaaaaatacaaaaattagctgggtatagtggcacatgcttgtagtcccagctactctgcaggctgaggcaggaggatcacttgagcactggggaggttgaggctgcagtgagccatgatcataccactgtactttagcctaggtgacagagtgaggccctatctcaaaaaaaaaaaaaagactgaactttagtcttttaatgttatatttctggatttaaataaaaacagaagaaagataatgaagtgtgctctttcattcttaatctttcatttttattcttatcattaaacatatggaacacatcttaggtagaccatatatatttttataattctatattttgttaaagatttatatattttagtattgcctccttaatagatgcattcctacaaagtttgttctgtaagaacttcctatttattgtagtgattttttcccagtgattttcattataatattaaaactataagccatttttctacttttgacatctaaatgtcataaaaccttatttgcttgtaaatatctatattcttaaaagtagtatatcttccataaaatattaacagtaacttgaaatattaataacatttctgcagtgtaccctaaagaacaaccagaatctttgactagaaggaggctcattctcatttttcttcacaaactgttcgtcgatcatagagcaatcacataagcttagtgattagactacacttgttttttgctagtgtggaactacattattgcttcaaatttatttccaagttagcaatatttcccccgtagcttttttctttccttgagatgtactgatcttttccaaaagtcttgattgacatcacttctgttttaaaatgctgatcataaaagatgattattgttttaatgtttgttttatctattataaataggattaatcataaaaggatagaatcatgaaggcatcatttggtaggtagacgtcttaatagtattggtttattgggcccgagaattctataaatatgctagtcattgtagggtaatgttgaagcagttgtcaaagtcattaaacttacaagtttatcaagtgaatttcttttgattatttctaaatgcattttcttcttagtacccaaatttctcacaattgaaaagcaactgggtgttgggacagaaatatagtatttggacattagagggtctggccttgacatttgatgctactacttaactggctcttatctaaaactggtatcctaaaagccttaatttcttagtgccagtgctgtctgtctatctcgcaggttcattataagtatatgaggtaatatgtgtgcaacaggaaagaactggcccaaaatgttagtgttgctgggattaagaaaccctgctctgcggaattctctctttgatatttccctgccttttataggaactctttttcacctaagattttccatttatgttttgttcattctttatcatctgctcagagttgtaagtttaccacaagtggagacctgggatgtacacccagggaccagagtcaccccataactcattttctcataaattgtttcctagagaagcctcctttttcagctagagccctttggatgccttttttcttttcttttttttaatttgactyttccaacktagttgaaacacagaatctccgttaaccctcaatgtacactggtcttaatcagatcaagtttttaaccacaaggtaaaatgtttcactttgctcatgaatcttaagaatgggccatccagagtggctgtacccagaacaacaggtttactgttgtttgtttcactccagttccctgactttgactgctctctttgagtattgccttagctttcatttctaatctgtgaaaagatgccttccatttgcctacagccacttttgcatagattaattgtactagtttagtctgagttaattttaatttaatccatttgctaaggtcatttgctttttttttttttttttttttttttggagacagggtcttgctgtcacccaggctggagtgcagtggcaagatcatggctcactgcagcccgggttcaggtgatcatcccacctcagcttcccaagtagctggaaccacaggcgtgcaccacacctggctaatttattttttttaagagacagggtctccctrtgttgcccaggctggtcttgaacttctggaatcaattgatcctcccactgcagcctcccaaagtgctgggattacaggtgtgagacaccacgcccagcttcatttgaatattggaaatacactgttcctaagtaatggtcctgggaactttacaacartactgtgactattctcttttcaaaaatgtgtatcggcttaaatatttaagagatgggaaagagaagttcctgatgacattgtatgcaccacggtagcaggtgatgtggtgactgtatctctgtttaggtaataacacttttggcctcatactagcgtttgaattagttccggaaacatatgtgtcacattttgtttcatcagctttccatctcagcattaatgatcaaggcaaaaaataaagcagtgtgctttttgtatctaacctcatctgatttcatggttgtggtgagattgcacagagatgaatagaggactttgaagtatcacttttctagttagattttcatctttcctgtgcatatttaatcgagccagaagaatgagaaaggcctgaagggtacctctatcttctcttcctacttcagtgaaaggacttcctctaatagattaatggacagaggttaataataaaggtattcacaggaatgaaagaagaattgactaagacagaaggagattaggtgctactatggggtaggtttatcagaattatgacttccatagtgtactgtatattgaggcatttcattattcatattttttaacaaaacactctatttggttttgtgagtattgtgaagaatgttattaagccagtttgtaggtaaacactgcctcaggtttcatcaaacttggcacttaaagttaggattcaactctttcactgcagtattacagaggggctccatctatttgttacctgaaaattgcctggaacagtgtagagattttaaaaactacttccaagcaaaacttgcagtgatgtcactcattacccattgctctaagaaatgccctcatcttgctgtctaggaagcacttttcatggactgctaacttctgttagagctgtatcaattacaagcagtttggcagggtaattctgatatgtaaagctggggaggaacattgtttggttaattaattcatttggttaattaaaaagtgaaattatactttgattcatataagtgataccatgtagaagaaatataaatctgtgtttagatattactgtcaaatattaccaattctgaaatataaggatattcctattccttctcatattcctatgagaaggaatgtcatagctggtttaggtaaagaaattgagcatatgcagctaaacccactctggactcttttttttttttggcaactacctagacgcacagtggttccatagtgcctgctctaccatgctataagcttagggarggctttgctccagaaaaggaacctgtaattagctcatgtgagtgagtagatagccacatctaataaaaggttaagtattaggaaattcttgtgactatacatacaaggtacattctccagtaataaaatttgtattttgatatttttatcttcgtatttctttctcttctgtattctcattctctcatctatccatattctctctccctgtcttcatctttctctctctcttctatcctacccatcacctattgtatttagataaggaaaacagggttattttgtggcctccctataactttaacaacacccttctccattttttgttttccatgagtggttgtcattttcctactaatttgtagttctttatataatctgactactaatcctttgtcagttatatgttcacacatatcctctcccagtcctatttcttatctttatactttgtttatgttccatgtggccttttattgtaggagygtttaacatcatcagatttatcagtctgtttccttatgatttgtgggttttatgtcttcctaaagaaatccttcagtacacacaaaatcatatagtcttttcttcttttttttttttcttgagtcagagtctcagtctgttgcccaagctggagtgcagtggtgtgatcttagctcactgcaacctccgcctcctggactcaagcgattctcgtgcctcagcttcctgagtagctgggactacaggtacccaccaccacacccagctaatttttgtatttttggtagagacagggtttcaccatgttggccaggctggtgtctaactcctgagcttaagcaatctacctgccttggcctcccaaagtgctgggattacaggtgtgagccaccaccgctgctaaaatcgtattttattttaagtactttaaagtcttaccttttatatttaggtccttatctgaagttttcgacctgacattcagtgtacagtgaacacactcatacatctcctcatgcagatatgcaccrtctaaagatggaggctactagctacatttaactgtttaattttcaactgattataattaaatagaatttaaaattcagttccttagtttcacagtagccatattttaagtgctccatagccacggtagtgaatgactactctatcgaataatgcaggtaaagaacatctccttcactgaagtaagcagtcttttgtggtcccctaggacctttaccaggactctcctcttagcgggctttgagtctagcttctctccccctgtggcccagaagtgtattgaaaagtcagctgccttcctattcctcaatagcttcttcaaggaatttttgcccacaggcagtatatttttcttcccagatccaaatctagcttttattctacctttgatttggtctatcaagtaaataaactggcttatttaaaaatatgtcatattcagtgttaactttaaacaaattataaaagaaagtttgttgtatgtatctaaggtactcatgtgaataaatgagaaataagtaggcattaacttgttatctcttgtttatttatttgtatatgttttgcttgctcgatcatcaagtggctttaattcttctgagaatattagtaaactccttgtgtatctgagagttcttagaaacctgaagcttctagtacaactttgctgaaacatgatttgtcaggagaattataaacattgcacattaacccagtgagaacaacccaactttaagaattaaagctaaattgcctgatagtgatttcagtaaggctgttgtttatgcacgtacacattagcatccatagtgctaccaactttaaaaaatgctccagatttgagtacactcagaaagtttctaagatattgaaaacagtattcttaaagttcctctgttttctgaacattccctagtgtacaagattttatatatttatccaaatgaaacgttgaccttcaatgtaatattgaatataagattgcagataaactattattacaggttattcctaataaacttttagttgctgaatgttaacaataacaatctttacttttaaagcactatagacaaaagtktaatttttatttagcaccaataaataaatgatttaacattttaaagtatttaataagactgaaacccacagcaaagctgttctctggtgtacaattactggagaagttcactaggtcagagtaaaagcgaagaagatgtattttaacatctaatatgcaatgtactttttgtttcttaatcaaaatgtgaaaaagaacataaaatacagaattttattttcattacaacttaaaccagagtttaacatctataaaatatgcttcaaaaattagaagtttaagaatgtcatcacttatataagacaaaaataacacatgtatagcccatctaaatcattcttgaaaacagaccacacacagccttacatttttaagacaagagggctttaaaatgtaaaaggggagaaaatgagacttaatgacatattagaactaacatcccctgagtattgattgaaaggaaaggtattgtgtaataaggaacatgttcttccaattcttccatcagtctcagtttactttccactgcgtcctagggtgagaaagtaattaattctctgtacttattgaattataagtgtttatgaagcaacaacttgaaatgacttcaatccctacttaccggccataggaagcagtagtattggcagggagaaagcaagtttggacataaggactagacttcagggctgtccaatcttttggtttccctgggccatgctggaagaagaatggtcttgggccacacataaaaaacaaaataactctgacgatagctgatgagctttttaaaaaattgcaaaaatctcagtgttttaagaaagcttgctaatttgttttgggcccaggttcaaagccatgttgggcccaattcaaagccatcctgagccacatgttggatgaccttggactagagaaaaaaactcactgaagcctccatattttttatagtatcttttctgtgggatacttattaaattaaggttgagccatttttaaaaaacgtattttctctgtgaggaaaagcaaatctgtcttaatgagttacatgaaatkatwtgaagttatatgaaatctaagggatttgaaaatttcaaaaagatttaaaggaaatacatcagaattttggttgcatttcagttaacagatttatttatctagatttttgaataaagtgtttttgaatacttaattcagaattgatgatctgcccatgaccttaataaaatttcctggtttcatggcaatggcaaaaacagtttctaggtacttgggtgagacacatactagcaggtgtagaagtagtaataaaaataatgatttattatcagaacaacacttcttacacctattcaccaattttctttcaggatatccccataatattattattcctaaatagcaaataaagaaaataagccaaatgcaagtcaagtcactttatatcttcctcatccttccattcatttcctcattcgttcattcattaccctccttgtttcttaaacatcaaatggtgccttgaggcattaaacaagttgataaaataaaacaaaagcatgaatacttgacatatttctctcatcactaagacaacatgccagttagtcaattaaaaaacaaaaataaatgtatcaaamcacgtggtattatgtggagaagacttgatcccaaatgttcccttttctcgaagttatttgctgttgtccatactatccacgctatccaagtttacctggataaatagaatgcaatcagaattatgttgaagctaatttattgataaaatatataccaaaatgtattacaaacataaaacttcatgaggtcagtattattaatttcaaattttgggtttttttctaacattaaattattyaaaacttttatttaaaaatgccacattcaggtaaaaggtagtagatgggaaaatttcagcagtagatatttcagaatacaatggttgtagaaaaagggattatgagtttatttatgtgcagatatacagttatgtttttaaaatctagattataaaactgatataaaattcgagtttaacaacatatcttattaagataagaatcttaatgcactatgaaaagaaaaacaaaacaaagcccagataacaggtttcttttggtagtgatctacaaggtattagggatatgatttccctcttgttctgctgtctctctgtccctcagtgattacaggtagagcatcacttcaataactcttccagtcagtattggtggtgwcagccagtctgacctgaaaagaaaccaataccccttcccaacctggaaatgctggtaatttatttcaccatccccagcttccctatatttttccccatcctaccagcaaactttgtttatataaaatgcagccaaatacaattaagccaaatacaagtcaaatcttcctcatcmttccattcatttcctcattctttcatttgttaccatccttgtttttttttttttattgagacggagtctctgtcacccaggctggagtgcagtggtgcattctcagctcactgcaagctccgcctcccaggttcacgccattctcctgcctcagcctccctagtagctgggactacaggcgcccaccaccatgcccagctaatttttttttttttttttttttttttagtagggatggagtttcaccatgtgagccaggatggtcttgatatcctgacctcgtgatccgcccaccttggcctcccaaagtgctgggattacaggtgtgagccaccgcgcccggccacatccttgtttcttaaacatcaaatggtgacttgaggagttaaacaagttaataaaacaaaagcattaatacttgacatatttctcttatcactaagwcatcatgccagttagtcaaaaaacaaaaataaattcagagtacctctttcacatgttaaactcattggattatttaaatactaagtgatttaacatagtttttctgagcatttcacacacaaaacattttttttttccacatgagaccattacttctgaatwttaaggaatttcatatggtgcatgtttgaggaatttcgtatggtgcctgctgtaataggatcttggcttatttgcatttgttgatcagatgsaactaggtatagagattggatgagggaagagtaaagtaaaattacagaaaacttttaaggcttcccaagtttgttaccgtttgatagtattagaaacaatgtcactgtaatttccattttcaggcctatgtatagtgttaataagattcttgccatgagtctctttactatttatagattagtaggagccatttttatggcaatccaaagctctctgttaaacttaaaacactgtataaaatgagttgaaaagattattaataatcttacacagaatgatgtccttcagttcaaagatgttaccagtattaacagtggcacttgttttaaaagartaaatatcctactcttgtttttcattagaactctaagcaagactacaaacaaagttttcattgcaataataaatctttttgaaagggttttctgaaaccactggatttacatactttacatttgccctacctaagtttacggtaaggagccaaattcatttagcataaatattacaacccatgaatccagacatacagcaatttatgggggacattagtcttcttattatagaaaacgtttgtttaaataatgtgaataactaccaatgtttattataattttatattttttccttattcatctctaataacaatttccgttacttcttaaatcatccccgggttaagagaacataggcatttgtaagtagcaagtattacaaaaacaaataagattttttacaaaaagagaaacatcaaatttcctgttaggctcactgaccatgctctctagtgtcactctagttcctctttataagcatacgtacttaggctgcgcacagtggctcacgcctgtaatccgagcactttgggaggccgagatgggcaaatcatgaggtcaggagttcgagaccagcctggccaacgtagtgaaaccccgtctctactaaaaatacaaaaaattagccgggcacagtggcggcgcctgtaatcccagctacttgggaggctgaggcaggaaaatggcttaaacccgggaggcggaggttgcagtgagcttagatcacgccattgcactccagcctgggtgacggagtaagactccatctcaaaaaataaataaataaataaataaataaataagcatacatactttaccttcatggatgttttaaggggaaggcaggtgttaagaacttataaaaaatacaaagtgttaactttagaaattaagagtttttgaatgctgaacaacacattccatttaaataacgttaatagaaacagattttgaagcctctaacatcatggtgcattaagagcataagagaaacgagccgggcgtgatggcttacgcttgyaatcccagcactttgggaggctgaggtgggcagatcatgaggtcaggagttcaagaccagcctggcgaacacagtgaaatcccgtatctgctaaaattacaaaaattagctgggcatggtggtgggtgcctgtaatcccagctactcagaaggctgaggcaggagaatcgcttgagcccgggaggtgcaggttgcagtgagccaagattgtgccactgcactccagcctaaacgacagagctacactccgtctcaaaaaaaaaaaaagagcaaccagctggagtcaccgagcatgtagctgcccagagcctcctccctacatcatgtgtgtagcttgttccatattgtgaagggtgtgtatatgtatatgtgcacacactggcacacaaattcgtatgcatttgtcttactaaagtgtttttgtctcccctacggtctttaactgcctggttgaaccccttctgagaccactactctgtttgaagggatcttgccagcctctccctagaattgcatctctgattctgtttcttctcagatacacattcttaattgaagctaggacttaacacagtcctaaaaattaccattaattaggaccattaaaagccaaaacatcttcctgccttaggattgggtcctttaattgaagctaggacttaaccctaaaagttcccaatgattaggaccattaaaatccaaaatatcttcctgccctagcctttccttgacctgaaattacctttgctaaaattgacctgcaatgtatttcttaatatattttctgttactcgttatataatggagtaagattgtggtgggaagaaacagactcaggaatgtgttgacatttgcaaggtttagaatctagatgaggcatgaacttgaattctggagcttcttgtggtagcctgatttaacatagttaaaggccaacataaaattaatactggcagacttgaggcacaatagtactggtgatgctgtgagtgagtggtagagaaggagtggtctcttgagcccattgatgaagsctggcggtctggggaagtgaatctaagtccaagtgtacagaattcatacttaacctctttggaaaagggcagactcctccacatcagagctactccttgacctctgtgagttcctgatattctgggtcagtaaatagatgatatagatacagatatagacatagtcataggcatagacatagagcctggttaggagtatgaagtagatccaaatcctgatttttaaatataaaataatgttaattacattatgcaaaatgatttttatgcagtatacatttggaaaatttaatgacccacagaaattgattttcagaatcattgataacatcattgttttggatttatgaaaggaacatagcagtaatgaaagaaactaaattatggaatcttttcaatgatatactcagaggtttttttttttttttttttttttttttgagatggagccttgctctgtcgcccaggctggagtgtaatggcacgatctcggctaactgcaacctctgtctcccgggttcaagcgattctcccacctcagcctcctgagtagctgggactacaggcacgtgccaccacacctggctaatttttgtatttttagtagagacggggtttcgccatgttggccaggctggtctccarctcctgacctcgtggtctgcccgcctcaggctcccaaagtgctgggattacaggcatgagccaccacacccggccgatatactcagagttctaatgttttatctgttatcttttcatataaatccagagctatatacagattagttaatcccatggcagaatgtataaaaatatctgctttcatgtagtttttattttatgtggaatatttacctaaaccaggatttagttttcatctttactaaatttttcagatatacatatgtatgtatgtatttacttaattataaaacatgttctaaggaagtaaaagatatctttggatgcctttgcagaacgtagaactacttttgtttaattctgtgcccttacatattttttgtttttcttaattcataatgtggaacaaggccttctttttttctctgttccaaattttgaggtaagaggtatggcaattcacatattatgattgttttagagatgaacttaaattcacagggctttaataaacatcagccctgaataaactgaatatgtaaaacactagcactgattactctattccaaaaggaaagtccacattttctatgttaatacattttctactgcaattatttcatatggtactcagaatcatgcgggaagttgcatttcttttctctactcttcctgtatgtcatcttgggagcccaagcgaattttatattcaaaagagcaatttatgctacttattaatacatgttttttaacaatctttagggataataagttgacatagctgagagtagctgagggactgatggcatacgcaatctgttaaaacatttctttgaagagaaagcttgtgcttgaccatggttgctcggtggagagtgctcctatgcataccacaagcttggccttcagtttggaatagctcttttcattgtttgagtttggttgcactgagaaggcaagcttgttactttactgtaaaaaataaagtgcttgtccaagcttgttgcatgttggcagttgagaggctgctcttttgctggctggaacgtggacaactttttaacctctccaaggcaacgtagctgtgacaagatgtcagttaccttcaaaaagtaaataaatcacagcctttgagtttcagcataataataaagatccaatgtcctcacatgagtttctcattccacaattttgaatcatatttttttgtggcaaatgctctaccttcaaagtaaagcgttttaaaaatacagtttagagagccaggttccctgagaggaagattattaactcacaaggaaagaacagtgaattatctttaataaaataagctaagaaacaaaaacattaaagttttgtttgaaatttaaccttccttgcctatgttctttaccaaatcaggaaatactagtgtagctgtagtgtgaacatccttgtatttaagagagtgaatttaaatgtttcaaatactttgtaagacaattaaacatttgctatatgtaagttcaccttagacttacaaatttccaggaattattctaaattcattctatagaacactacctgacaagttggaaaatatggacgtaagagtctttatggcttaactgtgttaactggctgatgtttaacaacaatctacgtttcccaagtttcactccaaacccgtaagttgtactgtttcagaacatcgacaaaaacaccaatcactagatgaatagagatatttgattgaaaacaaactgttctacaaatatattaagcttgaatttgctaatctttatcaagtaattcccagtgctcaaatgtgttttgtagagtgacatactttgctgagcaaaaatggggtgtttgagttttagtttcaggtgttcttttaaccttcaaaaatagtggccgagttaatcttgggtaacaagttatcttaaaaaaatgaagaagaggccaggcacggtggctcatgcctataatcacagcactctgggaggccaaggcgggcagattgcttgaatccaggagttcaataccagcctgggcaacatagtgaaactttgtctttactaaaaatacaaaaaaatttagctgggcatggtggcatatgcctgtaatcccagctactcgagagactgaggtgggaagaccatctgagctggtgaggtcgaggctgcagtgggctgagatgatgccgctgcactccagcctgggcaaccagagtgagaccctgtctcaaaaaaaaaagtgaataagaatatacaaaacaataataataacagaaacagtgcattagatgaaagttcaaagtcttttgtggctgattgaaaaatgtaataggacygctaatgccttttatggaaagaagcaatataaactagtaatttaatgctttactccatttctacatagcatcttttaaaatttatttttagtatatcttgtcttagtggtttatgctggkgttaatattctggagataatattacatcagaattctatatcacacattttgtttttcactgtttaagaaaggtaagtaaataatacttcagaacagtgatctctgaactttttcattgcatatacctgagtactttttagcatatactactaatatgtgcatatttatttattttattatatgcaggttttatgcaatgtatataaacatataaaacaggaatttaaaaggatgtgattttatgtcttaaaaatctattctaataattttatggccagcagatgacttttttctttcctcttattttgtaacttttaattttgacatatgatacgtacacataaagttgaaaaaaatagtacrtagtaccccataagccatagcccagcacccccaatggtgatatcttatatctgtagaacaatatcaaaaccaggaaattgtcattagtacaatattattaattagactacatagcttattcagttcttatcagtttttacctgcactctcatgtttttctgtgtgtgcaatgcaatttgacccctattacagattcatataatcactactacaatcaaggtagagcattatatatttgatcaccacaaggaaactctcttgtgtactcctttatagttggattctcccatcttcttttctctgtcctctggcaaccactagtctgtgtccatctccacagttttgtcattctaaaaatgtcacagctgggcaygatggmttgcatctgtagtcctagctactcgggaggctggggtgggaggatcccttgagcctaggggttcgaggctgcagtgagccgtgatcgtactgctgcactccaacctggatgacagagcgagactccatctctaagtaaatacataaatcaaaatgtcacataaatacaatcatgcaatgagtattaatcttccaagattggcttttatcactaagcacgttgttctttagatctagccaagctgtatgtatcaatagttgtacttttttttttttttagaaggaattcttgctcttatcgcccaggctggagtgcagtggcatgatctcagctcactgcaacctccgctcccaggttcaagtgattctcctgccccagcctcctgagtagctgggattacaggtgcgctccaccacgcccagctratttttgtatttatttatttatttgagacggaatcttgctctgtcacccaggctagagtccaatggcgcagtcttggctcactgcaacctccgcctcctgggttcaagtgattctcctgcctcagcctcctgagtagctgggattacaggcacccaccaccgtgttggccaggctggtcttgaactcctgacctcaggtgatgcacctgcctcggcctcctaaagtgctgggattatargcgtgagccactgcgcccagccagttgtaccttttttattcctgagtagttacactgctttatggatgtaccagagtttaaccatttatctgtctaaggacatttaggttgtttccagttttggactattatgaataaagctgctgtgaccatccacatacaaacttttatgtgaacataagttttcatttctttagaataaagagtacaattgttgaatcatatgatatattagtttcctgttgctgctakaacaaattaccacaggctggaagcttaaacaacacaaatgtatcacagttgtatagcttaacaatccaacatatgtctcatcgggctaaaatcaaagtgttggcaaggttgcattcctttctgaaggctttagagaagaatctattcctttcctagtttctcctgttattcttggcttgtagtctcttccttcatcttcaaaggagcaatgttgcatctctctgtgcctttccttcgaagtcacatcttcatctgctaactttcttctgcctcccttttccacttttaattcttgtgtaatgttacataaggtagttctgttttaaggtcaactgatcaacgacctggatttcatctacgacctttatttctctttgctatgtaaagtaacatattttcaggttccaggggttagaatatgaacatctaggggttggtaatgttgttctgcctactgcatatgataaattcatgtttagttctattttagaaactaccaaactatcttccagagtggcatgtgactttatattcccaccagtaatgaatgagaaatctagtttctctacatccctgccagcatttcatattctagtaggtatgtagtgatacctcattgtgattttaatttgcatttctctaatggttaatgatgttgaactttttttatgtgcttctttgccatacatatttcttctttggtgaaatgtccgctcatgacttttgcacattttcctttggatatgtggtttatacaagtcctctgaatatgtggtttgcaaatattttctctcattctgtagcttgtttttaattctcttaacagggacttttgcttgtgagaaaccttataaaatttcagttcttgccttacatgagtgatgccacatgctacagtcatgaatatctcatagggttttaaagaaaacattcatatgagacagtagtcattacttaaagctgtgtttgaagtaagactttgtgctgatttggatgtagttagagttggacccagtgatgtgcttgaactggctcttcccagtttgcaagaggcaygttytgaagtccaagaatgttgcaagttagtttttaaacagtcagtagccatgttgggagtatgtatacaatggaaattggcaatcactataaatcagtgctcccctcctcactggagagtgggtagttaaatatttaccaactctctaccagtgagactggcaaagaatttgtcaagaaattgagtatttttttcctttaagtcagtgcccattgagatatatcataaataaatatgtcagggtattctcttcaccagcttataatatttgctttgtattttttgctattttatttttatttgtgtttcatcaattttgtcctgttctaattacaatttttcagaatgtcagggagtacagtggtatataagtagtatagtttaatggtgtagattagaccatacatttcagaatcagatagacttagcttacatcccacctcaatttagtagctgtatgaacctggcaatattgtcttatatgtaaaattatgacagttattatacataatrcagtcagccccccaaatttacaggtttcaaatccgtggattcaacgaatcaagggtcaaaaaaaattttaagaaaaaaaaacagtaaaaaataatgcaacaatcaaaaatttaaatgttaacacaaatgttgacaatacagtatagtaactatttacatggcatttacattgtgttagctattacaagcaatctagagatgattttaagtatagggaggatatgcagaggtyatacgcaaataactacaccattttatataaaaaggacttgagcatctgtggaatttggtatcctggtgggggttagggaggggattggaaccaatcctctgcagataccaagacaactgtatatactttgtaaagcttgtataagatgatactcataaagcatttaacagataatgtctcaataagtgttttaattgttatatcattacaactatcaccattataatctcaacagggaaagcctttcataatcacagctgattaaaatacctttttagtattcaggcatcccctgcttaacacttaatatcctaggaaatcagatgtcctacttgaaaattctaaccaggaacccattcccccaaatccccaaccaatttcctaaaagctaactaaatgcagtgaawtatytttaaagtaataaattataatttggggatgtaaaatgcttaaacagtggtttcctgatgacctaacaaatctagccttaaggaaccattgctaggttgatacactcagaggacttttcgaaatgtctacayatgatcagacctttctaccagttgtgtttggaatgtaacaggagacttccctccatacattcttttgtttaaaatgttatgttaaatttgaggaatgtaagtataaatttttcccatataaacatcagcaggaaaatgttgaatttagagacatatattgcctgagttatgggtgttaaaaccaagaggaattctatcagaaaatgttaaccacggagactctgtaagtgtgcccgatttttatttcctggtttatttactagatgaagtggatrtaactaacaggaaaacacctgattagtgctgcagactctgtgttcttatttaattctcatacaactttggaagttaaaagaccttaaattaattttgcaaagctgtacaactccttcatttctgagttgaaattcagttctactgcagtagctaatagctgtccaggaacagctattagaaaactggaaaagcatcaaggaaagcctactgaagtgtgttttcctttcgatccagtgtcttcttttctagtaaatgtcctgtctatccccccttcccctataggaagttttcttctctttcttcagatgctattatatgagatacaatttataaattcttttttttctcatctgacagtagcttttttctatacaatcagttacctttcactgtgtttttcacccatcctttttaaaatatttctgatrtcaggatttgctgcaaaagaattaacgaaaagtatcaagaagtttgctagagctttctttctactcttgcttctctcatggaatcaagtgraaaattgggctttcttattttatttcattcactgagtaactactcacaagaatgtctacttcagtaaggtagttgaaccaagcatatcctgacagcctcatggaagcaatgaatcttttaatttatattagagaggaaaacgaattaatgaggaagaaaatcataagtagatggttaggcattctagagaattatatttaaaattagctactaggtcacttctgcatcagttgttctacgtaaaagtgatagggtatcccctcaaatgttaagtcacattctggccatcctttttcataggttgcactcaaattactttcaggttagttgtgtttccttttttttttttttttttttttgtgagacacggtctagctctgtcgtctggggtggagtgtagtggcacaaggctggagtgtagtggcgcaatcacacggcacattgccacctctgccacctggacgcaagccatcctcccacttcagcctcctgggtagctaggactacaggcacacgccaccacacccagctaatttttggtttagtttgttttgttttggtagaaatgagtttcgccatgttacccagggtggtctcgaactcctggactcaagtgatcctggcctcccaaagtgctgaaattacaggtgtgagccaccacgcctagcccagttgtgtttctgtacaccagaagtgaataatctgaaaatgaaattaagaaaacagttgcatttacactgtcatccagaagaatagaatacatagcagtaaatttacccaaggtgagatacttgtatactgaaaactacaaaacatttcagaaagaaattaagaaaatctaaataaatggaaagatatcctgtgttcatggattgaaagacttaatattgttaagatgtaggcactaaccaaagtgatctatgggttcagtgcagttcctatccaaatttcagtgacattttttgcggaagtgagaaggccaattctcaaacccatatggaatgcaaggggccccaaatagccaaaacaatattgaaaaagaacacagctgaaggactttcactttgcaatttcaaaacttactacaaagttaccatattcaaaatagtgtgctactagcataagaatagactatatgtagaccaatggaattagaattaagagtctggaactaaatccatgaatacatggatttatgaattaatcgaatatccacaaggatactaagaccattcattggggaaataatagattcttcaattaatgctgctgggacaactggattttcacatacaaaaattgaagttggacccctaccttataccatatataaaagttaactccaaatggatcagtggcctaaatataacagttgccataaaattcttagaggaaatcatggggtagggatcttaaagactttggatttggccatgggttcttagatatgacaccaaaagcacaaggaaggaacacatttaatggaacctcttggcttataaaccataaacccagaccactatgtcaaaactattataaaaatcaaattagacccatgtaagcagactatatagccactgatttggatagtaatatgagaccaaatttttatttgttgacaattaacctatatacagtaactaacctgtagagtctgcatctaagaagttttgtcaaactttccaaagctaaccatcaatgtcgttatggatagaaggtaccaaagtctttagtgtaacatatttagacaatagaggtgttaggaatagtctccagatggatactaaattggttcttatccaacaacattaagaaatagccattcttctgtagttcattgtgcatgttattctcctctataatatagtaaaatatatattttgtcttccagctctgttttcctggcatgcaactcctaaaatccttagaatttccaaagtagtatctttttctatgctgatgagttgactagtggcttcagggtggggtcacaggagagaacaaggcatgattataggactgggacttgaagtccatcccacaaactccagggaggggagaggggctaaagattgagttgatcactgatgaccaatgatttagtcatctgtatcctttgtgatatctttaataataacctggtaaattaagtgtttttgctgagttatgtgagccactctagaaattaattgaacccaagcaggggtcatgggaaccctgatttatagctcatcagtcagaaacataggtaaaacaacctggggcttgtggttgttgctgtcgggtgtcagtctcctggggtcctgacactgtctctaggtagacagtttcagaactgaattggaggacacctatcaggtgtatgttgcagaaatgaatgattacttggtagtagggagaaatcccccatatatttagggttataaagtcttctgtattgattgctgtggtatgagagcagagggaaaaaaatttttttttcaactcatatcctcccactccccatagctgctcttgcctttatcagtgttgtgtgtgaaagtctgtataaggatagaaaaggagattgaggtggccctatgaactgcgtagccctggattccattccattgagttcagccaacgggatgcatcaagaattttttttttttttttttttttttgagataggtttcactgtcacccaggctggagtgcagtggtgcaatcatagctcgctgcagccttaaattcctgggcttaagcgatcttccacctcagcttcctgagtagctgggactaccagcatgtgcccctgcacctggctatcaacaggaacttagaaggtggaaggagaaagaggtcaggatatgtattccckctccctccctgccctagaacctcaattctagtattggctgtatccctttataactgtatctcttgtcctttgagccttcaccccacttcttcaacagcttcagctttgggttttgataatactgtctcctcccacttactccttccaggtcctaagcagtaatagcttcctgcagtccctagactttggttccgtcagcatgccttaacctttccagcactttgggaaatattccctaagttgatttrtcttcagagtctctaacaggaccctgactaattttctattttatttttacaagtaaaaattgtatatatttatggtgtgtatgatgttttgatatatatacacatttagaatggctaaatcaagctacctaatatatgttttacctcacatacttattttggaagatgagaacatttaaaatctactgccttagcaattttcaaatacatgatatattgttaactgtagtcatcatgacatacaataggtttcttgaacttattgctcctgtctaactgaaattttgtgccctttggccagcactacctaatcyctctgctaaccaccatttactctctctgagttcaacttttttacactccacatataagtgagatcatgggatatttgaatttctgtgcctggtttatttcactttatgtgatgtcctccagggtcatccatgttgtcaaaacataacagactttccttctttttttaggctgaatagtattccattttgttgcacattttctttatccrttcatttgttgatggacgcttaggttgatttcatatcttggctattgtgaatagtgctacaataaacatgggagtacagatagctctttgatatactgatttcttttcttttcttttagatatatacccagcagtgggtttgctagactayataatagttatattttttattttttgaggaccctctgtgctgttttctgtaattgcttatagaaattgactagttgacattcccatgtagaaaaagggaycccttttttctacatccttgccaaccctaatttttttatcttccaacttaatttttttttcctgttggctaatacaactttggcctgtcaaatcatggtagacattctgtgaatagtatcactgtagtagaagccagaatgttttatagaggaaatgtagaacagaaattaaatctggggagtcagataaatagaggtagattaaaaggatctttcatattagtgttattgcatttttctcagtgtctccaaagagtttgaaatgttgtatacgttatttagaattgtactcagaagataaagtattttaccaacaactgagcttaatttttatagtttattagtatcttcatttcctagtctccgaagaccatcttctcataaaagtgcttatatatgtaaaagtttgtttgcattttcaacctgtatcccttgatactcatccagaaacctagggtgagaatacctgtgttaactgtttttaaaaatttccatgacatgtttggtcaggggagaagaatgttctgtgacaagtgccagttttaytggtgaggtagaaaaggccttagaaggtgctagtaagacagaaaaagaactgtaggaagaaatcagtatcggagagcacagagatcctcaatccttggatatataccacccagtgaagcagatcagaaagacctatattttatagtgctgtcacaacatacaagctggaaagcaccctattatatgtgaattggccacagctaagagtaaatgattgaaatcttttaaaacttttagttacattgtttacaatttggggtaaatgtctagataagtcatktaaattttttcacctaaactcataattttgcttctagagtcctaacgagtagtgaaatggagattaatcttgaaaatcccattascttacatcactagaagcactttgtccacctgcttcctggacctagaagagtaaacctgtggttgtccagttctaggtggtagctttaagatactgcaggcgaagacatatatttgtgaccagcagattacaaacaagcaagaaagtgtaatcccattctgctatatttttaatggacaggattggatatatctttctaatcatagaagacgtctggaagaaaatggtttctgcagagggaaattaatgtattgaaggtgggaacaagattttggtttttacatacacatttctgtactgtttgttgttgctattgttttaccatgagtttgtattactcaataaaataacaaaaatggtgagatcaggaaggacaccttttcttgctatgtagattatttttgcctcatccttggttccttagtttccatttccttacagtattttccagttactcgtttttaacaatctgtggggtctgtccatagtttttcctttttcttgtcctgattaatagcctcccaatttattttctcatcgcctgcatacaactcagaccctcctattgaacgtgaaaccttctacctattcacccctctacacagatcacgcatcattttcttgtcttaactgtttcagttgttccgtgatttttgttctatgcctttgaggatttattgtttacaaagaactaaagtatttttagtttatttgtttaagctaccctcaaaagataataataggcaaaagaaacaccgtaagaacataccaaaattccactgaaagctaactagggaatgttggcttccaatcttagctagaaaatgatcaaaattcgatactggttgattttttaaaatatgaattgtgagtcatattcaaaaagagccacagcttgcagttgtagtcccaaactaaagtaggtatagatagatagttccaagagatcatctgtattacagggatcaggcaaaattgctttcacctggagagccgtttgcatggaaatacagcatggttagaggtagccctctggatccgactgcttgcttcaaatcaaactgcactttcactgtgcttaacctcagtcaagttacttgcttcttttggctttaatgttatcttgcataaaaatcagkatatttaaaatacctcactagtttgttacatgattaaatgagacaatgyatataaaataacacagagcctgttatatggttacttttagccattaacagcataatcataaaatatcacattataaagttgcaagagattctttccatacctcctcaaaagagtttttacttggaccttccagcatttgaagctatgtcaccagtggcagtctttttgacttcatataccttccaaataagtagttttattttcaaaaagctgaatgctatagtartggtgtttatcaaatatgttaccaatatttgaagttttgataccatttcttatatgcagattgatcttcgtgtacaagctaaagctaaaccrtgctaacaatatttaatgggtatayatcctgtatagaataaaatatttcctgaatttcattttccttttccagaattttatacatacatgctcatggaaacacacacaagcacacctctctgtgccctaacaacaacaaaaatcttataagtttagacttcttttgattaaaatcatatggttagtcccaaaactacaaatatatttttaatttaagtaaaagaggacactccaacaaaactagtattcactgcacctctgagcatagcacacatcctttctgagttcaggtgggtacaattagctgctastaaaaatgaaccattagtgaagtcagtgaatattaaatgtgggacttacaaggctaggaatgacaaataatgggaaaaaacattttgtactctaattttaaaaagaactatttaggagacagctgtagctggggtagctttctcttgtagaggcatttgctccattgttgagggttggtactgtctaaagttaaaccatttcagtgatgcctagcatggaacacttgacaaccaaccttccagstaggaaatgagacktccttgccagcaagtccatataatactacaatttttatgactagactatttttgcagaagtacttattgcttaattgacattaaacttaagtaagtctatctctttctcttaaaaataatcttaataacaaatagaaatctttagtatcccagtctaactcagtttagtcctatttagtttgggataagaaagtaatgtatcagttattttggcaaattatttatagaagctatgtggaataagctgtatctatttagattttatataatttggtaattagcatacaatagcttacatgaaataaattcttkaaatagtagaaattatgagtaattccactgggcttactcttgtcttagattacatagatataagtattcttgggcattttgatgctagaccaatgatttataatatcaaatacatttatttttaataccaacaaaggtcactggggttcaaagaagtaagattaagcagtcaaggaaacgtgtgggacaatagtaacacaaatactacttttaatgccctcagttgctttactgttagtagaaagtttagtaaataaaacagatgacagatctcatatcagagtaaacctagcaatagggcattaacattgatcttattaaaatacagttgaccctttgaacaccacaggtttgaattgcacaggttcacttatatgtggatttttttcaataaatatattggaaaaatttttggacatttttgataatgaggaaaaaccatgtggcctagaaatataaaaaaaattaagaaaaaatgtcatgaatgtattaaatatgtatrtactagtctattttaccatttactaacatgaaatatacacaaatctattataaaaagttaaaattatcaaaacctacacacacaaacactactcagccttaagacgataaggatgaagacatgaagacctttatgatctgcttccacttaatgaatagtaaatatattttatcttctttatgattttattaaccttttttctctagctcactttattataagaatacagtatataatacatataaaatacaaaatatgtgtcaggctatgttattggtaaggcttccagtcaataataggctattagtagttaaattttttggagagtctcaggttaaaggagaatttttgatgtgtgtagggtttggcacctctagcccccatgctttttgtgcatcaactgtaattcattttgcctgcatgataactgcttattttttaagatatattttgaagactcaaaataatatcatgttgatatagaaacattccatttccatttgtaattaaaattgaaaaaattttaattcttccatttaccttgactatcacaaatacatgtaatgattttttaaacccagtctagagctgaaccarttaagacaaaattgacataacagatttgcccacttttccattaaatatttttatccctaatcaggccctcaagttacctgctaatgctaattgtatgacttggggtaatatggatcaattattgtattttttaaaggctagaaattattggataaattgtggaaattttaattatttctagacctcatttgtagaataaagtttaatcagaatgtttgagctaaaggaaatcctagatgtcatggtccagtccctctccttttacagataagaaaacgtgaagctctagaaattaatatctttgccattatcatcagtatatgagaacagacctgcaaaagtgaactcatttatttcaatagcccatccttttttcccccttatgccacaatgcctcttaacttttaatttcctaccagttcactcttcttcccaaagtgctccttctgttaattactatttttcctaccttccctccacaccaactaaagaaaaattcctagtgcctatttcctctcagcctctagggatatttattgcctgaatgaatctcttcagtagcattttcaaaagtgtgacaagatgaaaaggacattctaatgtcagaggaactctttagggctttactaatacgaaaggtattctgtctatgaatctgccctagttacagtctttcttcttctctcttgttttttacttcactcttgaactacatgggttctctaaaaacttaggttatttttggttttaactatatgatctcctagtagggcaagtataaaaggacaaggtatacatatgtttaaagtcttgtccttttatgcctgccttacctactgaatctaaaattggtaattaagtattatagacattgaggtcccagaattttatatctcaagacaaaaaaagaatataggcagcacaatgtcatgagatttgacctatgacaggtttttcttgaatgtttctaggaggtattccactggctttttttcaatatcagacatcaccatattatgcttttttaaacgtatgtagataaaagtgaatgtggaacataaatttgcacagtcttcctggaargtggttaatatataatataaaaacttcaagtactcaccttttgtcctataaattctatttttaaaactttgtccyagataataagacaaataatccaagattgaatctgccttagagagttgctttaaggattattgcatatacactatatctacataacagaatgagaaactattaaaatggtgatacatatatctgtatgcattaacattaaaagaagttcatgcatttattaactggaaaagtagattacaaaactataaataacacaacatttatgtaaaactatgtatgttacaatggtctggaaaattrttccccaaactgctaacagagccatcacgtttattatttttactttttttttttttttttaaagaaacaaagcctcactctgtcacccaggccagagcacagtggtgcagtcatagttcagtgtagcttcagactcctagtcttttgcctcagccttctgagtagctgggactgcaggtgcacaccactttgccttgccagttttttcaaattttttttgtagaggtggggaagtggaggggctcactttgttgcccagactggtctcatgtctcctggcttcaagtggtccttccaccttggcttcccaaaatgctgggatacaggtatgagccaccatgtccagacaatttttactttttaattaatgttaatcaacattatagcaatattgtatataataaatatgaaccacttttatagtcagagaaagcaatgaaattatttttattttaaaaacaaaccaaatgtacatagccttggtatttactagcagtatgacttttaacttgttacacacttcctcatttgtaaaagggtgtaaatgtcagtcatattcccatcccatcttcctccccatttatgaatcctgagcccctgttggctccattaacagctggagtaaatgccttttgacagatgtgagggtcagatttctcatcagcaacttccttagcagaagcagtgttgttaaatagaaaaggtggagggaaaccaagatgttgacagagcctagaagagaagttagcatgatgatctaaaggagtatttgcaaagtccagaattatgtggctattttaagactgtctttagttttattgtcattaacttaatgagtttcaggaaagagggaatgtctcttttgattcattttgattcaacagttttatttttaggtatatacagaggagaattctcttggttaaaaataaaaaaggaaaacttacacagctgaagtgaatggtactctgaagtatctgtggggagactgtagttagtgacttgtgtcataccccttccacccataccagatcctttcctttgagacatgggtgcttttccctggctagtcttagaagcaatcacatttttatataatgaactctgaggggtttaaaaatgagtgagacatggtatcctggagtgcagcatatgwctgctcagcatttacaggtttgtttgtttttttcctctctttacttttccatttagtagacactaggccataaacccgttttaatttattcactgagaaggaaatgacataatattcactgctgtggctgcataggtcatcaattccctgggactcaggattacatctgagctgatatcagactscctcttcccaggatagtaaaatttgaagtctgtgtgtcaggggcctgcagtgtaagtattcgagaaagtttgttcaaagtatttcctttccaaaaagcaggaattagagaagcaagaatacaggagcaggatggtgtattaggaattttagcttaagattcctttacaatttcttctcctaagaaattttagctctctttaacagtgtggttgtcaagtatgctagtgaatcttacaaaaattatgcaactggagaaatgaaattatttgctatttgtactggcttatgtgcaggcaaaataaaagtaggcaatggatggaagaaaacagagacttttgctttattaaggtgaagtgaatttcacctccttttatcgtttgaagtattgagaggtttttgttagagtgttttgtttggaaaagttatacagattttgcctttaagaacaaaattttaaatctctctaagaggtttagtattgagtggcaattattttgtttacttgtctgtcttctctgttgactatgaactccttcgtggtrgagatggtgttgcttatgtttgataagtccaatcccagactcataaatgtttatttggttggataattagcaaattaattaattttgcctgttaatgcagataattttgcttaaaaatagttttacataaacacatatacatacatacatacatacatacatacatacatacatacatacatacagtgggcctaccttctattttctgctgctttcaacttaagcttgggaatatttttgctatagctatttacaaagtttttgcattaaaggattaaatcactctaagttgagtgggaattggaaggagcaataatattggggctatttttaaaatgtctgtatgctggagaataggaaatggttaactatggccagacctataccctagcatatctaaatctattacaaaagtgaattaaccactgtattaaagktttctagagagacagatccaataggagccatttattatctagatctatatatgagtttattagggagcactggctcatgtgataacactgtgaagtcccatgataggctatctacaagctgggggaagacaaaagctgatagggggcccagtccaagtcataaagccttaaaaccagggaatccgacagtgcagttatcagtctgtggctgaaagcctgagagcctccaggaggccgctggtacaattccacagtccaaaggctggataacctggagtatgatgttcaggagtagtaagagaggaggcaagcgtctgacacaggtagaaagagaaagccagaagtctcagcaaactgcttataccccttctcctgcctgttttgttgtagctgctggcrgccattggatggcacctgcattgaagggtattgctttcagtccatcaactcaaatgtcagtctcctctgacaacaccctcacagacacacccagtaacaattctttaccagccatctaggcatccctcggttcagtcacacctaatattaactaaccgtcacaaccgccattccccatattagtacttagtgtgctaagtcagtgcaaaatgtgggacamttaatttacataatttctttttatattttaattcctgtgaataatatgtgtgctcttaagtatttataaacataaacatagaaaaacaaacacttgtgatttttatattcttgagtttaaggaaatatatttaatctatttcaggcagttaaaatataattttacttgtgcatgtgtataaaatatttctcaaagtagtactctgtaacaagaaaaccttgaccctgtttcttcaaatgaatataagctctaataaatagacatttgttcaawctctgaactatttaactgtaatgagttgaaaaaaaatttttttttttttgagacagagtttcgctcttgttgcccaggctggagtgcagtggtgagatcttggctcactgcaacctccgcctttctgtttcaagcgattctcctgcctcagcctcccgagtagctgagactacaggcacatgccaccatgcccagctaattttttgtatttttagtagagacggggtttcaccatgttggccgggatggtctcgatctcttgaccttgtggtccacctgcctcggcctcccaaggtgctgggattacaggcgtgagccactgcacccggcagaaaatcttaaatctatactatagagtctgacaagaatttgggacccaaaagcaatataattctattacatatttatcttaacaagtaacattttaaaagtccatgtaatttatagatttatttgctttctctaacaagtaatgcttytaataaaaatctgggcctggtggggtggctcatgcctgttatcccagcattttgggaggctgaggtggacgcatcacaagatcaggagttccagaccagcctggccgatgtggtgaaaccctgcctctactaaaaatagaaaaaaaaattagctgggtgtggtggtgcacgcctgtaatcccagctgcttgggaggctgagacaaaggaagtgctagaacccgggaggcaggggttgcagtgagctgagatggcagcactgcactccagcctaggcaacagagcaagactccaactcaaaaaaaaaaaaaaaaaaaaaaaacctggagttaaaattaaatttagcatataacttaacaacaacttaaaattacctctgttgtcacatattctagttgctagtgatttttagcagtgattcttgtgttattaatgagctaaaaacttcttcagcttataatggttaatcagtttttaaatgaatttaccaattttgtaattaaacaaaatcaatcattttggaggctcaggtagtcataatattgtgtaagattggcacatgtttttatgaggttaatttatgtggtgtcctaacttcataaatttgatacatgaacgacataggacattttaaaaaacctacatagtgtcttacatcaactatgtagtatcctatgtagtgtgtatctctgggaaatttctttagtgattgtctccgtagcactgcagctgcctgtctagttggtagccactggccacatgtggctattgagcacctgaaatgtggcttttccagcacctgaagtggggcttttccaaatggagatgtgagttttttgttgttgttttgtttattttgagacagggtctcactctgtcacccaggctggggtgcggtggcacaatcatagctcactgcagcctagacctcctgggctcaagcaatcctcccacctaagcctcttgagtagctggaactacaggcatgcatcaccatactcgggaaattttttaatttttatttttttgtagagatgtggtctcattgtgttgcccaagctggtctcaaactcgtaggctcaagcaatcttcctccctcagcctcccaaagtgctagaactacaggcgtgagccactgcacctggcctgagatgtcttttrtacaccagattttgaagactattcaaaaacaatgtaaaatatttttaaacaattgttaacattgatttttaaatgatgatattctggaatattggattgaatatattacatttgttttacttttttaaaaacctttaaaatatagtttcttaaaaaatgtaaaaatggccaggcrcagtggctcacacttgtaatcctagcactttgggagaccgaggtgagcagatcacctgaagtcaggagttcgagaccagcctggccaacatggtgaaaccccgtctctactaaaaatacaaaaaaattagacrggcatagtggcacgtgcttgtaatcccagctactcaggaggctraggcaggagaatcatttgaacccgggaggcggaggttgcagtgagccaaaattgcgccactgcattccagcctgrgcaacaagaacaaaaactccatctcaaaaaaaaaaagtaaaattatatttgtagctcatactatatttcttttgaacaacactgatctaaagtgctatgtttttcattgtccgtttaaatggattatgatgtaattagactagagatctcatgggttttagaactaaaatgttctggggtcagatgtggcttctggcttttacttatttgtatttctggcctcagttgtacccgaaaataaatttttgttggaaatacagtttgtcctgagctaatagaggaacatgatttaccttcaattctggagagctagtaaaataatttagaacactatgtcaagaatgattctttctcactcataacactttcttgtgtgtctgttattttaagtatcaaaattctcctttaaaactctgggatagatgtttcacatgtttcttcttgacctaaaaggtgtcattttcaggcaccaaaagttcttaaacactaatattctggtatgtagctgctgatgaaaaatgtacttcttagcaaatcctaagctggatacacataaaatcacacaaggcatagcatgataaaattgtataaaaccaatgataaagaggaaaatttttttagttatgttatggtaagaacatttaacatgaggtctacctttaaaaattttttttcagtgtataatacagtattaccaactgtaggtgtaatgtcatacagtagatgtgtagaacttaactgaagcattgcttcactgaagcattatgcctgttgattagtaactcctcatttccccctctccccagcacctggtaaccatctttctactctttgattctatgaatttatctattttagatacctcagttaagtagaatcatgctatttgtctttgtgtgactggtttatattacttagcataatgccttcaagtttcatccatgttatcccatatggcagaatttccttctttttaaagactgaataatataccatcatatgtatatgccacattttctttaatccattcatctgtagatggacatttaagttgtttccacatcttggctcttgtgaatagtgctgcatgaacgtgagggtgctaatatgtctttgagatcctggttttrattcttcttgacaaatacccagaagtgggattgctggattaatatggtaattctattttaattttttgaggaacgttcttactcttttccatagcaggtgcatcattttgcagtctcatcaacagtgtgcaaggattccagtttttccacatcctcaccaacttttattgccttttatttctttgattatagccatgctgacaggtctgaggtgaaggctcattgtaagtttgatttacattccctcagtgagtactgacattgagtaatttttcatatacctgttgcccatttgtatattttctttggaaaaatgtctgctcaactccttagcccatttttaatttgggttgtattggtccactctcacactgctataaaaaaatacctgagatggggtaatttataaagaaaaaaaggtttaattcattaatggttccacaagctatccaggaaacatggctggggaggcctcaggaaacttccaatcatggcagaaggcaaaggggaagcaggcacatcttcatatggccagagcaagaggaagagagaggcagaaggtgccacatacatttgagcaaccaaatctcacagctaccacaagagcagcaccaaggggaacattctcccccatggtccaatcacctcccaccaggccccacctccaacactagggattatgatttaacatgagatttgggcrgggacccaaaccatatcatgggttattggggtattttttaaattgagttgtaggggttccttatatattttggagactaacccctaatattggatacatggtttgcaaatgttttctccaattcagtaggttgctttttcactctgtcgattgtttcctttgccttgcagaaactttttagtttgatacagccccactagtttatttctatttttgcattctgtgcttttactgtcatattcatgaaattatcaccaggaccaatgtcattaagcttttcccttatgatttctgtaggagttttacagctttaagtcatatgtttaaatctttaatcctttttgagttgatttttgtatatgatgtaagataagggtccaatttcattgttttgtttktgggtatctagttttcccagcaccatttatttatttatttgttttgttgagtcatctctcctttttctttttttcttttctttttttaaattatactttaagttttagggcacatgtgcacaacgtgcaggtttgttacatatgtatacatgtgccatgttggtgtgctgcacccattaactcgtcatttaatttaggtatatctcctaatgctatccctccaccctccccccatcccacaacaggccccggtgtgtgatgttccccttcctgtgtccatgtgttctyattgttcatttcccacctgtgagtgagaacatgcggtgtttggttttttgtccttgcgatagtttgctgagaatgatggtttccagcttcatccatgtccctacaaaggacatgaactcatcattttttatggctacatagtattccatggtgaatatgtgccacattttcttaatccagtctatcattgttggacctttgggttggttccaggtctttgctattgtgaatagtgccgcaataaacatacstgtgcmtgtgtctttatagcagcatgatttataatcatttgggtatatacccagtaatgggatggctgggtcaaatggtatttctagttctagatccctgaggaatcrccacactgacttccacaatggttgaactagtttacagtcccaccaacagtgtaaaagtgctcctatttctccacatcctctccagcacctgttgtttcctgactttataatgatcgccattctaactgttgtgagatggtatctcattgtggttttgatttgcatttctctgatggccagtgatgatgaccattttttcatgtgtcttttggctgcataaatgtcttcttttgagaagtgtctgttcatatccttcacccacttgttgatggagttgtttgtttttttcttgtaaatttgtttgagttcattgtaaattctggatattagccctttgtcagatgagtagattgcaaaaattttctcccattctgtaggttgcctgttcacgctgatggtagtttcttttgctgtgcagaagttctttagtttattagatccyatttgtcaattttggcttttgttgccattgcttttggtgttttagacatgaagttcttgcacatgcctatgtcctgaatggtgttgcctaggttttcctctagggtttttatggttttaggtctaacatttaagtctttaatccatcttgaattaatttttgtataaggtgtaaggaagggatccagtttcagctttctacatatggctagccagttttcccagcaccatttattaactaaggaatcctttccccatttcttgtttttgtcaggtttgtcaaagatcagatagttatagatatgtggcattatttctgagggctctgttctgttccattggtctatatctctgttttgataccagtaccatgctgttttggttactgtagccttgtagtatagtttgaagtcaggtagcatgatgcctccagctttgttcttttggcttaggattgacttggcaatgtaggctcttttttggttccatatgaactttcaagtagttttttccaattctgtgaagaaagtcattggtagtttgatggggatggcattgaatctgtaaattaccttgggcagtgtggccattttcacgatatygattcttcctacccatgagcatggaatgttcttccatttgttcgtatcctcttttatttcattgagcagtggtttgtagttctccttgaagaggtccttyacatcctttgtaagttggattcctaggtattttattctctttgaagaaattgtgaatgggagttcactcatgatttggttctctgtttgtctgttattggtgtataagaacgcttgtgatttttgcacattgattttgtatcctgagagtttgctgaagttgcttatcagcttaaggagactttgggctgagacgaaggggttttctagatatacagtcatgtcatctgcaaacagggacaatttgacttcctcttttcctaattgaataccctttatttccttctccttcctgattgccctggccagaacttccaacactatgttgaataggagtggtgacagagggcatccctgtcttgtgccagttttcaaagggaatgcttccagtttttgcccattcagtatgatattggctgtgggtttgtcatagatagctcttactattttgagatacgtcccatcaatacctaatttattgagagtttttagcatgaagsgttgttgaattttgtcaaaggccttttctgcatctattgagataatcgtggtttttgtctttggttctgtttatatgctggattacatttactgatttgtgtatgttgaaccagccttgcatcccaggaatgaagcccacttgatcatggtggataagctttttgatgggctgctggattcggtttgccagtattttattgaagatttttgcatcgatgttcatcagggatattagtctaaaattctctttttttgttgtgtctctgccagtctttggtatyaggatgatgctggcctcataaaatgagttaggaaggattccctctcttcctgttgattggaatagtttcagaaggaatggtaccagctcctccttgtacctctggtagaatttggctgtgaatccatctggtcctggactttttttcgttggtaagctattaattattgcctcaatttcagagcctgttattggtctattcagagattcaacttcttcctgktttagtcttgggagggtgtatgtgtcgaggaatgtacccatttcttctagattttccagtttatttgcatagaggtgtttataatattctctgatggtagtttgtatttctgtgggatcggtggtgatatcccctttatcattttttattgcatctatttgattcttctctcttttcttctttattagtcttgctagcggtctatcaattttgttgatcttttcagaaaaccagctcctggattcattgattttttgaaaggttttttgtgtgtctatttccttcagttctgctctgatcttagttatttcttgccttctgctagcttttgaatgtgtttgctctttcttctctagttcttttaattgtgatgtcagggtatcaattttagatctttcctgctttctcttgtgggcatttagtgctataaatttccctctacacactgctttgaatgtgtcccagagattctggtacgttgtgtctttgttctcgttggtttcaaagaacatctgtatttctgccttcatttcattatgtacccagtagtcattcaggagcaggttgttcagtttccatgtagttgagcggttttgagtgagtttcttaatcctgagttctagtttgattgcactgtggtctgagagacagtctgttataatttctgttcttttacatttgctgaggagagctttacttccaactatgtggtcaattttggaataggtatggtgtggtgctgaaaagaatgtatattcggttgatttgaggtggagagttctgtagwtgtctattaggtccacttggttaagagctgagttcaattcctgggtatccttgttaactttctgtctcgttgatctgtctaatgttgacagtggggtgttaaagtctcccattattattgtgtgggagtctaagtctctttgtaggtccctaaggacttgctttgtgaatctgggtgctcttgtattgtgtgcatatatatttaggatagttagctcttcttgttgaattgatccctttaccattatgtaatggccttctttgtctcttttgatctttgttggtttaaagtctgttttatcagagactaggattgcaacccctgcctttttttgttttccatttgcttggtagatcttcctccatctctttgttttgagcctatgtgtgtctctgtacatgagattttgagaykagtttcctgaatacagcacactgatgggtcttgactctttatccagtttgccagtccgtgtattttaattggagcatttagcccatttmcatttaaggttaatattgttatgtgtgaatttgatcctgtcattatgatgttagctggttattttgctcgttagttgatgcagtttcttcctagccttgatggtctttacaatttggcatgtttttgcagtggctggkaccggttgttcctttccatgtttagtcccagcaccatttattaaagaggaaaatcttaaaagcaactggagaaaaaaaaaagataagatacagattaataaggtaataattcttattccctatagaarccatgcaaagcagaacacaaggaaatgacatatttcaagtgctaagtggatgaatctcagtcagattattcggaatactaatagcgttcatttatttagtacatattgtaaaccagaaattatgctgattattttaatatgcattatctcatttaatccttacagcaacccggagaggcarctagaattaacacattttagaggtgaagaaaatgaggctaagagaagccaagggacttggctaataaatgttacacacttagcaaatggaaaattcaggatttcaaaccagatatgattaacataagccatgtctcctctyactattaaccataactggtagaacatatacataacttaaatttgataggtaagctgattggaggctatttgttgtggtacgaatgtttgaaaattgctgtcagtcagcaagtatttatcaagcacattagatattccaggctggaactggaatggaatcatgaacaatacaagtatggttctttatccttatggagcttataaatgtctaaggaaaagaaatgtggtaattctaggtacttctgaggatggttctaaggattaaatgatatattaaaaaraaccagcacaatttctggcatataacatttatgttcaataattttaagtatttaaaaaaatagttataagtagtctaagtgttctgaataagtgccaagtgctgtggaaggacattggagggaaaaagctaacatagtctgggagattaggaaaggcttccctgagttattgatttttaagcagaatctgatgagtgaataatctgttagccagagcaaagagattggacacaaaagatcattatattcaaagggctgcacatttgataagacattgcagaggttgaagagagcatagtatgttcttattctaaagacagtgggaaacaaatgaagctttttaaggatgtgggtggagggttgctggcaataatcatgttagccttaaaaaatcatttcatcattccagcaacctctaagaacagtctttgaggaatgtggcaagagtagacacgaggataaatgtgaggaagtggttcaaacagtgggaacagaacaaagtggacaaagctacttacatggaatatacaaaatttggcaattttggatgtaggaaaggagaaagaagatgcacagttcttaggtttctgggatgatggaaatgccgtttcctgagaatggaaatatcgcaagttttgagagaaaattattagatatctttatttggatatacctgtatgctgtgtcagttagagagatatcaagtaggcagtttgacacactggtgctctgaggagaaatttggacccaatatctagattttgggaatcatttatatgcatactttagagatatcgtatgttcggttccagatcagcaaaataaagtgagtttctcaatctattaaatgtgcaaaagaattatgtctaaaaaaacaattttttttattgtttcagaatactttattgctaaaaaaatgctagcaatcatctgagccttcagcaaatcatagtctttgctggtgggtcttgcctccataaagatgactgctgactgatcagggtggtggttgctgaaggttgaagtggctatggcagtttcttaagattaacagtgaagtttgccacatccattgactcttgttttcaggaaagatttctccatagcatgtgatgctgcttggcaacattttacccacaatataacttttaaaactggagtcaattctctctgccactgctttatcaactaagtttatgtaatatcctgaattatttgttgacatttcagtaaggttcacagcgtcttcaccaggagtagatttcatcgcaagaaaccactttcttggctcatccataagaaacaattcttcattcaagttttttcatgagattcctgcaattcagtcataatttcaggctccacttctaatcctagttctattcctattttcaccccatttgcagttacttccctccactgaagtcttaaacccctcaaagttattcgtgagggttggaatcaacttcttccacacccctgttaatgttgatattttgacctcccctgaatcatgaattgaccttctcccctgagtcatgaatgttcttaatgacatctagaatagtgaatcctttccagaaagttttccgtttactttgcccatattcattagaggaatcactatctatgactgctgtagccctacaagatgtatttcttaataagacttggragtctaaattattctttaattcatgagttgcagaatggatgttgtgttaacaaggcttgaaaacaacactaatctacatctccatcagagttgttggctgactaggtacactgaaaatgatcagtaatattttgaaaggaatcattttatctgagtagtaagtttcaacagtgggcttaaaatatccagtaatcatgctataaacaaagtgttgtcttgcaggcttggttgttccatttatagagacaggaagagtagacttagcatattcttaagagccctaggattttcagaagggtaaatgagcactggcttcaacttatatttaccaactgcattagcccccaacaagagagtcagcctatcctttgaagttttgaagccaggcattgatttctctctagctatgaaagtcctagatgacatcttcttccaatataaggctgtttcatctacattgaatatctgttgtttagtgtggccaccttcctcaattaccttagcaacatgttttaaataacttgctgcaatttctgtatcatcacttgctgcctgaccatgcacttttatgttataaagactgcttcttttcttaaacttcatcaaccaacctctgctagcttcaaactttcttctgcagcttcttcacctctctcagccttcacagaattgaagagggttagggccttgctttggattaggctttggcttcaaggaatgttgtggttggtttgatcttttatccagatcactcgaagtttctccatatcatcagtaagactgttttgctctcttagtattcatgtgttcactagagtagcacaattyccttsaagagtttttccttagcattcacaatttgcttactgattggcagaggaggcctagcttttggcctttctcagttttcaatgcacctgcttcacaaagcttcatcacttctagctttttatgtaaagtgagagatgtgggactcttcctttcacttaaatacttaaaggccrttgtagggttattcattggcctaatttcattattattgtgwctcagggcataggaaggcccaaggagaggragaaaagcagggaacaaccagttggtggaacaatcagaatacacacaacatttgtcagttaagtttaccatcttatatgggcatggtttgtggtgacccaaaataattacagtaaaaacatcaaagaacagtgatcacaggtcaccataataaatattataataatgaaaagtttaaaatgttgcaaaattaccaaaatgtgacacaaagacaagaagtgagcacatgctgttggaaaaatggctgcagtagacttgctcaatgcagggttgccacaatttacaatataatacattgtattataaaaaatacaatatctgcagagcccagtaaagcatagtgcaataaaatgaggtgtgcttgtatttatagatgatatctaaagtcaaagaatgggtggaacagtgaagacgaagaaaaagaagaaagttaagtataagctctgaggcacttcaacttttaaatttagccagagggggaggagccagcaagtaacaatgcatgaataggaatatctagagaaataagaggtataatgtggagygtcagaagccaaaagcgaagtgtgttaagaacaaargtgtagttcatcttttccaatcctgctgaaaattagggcaagatacagacagaaaaggcatttcttaaaattttaacaacctggaattcattcrtgattttaacaagaatcattttggtggagtgagagggacagatttgagtcagctgagaaaagtgtgacaaatgaggaaccagagacagagcttaaacaattctttagctatgagtgtggaagaaagagattgggcaatagctaagacaggataatgtgttgaacgagggtttttagtaggcaggagatatctgatggaaaagagcaaatagagaacttgaagatactgcattgggggatgattgcagtgcaatgttatgtcgtggcagaatgaggtgggattgggagagattgctcttagataagaagaattgctggtctgatgtaaagttaggcaaaatattttaaaacatactattaaagctaactgtcaattcttagcatcacaatgaaatcatgaaaaccccgcaggtgcttcgcagttcctacagggaatcttccttgttacaacaacaacaaagcaaaagaagacaccaaaccgaccaacagcaaggagtaatattgaatattcaaaaataaaatctattccttgacttcaaatcattaaagtagarctgcctatttaagaacttttatttgcacagtcctrttaattttaatgcctaaagcagtgttaatcgcatgacccacgtgaaaagattttaaaaattgctttgttagaaaatgtaatagacttgtcgttaaagttttcaaactcttttttaaagatttgtaatatttggctagagttccatttattttctttaaaaaaattatgtacacacacacacgcacacacacacacacacacagtcactcctatcccgcaccctcagagaaagtttgagattatacagccacatctgtcagagctgtgctaacctatgtcatccatctgttctggttatattttccttccctttcctctctttttcttccattctccccagcctttaaaagaaaaaaagttgagagtaaaaacaaatcacctctttttatattgaaatttaaggtggaagaaaagtggttataaaagcatctatcatcatagcactgacttgccaagttaagtatttaggttggaaatcatgcctttccaactgcttaaaaacaggaagtatctctgctaagtgataaatagctccctgttgctggaaaggaaggcctcttttatttctttctacatttttgagcaataataaatgagttctgcattttcatacatgggtgtatgtgtgtgtgtgtgtgtgtgtataatgcagaaatccatttgcagtgtttatgtatacatatatacctcagtatatgtaaatatatgtgaaaatactttccaagactttaagcatagaatctcttctcataagccagcccaggcacatcttactcaacaattcaagcaaaacctttggatctgtcagaaacagcttataggtckgcattaggtgattaattgccaggagaatctggttctatattttgttacatataattattttcttttctaaaggtgttcttttattaagctcccaccataaaagaggggaaaataagcacrcgtcttacatgcctgatgtttagcacttcttacaaaagaaagaggaaaactttaacataatccactgataaaagcatatttgtcttggcttcagacagttttctcctcatttttaccaaaactttaataatattttaacttgcttagaaattagtcttgggatagcagtatggaataatggaatatactttggttatacaatctgacggtataaaattaaaccttagttcacattctatccttaatgcttactaccactctgaccttttacaattacttaacgtcttcaagcttttatttccctttttgtaaattgactataagaatacatatctccttttgagtgttactgtgaggattgcactaattaccatagtaaagcacttattacagttctgaaaatatagtaggaacccaataacattaccattttaaacattattagtttgcttattctaagctctgccacttaatcatgtatgactcaatatcaatattacctccatgggcctcagtcttctcagtaaatacaggagtttagaaatggaagaattttttgtgagactaatgtcctgtgattctctaattatcttcatatcaaatgaagaaaaagtattttcattttagatacaaattattcttatccccataactgacaaagcaaggaatatggcttctacaatgtaatttctgctttacttttgactgagtattcataagacttcttttggtgttgattatggtctctagagcgagactgccaatatttcaattctggctccccaccacttaccagctatgtaactttaggcaaattatttaacctctctctaactcagttttattatctataaagtgagactaataatagtacctcgccttccgggctgttgtgcagattaaaggagttttatgtaaactcattcatgaattttatgtaaaagagtttgaacaatatcaagcatattgtacatttcacatgcacatattattgttgtcatcattgtcattgtctggaataacatcaattgcctctaaccatagcatgggaatactgtaatagatgaataagagtttgactatctgaaatgcagttctagcaccataggctttgataagtatcttactaatgacagatctctaaatatgcatgcacataccaatagagtgagggaagaaaatttagaaacatactcatgactattttatgtaccattctttttaatgtacacttttgtgttgtatacaatataytaatacaagaaggcatgtgtatgctttctgactaaacattaaaaaatgggggaaaagtgctcacatagtttttactaatatgaatgaatgatcaaaaaactttggagacagctgtcctaggagacagtgtcttccaaaggtggtgttaacttgacctcgccatcagtctcagttgtctgccctgtactagatggagatgaacatgtattgaagaagcaaatcaaactttcatgactccagagagtctggaaagaccacaacgagtagtcctttgctaaagatagaataagtgtagtatggaatccaagttattctgactatgtcaactacttggtgtgactgaataatcaaatacctgagagatgtcaaataaatcattccttttcagtactcatatttggacttcaccatggaagaaaatactgctgttctcagtgcccagggactacaaaaccacattcccacagaataaccaaattccttttctgcttatgtttaacagcagtgcaactgggcttttctaatagattttaaactttttgttataaatattgttacctccacggaagtgaggaaattatattttttaactattctgcttagaaaataccacaaataaaggaaaatcaataaatttctttcttaagtggatacattttaaagcagagttaccagtatttgaaaataactcaaaatgaacttctttctctctaagaagttctcataatgggttgatatgacccatgtgttagtacatagatacctaggagtaaatgcccccacctcctttgggtaatgtatttttggggggaatctgatagatacactctcctgaaaatacaaatacaaaatttttacacgtaaaatttagcctacagtttcaaggcttcatagatactgttttccctaaacgcattcaagaacctttaggtaactgagatcttctggatgtgaaagggatgtagctacatatacattccaacccataagccactgtgtcatcattgcagtttatgataagctttctgtaaacccttcattttctaggtttggcttcaaaagtcattggtgcaattcttaattacatagttacgtcttgttttttaacgcttgaaatagtgttaaaatgatggcatctgcattatctctttgctgtgtgatatttgcttattatgttttaattatttaaatttttatgaggccaccatgtaagttataatctgaatcttcccaaagatatattgtcttacattctgccacagaattaaaatgacaaaaatagtgcatctcatagcaaagacatagagttccactttacagatgagaaagctaaggcttaagagcacttagagtgatttgattcatttatgaggtaagggactgtccacgttcacctatgaggcttttttaaactaacttgtacaagccatatctctcaaagtctagtctaggaactttctctgtcagagtcagctggcaagcttattaaacatgcagggtctgacctctccctccagaccaaatgggatgtaaatggggaacaagattcttctagatgagcagataagccagatgattcctgtgcacattgaggtttgagaaaccctgaaaattggtttaactttaactgcacattagaatcgaagaaaataatttgcctggacctagactgattgattgtcactggagcaaggaggtggaggtaacctaggttcttaaagttcaccaagtgattgtgatgcacagtgaaggttaaaaaccactactctaaagtatttagaaagttttcctgtaaaaggccagatggtaaatattttagactttataggctacatctgttattccttgtagctactcaactttgctgacttagaatggaaatagccatagataatatgcaaatggctgaacagggccatgttctaacacttcatttataaaaacagctggtgggacagattgtagtttgccaaaccctacagaggggggtacagtccctgccatgtgcctcaaaggtgctgttagactgtgttctaaacctgagatgtttctagttgtttgaagtaaaggtggaaaactaccatattaaaattcaattacgggctgggcatgatggctataatcccagcactttgggaggagatcatagtgacgccacttgaggccaggagttcaagaccagcctggccaacatggtgaaactgtgtctctactaaaagtacaaaaattagccaggtgtggtggtgcmtgcctgtaatcacaactacttgggaggttgaggcatgagaatcgcttgaacctaggaggtggagkttgcagtgagctgagatcatgccactgcactccagcctgggcgacagagtgaaaccttgtctcaaaaaaaaaaaaaaaaaaaaaaaggagttccattccaagagggccaaataggaacagctctggtctgcagctcccagcatgatcgacacagaagwtgggtgatttctgcgtttccaactggggtgactagttcatctcattgggactggttggacagtgggtgcagcccacggagagtgaactgaaatagggtggggcattgcctcacccaggaactggaaggggttgtgggatttccctctcctagccaagggaagccatgacagacrgtacctggaatatcgctacactcctgcccaaatactgcgcttttcccatggtcttarcaactggcagacaaggagattctctcccgtgcctggcttggcagatccaacacccacggagccttgcttgctgctagtgcagcagtttgagatcgacctgcgaggctgcagcctggcagggggaggggcatccgccattgctgaagcttaagtaggtaaacaaagtggccaggaagctcaaactgggtggagcccactgcagctcaggaaggcctactgcctccatgwactgtacctctgtagacagggcatagctgaacaaaaggcagcagtaacttctgcagacttaaacgtccctgtgtgacagctctgaagacagcagtggttctcccagcacggcatttgagctctgagaacggacagactgcctcctcaagtgggtccctgacccccatgtagcctaactgggagacatctcccagtaggggctgacagacacctcatacaggcgggtttccctctgcgatgaagyttccagaggaaggatcaggcagtaatatttgctgctcggcagcctccgctggtgatacccaggcaaacagggtctggagtggacctccagcaaactccaacagacctgttgcttagggacctgactgttagaagaaaaactaacaaaccaaaaggaatagcatcaacatcaacagaaaggacttccacacaaaaaccccatctgtaggtcaccaacatcaaagaccaaaggtagataaaaccacaaagatggggagaaaccagaacagaaaagctgaaaattctaaaaaccagagckcctcttctcctccaaaggatcacagctccttgccagcaacagaacaaagctggatggagaatgactttgacgagctgacagaagtgggattcagaaggtcaataataacaaacttctccaagctaaagaagcgtgttctaacccattgcgaggaagctaaaaaccttgaaaaaaggtgagacaaatggctaactagaataaacagtgtagagaagaccttaaatgacctgatggagctgaaaaccatggtatgagaacttcgtgacacatgcacaaacttcagtagccaattcaatcaagtggaagaaaggatatcagtgattgaagatcaaatgaaagaaatgaagcgagaagagaagtttagagaaaaaagagtaaaaagaacaaagcctccaagaaatatgggactatgtgaaaagaccaaatctacatttgattggtgtacctgaaagtcacggggagaatggaaccaagttagaaaacactcttcaggatattatccaggagaacttccccaacatagcaaggcaggccaacattcaaattcaggaaatacagagaacaccacaaagatactcctcaagaagagcaaccccaagacacataattctcagattcaccaaggttgaaatgaaggaaaaaatgttaagggtagcctgagagaaaggtcagattacccactaacrgaagcccatcagactaacagcggctctctcgggcagaaatcatacaagccagaagagagtgggggtcaagattcaacattcttaaaagaattttcaacccagaatttgatatccagccaaactaagcttcataagtgaaggataaataaaatccattacagacaagcaaatgctgagagattttgtcaccaccaggcctgccttacaagagctcctgaaggaagcactaaacaaggaaaggaacaaccagtaccagccactgcaaaaacatgccaaattgtaaagaccatcgatgctttgaagaaactgcatcaattaacaggcaaaatacccatctaacatcataatgacaggattaaattcacacataacaatactaaccttaartgtaaatgggctaaatgckccaattaaaagacacagactggcaaattggatagagtcaagacccatcagtgtgctgtattcaggagacccatctcatgtacagagacacatacaggctcaaaataaaggaatggaggaagatctcacaagcaaaaggaaagcaagaaaaatcataggttgcaatcctagtctctgataaagcaggctttaaaccaacaaagatcaaaagaracaaagaaggtcattacataatggtaaagggatcaattcaacaagaagagctaactatcctaaatatatatgcacccaatacaggagcacccagattcataaagcaatctgggagactttaacacaccactgtcaatattagatcaacgtgacagaagtttaacaaggatatccaggacttgaactcagctctgcaccaagcagacttaatagatatctacagaactctccaccccaaatcaacagaatatacattcttctcagcaccacgtcgcaattactctaaaatcgaccacataattggaagtaaagcactcctcagcaaatgtaaaaacaggaatcacaacaaactstctctctgaccacagtgcaatgaaattagaactcaggattaagaaactcactcaaaaccgcacaactacatggaaactgaacagaacagcctgcccctgaatgactactgagtaaataacaaaataaggcagaaataaggatgttgtttgaaaccagtgagaacaaagacacaacgtaccagaatctctgggacacatttaaagcagtgtgtagagggaaatttatagcactaaatgcccacaagagaaagcaggaaagatctaaaattgacaccctgacatcacaattaaaagaactagagaagaaagaggaaacatacaaaagctagcagaaggcaagaaataactaagatcagagcagaactgaaggagatagasacacacaaaaaacccttcaaaaaatcaatgaatccaggagctggttttttgaaaagatcaacaaaattgatagactgctagcaagactaataaagaagaaaagggagaagaatgaaatagacgcaataaaaaatgataaaggggatatcaccaccgatcccacagaaatacaaactaccatcagagaatactataaacacctttactcaaataaactagaaaatctagaagaaatggataaattcctggacatatacaccctcccaagactaaaccaggaagaagttgaatctctgaatagaccaataacaggttctgaaattgaggcaataattaatagcctaccaaccaaaaaagtccaggaccagacagattcacagccaaattctaccataggtacaaagaggagctgttaccattccttctgaaactattccaatcaatagaacaagaaggaatcctccctaactcattttatgaggccagcatcatcctaataccaaagcctggcagagacaaaacaaaaaaagagaattttagaccaatatccctgatgaacatcgatgcgagaatcctcaataaaatactggcaaaccgaatccagcagcacatccaaaagcttatccactatgatcaagtcagcttcatccctgggatgcaaggctgtttcaacatacgcaaatcaataaatgtaatccatcacataaacagaaccaatgacaaaaaccacatgattatctcaatagatgcagaaaaggccttcgaaaaaattcaacagccgttcatgctaaaaactctcaataaactaggtattgatggaaatatctcaaaataataagagctatttatgacaaacccacagccaatatcatactgaatgggcaaaaactggaagcgttccctttgaaaaccggcagaagacaaggatgccctctctcaccactcctactcaacatagtgttagaagttctagcctgggcagtcaggcaagagaaagaaacaaaggttattcaatttagaaaagcggaagtcaaattgtccctgtctgcagatgacatgattgtatatttaaaaaccccatcgtctcagcccaaaatctccttatgctgataagcaacttcagcaaagtctcaggatacaaaatcaatgtgcaaaaatcacaagcattcctatacaccaataacagacaaacagccaaattgtgagtgaactcccattcacaattgctacaaagaaaataagatacctaggaatccaacttacaagggatgggaaggacctcttcaaggagaactacaagccactgctcaacaaaataaaagaggacacaaacaaatggaagatgggaagaatcaatattgtgaaaatatccatactgcccaaggtaatgtacagattcaatgctatctccatcaagctaccaatgattttcttcacagaattggaaaaaactactttaaaattcatatgaaaccaaaaaggagcccgcatagccaagacagtactaagcaaaaacaacaaagctggaggcatcacactacctgacttcaaagtatactacaaggctatagtaaccaaaacagtatggtactggtaccaaaacagatatgtagagaacagaggcctcagaaataacaccatgcatctacaaccatctgatctttgacaaacctgacaaaaacaagaagtggggaaaggattccctatttaatacatggtgctgggaaaactggctagccatatgcagaaagctgaaactggatcccttccttacaccttatacaaaaattaattcaagatgtattaaagacttaaatgtaagacctaaaaccataaaaaccctagaagaaaacgtaggcagtaccattcaggacataggcctagtcaaggacttcatgactgaaacaccgaaagaaatggcaacaaaagccaaaattgacaaatgggatctaattaatctaaagagcttctgcacagcgaaagaaactaccatcagagtgaataggcaacctacagaaggggagaaaatttttgcaatctacccatctgacaaagggctaatatccagaatctacaatgaactcaaacaaatttacaagaaaaaaaacaaccccatcaaaaagtgggcaaaaggtatgaatagacatccctcaaaagaagacatttatgcagccaacagacacatgaaaaaatgctcatcatcactggccatcagagaaatgcaaatcaaaaccacaatgagataccatctcacrccagttagaatggtgatcattaaaaagttgggaaacaacagatgctggagaggatgtggagaagtaggaacgcctttacactgttggtgggagtgtaaattagttcaatcattgtggaagacagtgtggtgattcctcaaggatctagaactagaaataccatttgacccagccatcccattactgggtatatacccaaaggattataaatcatgctgctataaagacacatgcacacgtatgtttattgcagcactattcacratagtaaagacttggaaccaacccaaatttccatcagtgatagactagattaagaaaatgtggcacagatacaccatggaatactatgcagccataaaaaaggatgagttcatgtcctttgttgggacatggatgaagctgggaaccatcattctcagcaaactatcagaaggacagaaarccaaacaccacatgttctcactcataggtgggaattgaacaatgagaacacttggacgcagggcagggaacatcacacactggggcctgtcaggtggtggggggctgggggagggatagcattaggagacatacctaatgtaaatgatgagttaatgggggaagcaaaccaacatggctcatgtatacctatgtaataaacctgcacgttgtgcacatgtaccctgtaattaaaaaaaaaattcagttacaaccaggtgtggtggttcacacctgtaatctgagcaggaggatcacttgagtcctggagtttagaccagcctgggcaccgtagggagacccgtctgtccaaaaaaataaaatttaaatgttagccagatgtggtagcacacacctgtggtcccacctattcgggaggctgaggtgggaggaccgcttggaccctggaggtcaagtctgtagtgagccatgatcgcgctactgcagtccagcatgggcaacagagcaagaccccatctcaaataaataaataaaactcagtaagtaatagagccagaattttgaactatgaataggtaagattaaaaaaaaagacattattttgtaatgtcttgtattatcagacaaggtaycagagacaaggaaaaagaaaggtgcactgaacagccaaagcaggactgacggaactcagaaatgggctgggaccagcctgggagaaagaaaacgcaaggcaaagaaaaggataaaacagccctgctgcactctggtgggactgataagaaatagcttctgtatcttggtattttgtaccttaaaaaaaattgaggagtggcaggaatagaaaacagaaacaatgtctctttggggtgagagacagaaacacgctgttcctctcagaggatgtggaaacattgatgacctctgcaagtgcaggcaggcagtatccacagctctgcatcaccactcggcgtcaccactgtgcaacccatcagtcctgtggtgcccgttcaagtyacattgtataaatctgtcctacggcatctgtatcctcaccatctaataactttagcacagaatattgtttaagaatgatggagagggaaaagaagactttgagtcaacaaaacctttgtttgtttacatttaccatatcatccattctttgtagtatatatcagaagactttcattttaggtttttaaaaatcgtttatatgtaatgagttaaaaaccttagttatccagaaacatattctgagcaacatgtttttggtaccacctgctgtcttatatatttcttgtctgcatgcttctgtatacctagtaggtgtctgtaggcagatcaccttacattgtgatttcttttaaattgggaaaaaatatatgtcctttgaatatcttatggttcagcaggggcattagaaaatataaacaactgttgtgtgatatgtgcaaaagaaatgtgaacaatgtttaggagtaatatagagaagaaaatgacagtttctttgtatagaaatgatttgaaagaataactaggattttcctggagtacatggcctgggagtagacaggactgttcagataaagagatcactatttataaattagagaggtgtgaagaatatgctcatagcaattttaggggaagtacaaggagttcagtattggtagaaagtaaagggcctggaggggtcaaataacaggagacgatgctgggaaaagaagcagaggacaggccatttgtccccactgccactactcccttacccccattaagaacccatgggtttatatatttttaaatatcttaaaatatgtaaatatctaagkaagttcttcactcctattctatcttatggagaccctttttaaagagtgaattttatagagacataggaaatgttagtttgcattgttttcactttgcccctatagttttttaaaaagcagattcactttttacaagaggaagaatttggattagtgctggatacatactgttttgacttgtaaaatgactctttaatagaaatggacaaagaaaatatgctaataaaayaacttaagtatgtgtatgtgtgtgcatgctaaatttttttttcttctgttctcttcattttgtgctcatcatcaattgctgctatttactgtggtgcatttttcctgaacacctgctgtcaaatgcatcaagtcttttcttgcacagtgctacaggtttttgcagaactgagcaagcccaacattagacagatagcctaaagactgattgatttatttgttttaatacaaatataygctmacatgttgacatacagaaatctgtttcaaatgaattattttttaaagaacaaagaactttataaccctagtacctaatcctatgcctgacacatagtagatactcagcaaatatctgtgggactgaactgctctgtgaagcctagctaagcactaaagactcccacaactttttcagctttatggggaagtgattatcttaaatagttttaatgcaaattgaattattgtttaaaaagcatgtccaccagttgaaaagtcaagtcatggaacattgttaagatccaggttttaatttagcagatattgttctctttgcagaataattacgaatctatttaaaataaatgcttttttatctttatctccctttgcacaatggagtggcattgtcaaaaggggaaagtgtctaataataagttgaaaacattgtgcagttatacttcaaagacatctcttaaattgtcctgttcaggwtcactgcctctgctattattcatgttctaatttagggcctcgaaattgtattagttgcctaactggaagttgcacttcgttcctgtgcttcttccacactgctgccagaatcatttactttcttcaacagaaaatcaagcctgtctctttcctcattaaaaacctgcaatttgctacggactgtgagataaggaccaaactccttggcattacataccatatgtaatgtaattatacctgtggattttttttctcaatctaccttcatgtccccatgtttctaagcatcctcwaccagtgcttcccaaaatttttcatgacatgtcacacatggaataataaccagatgataccactgtctgactgcctgaagtctctggcttctctgagctttctggcccttctgagatctgaaggaaacaatatcttaagcataccctctaatccattcccagtacaaccactgggaaagtctgccctacatgtgaccacagtaaaccttttcrcctcccaggaatggtttgtgcactgcttttcttctttgcttataatattcattctgccttttcacagtttctcaatctggtaaatttcccctccttgtcatttaaagcccggctcatttggatttgggaaatgtttctggaatttttttaagaatatgtgaagctctttgtttccaattaaagccttatcttaaatcaattaattttgactcttagaaattctctttccattttctgacccatttgtaataacttaattttaaggttacacctactgtaccaataatgattttgtttttaaaaatacaaataaaaatctcccttccttggctttttggaaacagtttctttcccccgtaarttatattgcccatggtttcataaatacacatctcaaatgggttacttatgtaaagggtgtgtgtgcttacttgcgtgcgtgtgtgtgtgtgtgtgtgtgtatcactactactaatactaacataaatatatatatcattactacccacttagctataytctaaagttaaaagatctcaaaatacttcttgtgaaaaggtttactaagcccaaagttctaagagaaaaattatgaaaattggtttcctttgtttaacagagcctattgcttattttaagggtaattgatcttttgttttgagacagggtctcaccctgtcacttaggctggagtgcagtggtggatgcctccctaggcctcaacctcctgggctcaagtgatcctcccacctcagctgggactacaggtgtgtgtaccaccacacccggctaatttttatgtttgtttgtttgtttgtttgtttgttttgtagagatggggttgcgccatgttgcctaggctggtctcaaatgcctgagctcaagcgatctgcctgccttagcctcccaaagtgctgggattacagttgtgtgtgtgccactgtgcctagcctgattgattttgatctctaacacattcctctcataactatttctgcttttccaaaaaagttttatgtatgggttaggtaaatgtttctggttttatctcattaaatgattggcttttagtatcagcatgaatcaagtataatttgactyacctcatccttaaattcttacttaatttggtaattattgtgtattttatcattttctactagtgtcttagcctgttgatcaaagcttgctgcagttagttgtttgcgtgttgatctttctctactttttagtgttcttaaaggtaaggaccaagtcatatgcttctgtattttcctcacagtgctttgcamaaaaaaaaaamattgtctagtaggtgtctttttagttacttttaaagtatcttgtgggtagttaagacttttttattcaaattttatataaaatctgtttttgttttctgatgcctgttcagcagatgcttacccagactgaagtagtttacattctttttcaatgtcccaaaagcttaattagcaaataatataatgcagactgctccttgcataggctctcatggattttacatactactgcttattttattagtctctaaagtcattcttctcccagtgtaattacacttttaaaaattactaaattgcataagagatattatgaaatcgtattcctggaacattgagaatttcaagctttaaaagacagcagctaaagtcaaagatacagcaacattttcaaaagttagctttgtacatctcttggctgagtaatgtgaacccacacatggaaagatttaatakatacaggaatgttctgggcctctgtaagagctgatccctctatcaggtttctgtgcagacaagcatgtttcttctatctattaggaaaggkttatgaattgagcatttcagaggctatggtaagaagcagggagagaagggggcaagtagagaattgctraatatcaattctttttaaatattgagatttagaaataaaaatcaagaatctgtattttgacttgacttttcaatctattattctaacctcgtagctcattgttccatttattcaaagaacattaacatctgccatatattaggaattcagagattgctaacattgcctatgttcaaggatctcataatcaagtactgaggataattatacaagaagagtaatcactataatagcatttaatacttactgaagcatacatgccatatgccaaacactgagctaagcacattatatcaatatagatataaaaacacctgctgatttgtccaaacacacagctaataagtttttgagctagaattttcctccagctaagctgattcttttgccctcacttttaaccttgtatgccaaattacaagtttaaaattcatttatgtacttggaagagtcatagaagtttcaataaaagagaagacttttaagctgagacttgaacaagaagtggagcttccctgatagacaaagagataaaatgtcattctgagcagakkgagaaatatgtgcgaaaacagggaggcagaaagcagcgtggtgagttttactaactgggtgtttaggtgctcctaagcaagtccaagttcaagtatagcatttcaagtttctatgattttagtgtaactcctatcttatctacagctccttttcttttctcacagggtgagaaatgctatacttgaacttggacttttttctttgatgtgcaattaaatgattagaaaataggaagttaaggtatttgcagttaaartgatcacrttagccatgatgtagataaagcaaggaaaaagaaggaaagaataagactgcaggcagaaaaacaactagcacagcagttatgatattctagacaaatgattgtgttggcttgatatcactgagtaaacatttattgggtgccttatatgtgccatagctgagcttacagtgttgaataaaatgaatatgattcctgccattacatacagtctacaatctgttgggaaagacagacagtaaacaaacacacaaatacacaataaagaagaatgggtagaagtgacaggtttaagagagatttaagtagtgttagccagrtctatgcattagttggatttagaggaagaaatagatacctagaataaatccaaggtttctttgagataattcagagccgttaccaaagatccacctttctccctggtttctggaactattctctccatgaatcatgattcattgatatgtttttattaaagtataaaggctcagtgctgctttcctttcctagaggaaggcactccctatatacacatacacacccttgttgattattttaaatgaatgggagccaatgggacctgatttttcaaggtgtctattttaatacttttgtctgaacaagtatttctatgttaatgaaattagatttgagcatttgatagaacatgaaactataagtgttgaatttcagaatttataaaaaagaaaaggcagccttataattgtggtataaggtttgatagttaagactccttcatgtgaaataccagatgttttgagtccttgatataaaggtcagaagaaaagaaggatattggtttcataataaaytaacatgtttacagtaatgactatgcagtgtaagctgtggatattttgttatataagaatggcagggggtcctagaactgggggctggaaggcccatttaaaaggtcatcyaatacgataatttttagtctggagcacacaagcagagttcaggtgaactccctggaattatttgcaaaattgggagtatttttygtatgtatagtttgaggggaatttctgtcaaatgcacataggcacctgtaattaaagagccgccttcattttcacacatgaggaaactgaggctgttacagatgtagagacttgcccaaggtcttgaataasttctcagaaagggagtttgttctatgatttgtgttttttaataaagttttaatggacagaccacgatatccaacatggccttggagccatagggttcagaatattagaaagccttggcttcttttttcattgagttgtcatatagtgattttaataataatagaacatgctattattcagaatacattcttccaccctaatatcccaaaacagtatttttaaagaaattctaggaagggtgtttactcattcagagttctacaggaaggaaggctctttcctactattttttaagcataactttcactgacaagaccaggccagaaaaagcctagctggctgttggcccagacaatgttataataatcattgaagtatactcaacctgcactgcctgaggatagctacagctaaaaaaaataaataaataagcacacacagatgtatgctgagtgttccagtgacttagctgacatgtatgctgtatatcctttgctgtgttcyttcaactattagaaaggaaattttaaaatagcctagaatttattattccaatagggtgaaaaggacaacttcaactttaaaaaaataaccaagctctccaaggctgtatccccagcaagtaaatcaatctggcatatagtagatgcttaataatttttttgatgagagaattgttgaagtttgttagttatatttcagaaagagaattttgtttgttcatcaataatgagtatcatgtagtgtcaaaatagtaaaattaaaaaggactgcttcaacatttagaaaccccagatttcagcgcagtttctgtaagttattgtacgaccttgggcctcattttctttgtcttaataaggatataataatatctaattcccaaaatttgggggaatattaaatgagctacagtatgtgaaagatgcttcatagatccttaagtgctatataaatattaatgttatttgtcttagataacattttcaattttttaaatatgtatttactgaaatcatctttatttcctaagtcctgtatttgttttaggtagaaagaagtgatttccatgattgaaatggagttttgaattctttgataaaatacattttaaggtrtacagaattgtctgcaaagaattaaaacactcatttttaagcaagggaaatatatttattttatgattttcctaattgaatttttgccagctaatttgtacgtaagttaaggattgattgatatatatttgatagacaatcaccctcttctaggtattataacatatacaaaaagtatacaacagcattttccaaagtggaaaagaaatattagtttttgagatgttccatgattagagtttgggaatttaaaatagaatttttacatactaccataggtttctcctagatatttttattacccattaatataatttccaaaaattccttcatatagaaacctatacaaaccttttattttgtttctacacagtgttatccaaatttatttaacaagaaaacccttttttccattacatttgttaacattcactcgagtattttataaagcactggtatgagatatgatgatatgaccccatggatttgaacagtctgtttggaactctaagtatgaacatggtgaagtacattaaaacaaaacaaaacaaacaaaaataaaacaaattaactatgagattgtgaaatggttgtaatatatgtcaccaaattcatggctaaatcatagaaattgatctgtcacagcttgttaaataagtattctttctcttacatgacttcttacrtgattttttccaaactgcttagtcaaagaagataatctttccagatagagaaaattttaaaatatctttattcctctttaaatttactgatttataaatactgggagtctaacaaatgcaagttactactctttattaatcccttttatttagtttcagtttacacacaataattgtatcaacttatatgtacaagtcaattaatttagacttgtgtaaacctgtgaaaccacctctgcaattaaggtgcagaacatccccatcaccctcaaaagattgcttttgcccttttgcagtccatttttccctcttcctcaggttgcagtcaaccactagtctgctttttgctactatagattagattggactttgtaaatattttatataaatgcagtatgtactctcttatgtctgttctatttgactcagcatgatgagactcatgcacattgttgagtgttcagtatttcctttctattgttgagtagtattccattatatattttgactattcactcataagttggtagacatttgggttgtttacaattttactattgtgaataaagctactgtgggctgggcacagtgactcacacctgtaatctcagcactttgggaggccaaggtgggtggatcacttggacatgggtgtttgagaccagcctgggcagcatggcaagaccccatctttactgaaaatacaaaagaaatagctggggctgggcacggtggctcaagcctgtaatcccagcactttgggaggccgtggcaggcagatcacctgaggtctggagttcaagaccagcctggccagtatggcaaaaccccatctctactaaaaatacaaaaaattagccaggcgtggtggtgggcgcctgtaatcccagctacttgggaggctgaggcaggagaattgctcgaacccaggaggcagaggttgcagtgagcaaagactgcaccactgcacttccagcctgggcaacaagagcgaaactccacctcaaaaaaaaaaaaaaaatagctgggcatggtggtgcatacctgtggtcccagctacctgggaggctgagaagagagtatcacttgagtgcaggaggtggagattgcagtgagccaagatcacatcactgcactctagcctgggtgacagagtgagactctgtctcaaaaaaataaaatttgtgaacttccatatacaagtctttgtgtagatatgggttttttcttcttaggtaactacctagattatttcacaataattgggttgttatgatgtggtgggtttaacttcttaagaagctgacaaatagctttccaaagtggttgttctattttatattcccattaacagtgtatgtaatttctagttgctccatgtccttgatcggtctttggtattgttagtgtctttaattttcatcattcttataatgtaatggtatctcattgtggcttaaatttgcattgatctgataactaatgatgttaagtatcttttcacatacttacctcacaaaggaagctgtgtggttagcaagtatgttcaaatttttagtccagttactttggrttattttcttattattgaattatgaggattctttatatattttggatacaagccctttgcaaatatgcatattgtgaatattttatcccagtctgtgacctgtcttttcgttttcttaaaggtaccttttgaagagaaattttgttttgatttttgtaaagaccagtttgtccatgtttttcttttatacttctagaagttttrtagttttagctcatamatttcaagtttatttttcagtatggtgtgaggtaagggtcaatgttcatttttttcatatggatttctagtattcacagtaccatttcttaagataatttcctttttgagtgccttaaaatcagtatggacttcctttttctattttatttatccgtatctttatcctctagatactctcacactatcttgtttctttagcattataagttttgaagtcaagtagtgtaaatttttccaatttgttctttttagaagttgctaaaagttgccacattgcctctgtagatacacacagagagagatttagacacatacctctttttaaccactttgagataattcacataccataaaattcactatttgaaatatttaattcattgatttttagtatattcacacatatgtataaccatcaccatagtcaattgtacacatcttattcatgctttctcctattaccaagagcaatgtctgggatgtaatacatgctcaccaaatttttctgaataagtgaatccattagttgtaaaataatgtaggcattagcctctagtaaaatattaagaaggctcatttgactgcattcagctctagaactattcttttattagaactctgctattttgagggatctctgaaacagctaacagcttaactcagatatagatacagatatatatatatggctacagatttttttttttaaatggagtcttattctgtcacccagactggagtgcagtagtgctatcttggtttactgcaacctccgcctcctgggctcaagtgatcctctcaccttagcctcctgagtggctgggactacaggcatgcaccaccgtgcccagctaatttttgtatttttttgtagagatgtcgttttgtcatgttgcccaggctggtctcgaactcctggactcaagcagtctgccctccttgcccttccaaagtgctgggattggccgggcaccgtggctcacgcctgtaatcccagcactctgggagaccaaggcaggcagatcgaacgcctgaggtcaggagttcgagacaagcctggccaacatggtgaaaccccgtctctactaaaaattagccaggtgtggtggcatgtgcctgtagtcccagccactagggaggctgaggcaggagaatcttgcagtgagctgagactgcgccactgcactccagcctgggtggcagagtgagactctgtctcaaaaagaaaaaaaaaaaaacaccaagtgctgggattataggcgtgagccaccatacctgtccttaaaccatattttagtagttatttaaggaagttacaaaaaaaattccttttgatataatgagtgcaaattatttgcrcatttttgaaaagagaatagtcatcttttattcacctgataattgctgagaagggcaaacctcccataagtactgcttttctatttttttttttttttttttttttgagacagagacctcctgctccacccacctcagcatcccaaagtgctgggattacaggcgtgagccaccgcgcccagccttctattttcaaaagtactcttgacattgtttgtatcggtgacatagattatggaatctctggtacttgttttatttaccaattacgaataatagtggattgttcgtgaaattccagacatctttccctaggtatctttgagatggaatgtcagttctgagcccagttaattcatgttgcctcattttctttataggctttgatgcggcctggaagaattgatagaatcatctatgtgcctttaccggatgcagcaacaagaagggaaatatttaagctgcagtttcactccatgcctgtcagtaatgaagttgacctggatgaactcatccttcaaacckacgcatactcaggagcagaggtaagatagttcccttcaaaataccttagtgggaggaaagcggtggctcagggtcattaagcaaaataaattgcttgccctgaggtgttttaaatgaccatactaagaaatcttgaaacaggaagtgcagtacatgacatagtcactaagttaaattgcactttacgtggcttctattatatcacaattgttttttacttgctcctattatttctcaaaatgtagtcttcagaggaatagcataatatagtgagaagaacactagactagaagtagattcttccactgggcttcttaatacagcagtttctaaccaatcacacacttctctaactttgcgttctttacccatcaaatggaaatgatactactaccttccctcctgtttcctcatggagagcatagaaataaaattaggatatcatgagtataaagggcaaagcaaacagattgtatcattatcatctttttgtcattttggcaagttatctcagtctaattttgtattaaacattctctcacagtaaaagggaccatctgcccttacctctgaagataaactcttgacaagaacagcaagacctctgtgaaaatatgaaaatgacttttatgtatggcagattaacattttttctctccttaccaactctttacttatgctatttttatttaccaaataaaattccatgaaataattctgcaacttttctagctgcatttcttaaggaaaggaccaactatgtacctcgacacagaaatagcatctgtcacaccaatgatgtagacttttaatgggagattaatatttttttaagtacaaggttacagattatttttattctgaattactcagtaggctaggactccacattctgttttgcttgctattgttttcattcgtcttatgtaaacaccgaagagattaccatatgacagatcattagtggtactccgagagtctatttggaactgaacttagtgtatcatgcagtcatagctaataacaacaaccaaaataaatcccagatctattcattgttttgccccaagaaccatagatatagatatagacagtccccaacttatgacagtttgacttaagattttggggctttacaatggtgcaaaagtggtacacactcagtacactcctcaacttacaatacagctacatctggataaatccatcttaagttgaaaataacaagttgaaaatatcgtaagtcaaaaacatatatgcatttttgacttagacatattcaactgatgatgggtttaccaggacatagccccatcataagttgaggagtatttgtatttgattttcctcctttatatttttcaagtccactggaataaaaagccatgtggaaagtagcttgagaagcagttgaagtgcgctcacctttaactcctctgaaacagtgatctttatgaccatccataaagttaaaatgaacatacagttatggttaactgactgctccaacatttctagaattcagtttttgatttgagacgagggctggcatcttgtatgatgatatggcaatttgcaggaaacagcaagaggaagacgaagaaaccataaatctctcacttgagccgagtaaactagaagagcagttagcaagatataaatatgcctttctcactttgaagtaattcatggtagtaacatcgaagtgcaaaacaaaaataaaacccagtgagattctatctggctaaaaggaaaaaaacctcatttggtgccagcaattattgtactggcttgctaattcttatgtagtgcacttcttatttaatctaacatgtaagcacatttatgattaatttttatatgagatcttctgaaaatcgtcacaggaaaagtagcagaaaattctatctttcctcaaattatattkttgtgttccataatgcttggattggggagggcatcccattgtggtcctatttataattagtatattattacaacttcatagaaattttgctaacagctacatcttagtagttctgtggtttctaatttagatgaggcaggtttgttccctgttgagggtttttgttttgttttgttttggtctgaataggtaggcagttcacacagttgttttaggaaaattattatttctttaaaagtcttaaagttaataaacaggagatttaggagackttaaktaatgcttaagataaaaggtttcatttctctctctctgtttctctgtcttcacacagaaccttctacatggtgtgtgtttaacaagcacttgataaactgtggggaaaaaagatttttaaattagatttaggaaaaatagacttcagttctcatttgttacaagaggagccctctaactccctgctgtagacacagccattttctcagagttggagtgtctctttggccactttgggtataaaaatgaaactactatcaatttattgtcctcacaagagaatagtatattatattcaagattatataaaattaattttatttaagtgtatactattagctatatgaacaagaatttgggcaggaaagccagagacgaggaatttcctggcactctaattgttttttagaaacaaaatgttgaagtgtagtgagcattttttatttttagtgaaaaagttgtagaggatgattaagatggaaatgatactggtactttttttttttttttttttttttttgagacagagtttcgcccttgtatcccaggctggagtgcagtggcacgatcttggctcactgcaacctccgcctcccgggttcaagcaattctcctgcctcagcctcccaagtcgctgggattacaggcacccaccaccacgcccagctaatttttgtatttttattagagacagggtttcaccacattggccaggctggtcttgaactcctgacctcaggtgatccgcccaccttggcctcccaaagtgctgggattacaggcatgagcctctgtgcccaccactggtacttttaatggcagggatgagaagaggttactttaaaaaattattttcttttcacttggttatttattttgcccaatcagcattgttctatgaaagcttagaccagctcagtgtttgaaatagctccttctggtcaaagttactccatttttccttcgtggagagggtatacagagaattgaaacacttttgtaagcctcaggaggctctcaagaggaagtctgtcaccagctggaaggggaatacagccgttagggagcagcctctgaggggagactgaagcaggttgcgtcttttagccatctctgccacctgccactcattgtccctgtggctatggccctcattgtcctggcttcttgactgtagctgtcagttaatgaaaaaacatgtgccatttaaaagcagaagggaatttctctcaggaggaagtaagtctttttggttatcactattgttttcttttgctctgatttttgttttttaagttatttgtagcaattccacctcatttattcatttatcttttatcaaattatcctggttacttttggaagagttttatctgtaacagaaaatcaactgtcacaaatatatttacaaaaaaaagcaataactgggctcattaccccatatgccctatgcttgggaacacaggtgatgagtaagatgcataatttcttctgtgtatcagaatttgctgacataggccaaagactgatatctgtaaaattggggttgaatttttatttgaatttggatattatcctcctttcagtgaatcccttgggatcaccaatttgtgagggagtcaggcccttcttggccagtttgtaaatctcctcccttacatcttcagaggccagcttcagccaagtggggacactgcagtgacagggaggagccgattgggacaggcccttcctgggagcaggcatgcaactcatgatgtggcagtcaggagcaaaaaaaacacctycttttctttaaaatgtaaaaatttgcttactatagtggtttttttattgcaatcttatgaatgtagctctagaagatctttttaaagcaattcattagagttaaatacatttcacactgagttttcaaaaagctttaacttcatgtaaacttagtctgtttgttttatttttaaatgatctgtcatgccctgaattctgttttgtagtctatgccttcctgggtctaataatagcacaagatcttcatgccagcttgacatttaaaaaatcaccttctagtttgcctcattaattcaagaagggtcctattcactatgcttgagctattatagctaataaaaggagagccttaaattacttttctgtctcactgattaacgttttttctgacatctctttttctcccacacagtgaaaacagaaggagcaattatagccacttaaaatgtctgtactcttcttatgtgaaatctcttgtgatagtattccccaaactaaaatatcagtcattgtattagaatctggcatagattgttcatctgaccagtcaaacaacacatgtgagataggaataaggattctaaggaaggaccatttgacctggtcttaagcgctctacttattattgttagaaagcagctagcagcagtgtacttgtctccaaagtgaagcagagcagcacagtacttagcactctcctacagaccaggggtccccaacctcctggccacggaccagcaccagtactgcatagcatgagtgagtggcagacaagtgagcattactgcctgagttctgcctcctgttagatcagcagtggcattagactctcataggagcacgaaccctattgtgaactatgcgtgcgagggatctaggttgtgtgctccctatgagaatctaacgcctgagaacagtttcattccgaaaccatccccccaccccatttgtggaaaaattgtcttccacaaaaccagtccctggtcccaaaaatgttggggactgctgctatggactgtctgcaacctacttttcctgcctaatcagaaactgccctatgaaaacatgctgctatcaccaagtagtctactatatttgagatcttctttgctatctctctattcttccttgtgtctttacactaaaattctgtatctgtgccccagaatttcaaaatactcagtgctctgtatctgcaagttccatctgcaaattcaaccaactgggaatagaaaatatcagaaaaaagcaacaaaaaataacaatacaacaacaaaaagtacaaatttgaaaatatagcatgacaactatatagcatttacattatgtcagttgtcataagtaatctagagatgatgtatacaagaggatgtgcacaggttatatgcaaatactatgccattttatataagggacttcagcatccttggattttggtatctaaggggctcctggaaccaattgcccttggataccaagggacaactatattctttccttacacgacctactgaaataactactttgtcattaaaccataatgaccaccccaccaataaatagcctattcttttgtactcttttacacttatttttgttttccttgtttagctgttaccatattttgtagttattttatttttttagagacagggtctcattctattgcccaggctggagtgcagtgtcatgatcataccttactgcaactttgaactcctgggctcaagtggtcctcctgcccaagcctcctgagtagctcagaatagaggtgcatgccactgtgcccagctaatttttttaaaaaaatttgtagacattgtcatgttgcccagcctggtcttaaactcctggcctcaagcaatcctcctatctcagcctcctaaagtgttgggattacaggcctgagccactgtgtctggcctctgtagwtattttaatatgagcagctgcctcatctccccaaacacagattctctagggcagagatcagttcttgtacttcttaaagtctggcaaaacagctgtctcacacacactcggtgggcattaatattagatgggtggtacatttatgtattgattctaagtcattttaccaaccaaaaatgtcagttttaacatttgctgaagtggcactttctagttttaatcatattttcatatacattatctatttgagtaccctaactctatgagagcagtgctgtagcgaaagaactaaagtcaagcaaaagaaattggcttgtctgagatcccacagcaaataagtgacaaacctgggaccagaaaccaggtctctcagttccacttgaaggactccacgatctcctaatgcctctgtgtcaacacaacgttctttgaaactttcatagttccctttgacgtctctgaatatttgataaaagtttgtcaattcctgtgaatagtgacttagcaaactaaacagcagttatgaaacatctgtaccatttttatacctttttctcttacagtaattgtctttacctaccttgttttcatcttctccaaaaaagtataagctacctaaagttaggaaccttgtttttatcaattaatttcttttatttcctaggtattgtgaataatgtttgcaatttagaatgaaaagtataaacaacgaagttttatataatgtatttatgtggcatgatctactgatgtgcagaatgctataggagaaaggaggaggagtaactcacactacctgggattaaatgagatagatgatacccagaagaatttttttctgagttttgatgggcagatggaaaggcagagatgaatgaaagaacatggtgtggtctaaaatcagttaaagtttgaatatgattggcagaaagagtcttcatgtagaagtagtaggggatgaagcagaaaaagtaggtcagacttaaatatgaaggaacttgaatatcatccgaacttgcttttctcctttcagcaatggaaaaccattgaaaaatgtgatcactgttgtggtcagatttgtattattgaaagatttgtggcatttgtgtccaaagccaccactagctagccttccaagcaccattacacgaattagaaaaaggtgttccttcaccccacttggtgacagctttttgttacagcaaaaagcttgtcagagcatgagcaacatttcagcccctatttgccccccttggctgggcacccttttgtagatacaagctttacatctgtacaaggtgtcttatttttgtcttctccacctttatctccctcacaatgcctagcatagcaccttatatagagttattgtcaytaaataaacaaatggagaytttacatctcaaatatataaactactttctgtaactttaacatttacctcatgagcccttggataaaaataaattgggactattaaagatgtcttttgtagaagatacagaaatggccaacaaacatgaaaaaatagcatcactaatgatcaggaaaatgcaaatcaaaaccacagtgcaataccactttattcctataagaatagccataatcaaaaaatcaaaaaataatagatgttggcgtggatgtgctaaaaaggggacatcgttacactgctggtgggaatgtaaactagtacaatcactatggaaaacagtgtagagattccttaaagaactaaaagtagaactaccatttgatccagcaatcccactgctagtatctacccagaggaaataagtcattatatgaaaaagatacttacacatgcatgtttatagcagcacaattcacaattacaaaaatatggaaccagcccaaatgcccatcaatcaacaagtggatacagaaattgtggcatatatatacaccatggaatactacttagccataaaaaggaacgaaataatggcattcgcagcaacctggatggaattggcaaccattattctaagtgaagtaactcagaaacagaaacccaaacatcttatgttcttactcataagtgggagcaaagctatgagtatgcaaaggcataagaatgatacagtggactctggggacttgggggaaagggtgtgaggggagtgagggataaaagactacacattgggtacagtgtacactgcttgggtgatgagtgcaccaaaatctcagaaatcaccactaaagaacttatctatgtaaccaaacaccatgtgttccccaaaaacctattgaaataaaaaatgaaaataataataaaaggtcttttgtgcaaactttaacctgccatgaggtacagcacttgttgtaaattgctagaatattaaaagtaaggtggattatatcctctgagccatattatgtaactttgaatataaactctaaggacaaaagcacaacctctgcacctgtttagtggctaaaatatggctctctgttgtaaatgaattatgaagggatctttcagagcaaaaatcagcatgtgctaaaagtagatatttaggactgtaacttttgagctagtcctgtaccactccccttttcccttcttcagcattttatgatctacatgctaagtgaagaaatttggtaaaagccaagacccatcatggccacctagaacaatatgagtttagccaaatcatttatcatttgtagaactcactttcatcttgtaataaggggataggaagatggtctttttataatcctttcaagtgttaaaaatctgtgtggttatatacctgtcataaattaaattaattgtataaggaatcccttagggattggacctccagggatatgtagtatggttatgcttctcttacagtctgtccagaaagctgggatcttgggatcttagtcaatgcctctaaatattttcttctgtggccaaaagatattaattatggcaccagaagaatggggaccttaaatgactctgacagtgcacagaacttggattttaataaaattctccttagcaaactttaacagttttccactaagtagaaaagaaaattttacatgctcagagagttgaaggcctagtgatttttttaccctgagatctttggttgttatgcttttcaacttccttaagaacagctaatcaagttcactatctatgattttggggatacttggataaaaagcgttatagaatggaaatatacagcagccgactttttccttaaactctttgttgggaaaataaatgaaggttgcaaaattataatattgttcattttaacttaacaatttttaaaacttcaatgtatggagatacaatgtacttacagtgtatggagattctctgtatttccaaacttcaccttctgcttaaattggcaacaaaagtacattcagcttacctgaaggctattttagataggatgtttacaccaaagctaatcatactccagaacaccttgtgctgccatacctgtattgctaactctatgccaggtatttaaaagtgctgtgagtttacaagaagtattagtcagaaaggaaatggatatgaatgagaggctggttagcaacaaacttaatagaactttttacacccaaacatggaagcctttttatagggaagaagtatatccagtgaacaagttagtcaggacctaccagataatctagtccccaaggctgatatccagagtaaatctgtatctgtggagaattactcaagccaatgataatgccgatttgagcattttaacattccaccttatttctcttcttccaaattctcagtctctctatttcctcattctttttctccaatattttatataaaccatttaatctgtgcttcctcatcttcagaagagtgataaaatggaggtgggggttaggttctgttaacctgagaggagcttatgatgttaaaaaagagatgtgcaaagcatgctgttaactctgtagcatagattctgatagtgacagttatttttgtttggttatttgaagtgatggaaggctgatttctaataacaacctaatctgtatatgaaaagatacacatgtaaaagctgtttctccttttaggaactctttttactatatgaaattgaattatggttaagtaccctgggttatggaatgagaaagctgtgaacccaaatgccaagtcttccatttcctagctatgtgacctttttattcatatgtaaataaggataagagaggtccttaacttcacagttgtccagattagatgacataatttatataaggtgcttatcctagtaagcatataacaagtgctcagtaaataaattttgttataatcagcaaatttaatttgatatctagtttaaaaaatctacaatttgcctaattttttcacattgtgttgccatagattttatgaatactcataataaatgtttcatgtatatgtcttgtttttagttttaatggtgtgttctttaaactatatttcatagtttacatgcagcatttatttcatctgatttatatttataaacatctgtaatcctatttttattttttccttgttaaagatgtatactattttttacttttcaaatgtgtaaagctaatgttttacactttcaaatgtgtaaagctaatgtttttttataaactccctgtgtaatatccctatttcggcatattctttagttaattgctactttctcacctatagcttattcctaactttttttacatgtcttgttaattaaaaagaaaaaaatagtaacccaactttagaaagttgagggtttctgtgtccactagaataattgtttaggaaataagcatacctcattattttgctctttctttgaagttaggattggaccccagtgtttaggtaataaggctgagaagtctaatgctgaggacagtagcaccacatatctgttattcagtgtatgaaagacacaattgacatgttctcgttcttcatccccaaatgaccataattctgagaagagttctgaaagaagtcattctattagaatgttattaaactttataaaatggttgttcagagctgcaatgcagtggttaccttgttcttaaggaaaccctccactagtttttggaaactgaagaacagaatttaaccatgccttagactgactagaaagaaaagtagaaagaatttagattcatagggttttctctttttattttatttgtgtttcaaatttccaaagattatttctgatgttctttaataatagctcactccctatttactattaaattctggaaaatgggttttgcttttatatttatagcaaagtttccctgtttaggagcaaaagaactttaggtatagtaaacatgctactttaccattgtggaagttccacatcataaattagatattttcccttttccttcaaaatgaagtcacactacttttggcacttggacaggacaatctttcagtgacagcaaaattagccttttggcatatttttattcactttgaaagaatccttaaggagcggttttatgattgaaagcaagaattgtatttactttgcctagggtaaatttcttgcctgaatatgtaaaagaacgtaagtcaaacactgttagataaaaacaaattagtatcaaaagatttcattataataacttgtctatattttatgacataaaatagtatataactaagttctgtattattttgaacttttatttctgctactaagtagtgatacatcttgaggaactccaaggggcctaaacataagtttacacaggtatttgaagaatcagttgactcactatctgaactgagtatgtctgtaaagctatgtttaaatatatccctatatttaaactgatcatggcttataagctaatcacccatgaagagtgtatgttgtctttcttaatgccagtatgttagacaatcaatatataatttatgtttatattaatagacacacacagtttccaattggtatttcgatgcctctttcctaaatatgaattgaaaactaaggaccactaatatttgaaaaaagctaaaaatagacagtctaaaacaagcacagggaggatagacataattagggagcagatgaaaagagagacaagaataatatggccacaaaacaagcaccagaagctctaaaatagaaggctcaattgttccttaattgaaaatgtaaaacattcaggtagaaataaaaaataaatggaagaattggatgatcaagttgmaagtctcccagaaagtcaaacaaaaagacaaagagatgagaattgtagacatggtaacatctgactaatagaggtctcagaaggaacaaagaaatcagaagagagaaaactatcaagacttctttccaagatttgaacattaaatttctagattgaaagcctctaccaagtgtctggcctcaaaccatcacattcaaaggactaaaaatttggagtgccacaaatttatcaacagcagaagctgtacgacaggagagctattcttgaaatttctgaggggaaattatttccaacctagagttctatatctagccaaaccatgaaatcatatgtgaagatggaataaattcattttagacatgcaagacctaaaacatgtttatcttcatgcatgtctttttaggaagttactagtaaatgtgttccaccaaaaaaacaaggaaaaaacatgggatccaggaagcaggtcgttcagcacatgagaatagtgaagagaattcccagagcaataaagagaaatcctggaaaagatatttttaagcttttctataaatctggcaaggaaattcattcttatcaagttgtcactatttgactctatttttcaattgagaataaataataagaaagactagtaggtgaaaattgaatcagccacactgggaattataaaagcaaagtattgtctgaagaaaccatcatatattcttttcacctctttattccaatccagaactgtttctccatgaaagctttattttagaattcagtgttactgttttctataatttttaaaacttcaaatgtgtagttcctgaaatactttaatagcagaatctttcccctccatcaaataaagccgtatgtgggaagcctattatattggatctactttggtggggtscctgtcctgcatgcctcttcctcctgcccgggcatgctgcatcctgtgaggcaccttggagattccacagagcagtttaaaaactgttactgtagcaaaaacactgctgaacacatggcttcattcttatttctcagaaacataacatgagtacccattagtttcatgaactcacagaaacaaaacattcttgtgacatggcttgcatagtgggttgtatacctgtgtatctgtgaaatgaacactaaaagtccatcttgacaagtttgcacctatctgaatatattagtttccttttaaatgaaaagtcattgccttggtttcaaataaaaattggaacctctagtttttacattcctgacattttaaagtttgaaattagtaactcatgtttcttttcccttgtaagtatgagctgagacaaacatgaagcaccaaaatagcactgtactttgggtgggggaacctgcatttcaactgctccttgtaatacatccttcgtcccccttaatgcatcttttctttttccgatgtcacctttgtaaaagaagctgttcaaagatgtatagtttgttttgttttgttgagatggagtctcgctctgtcgccaagctggagtgcagtggcaccatctcggctcacggcaacctctgcctcccgggttcaagcgattcttctgcctcagcctccggagtggctgggactacatatgcccgccaccacgcccggctaattatttgtattttagtagagatgtggtttcaccatgttggccagggtggtctcgatctgctgatctcgtgatctgcccgcctcggcctcccaaagttctgagattacaggcgtgagccaccacacccagccagatttatagttttaaataactttccagatataatcttttctggtaaataaaactaagagatagggctaaaggacaaaaacagactaacaatactacaggaatttgactttttatgtagttggtcattatgggatgtctgtcacatcagaattgaatcttcctgtgcaccatgaaaatgtaaaagataaaatagtagagcatgacaataactatttagtctgaaaaatgatttatcattggtggatatttaaaaaatgccaactctgtgrcctttactacatgtataccttctgtggggaagggtactccctaactgaacattttgtgaattgattaatgtttaatattgatttgcaaggcttagaaatgtaatgaagaaatagctataaaccttgtgtgctttgtgcatcaaggaatttaggtgcatgttgctttcccatttacttaytctttttaggttcttcagcgaaataatgcaaaaaacatagctcatggaattaaagaggaatacttaagcaggaaaaaaaataaagattttaaaaagaaagaggaatataacatcttaaaaacctcaccttttatatccttacttataattttaagaattgaaaccttgagcaagtgcctatcttggcaggcaaattatttgacataaagtttgatcaaagtacaattagaagaaaactcagaatcatagctggaaatgttattatcttcttaggttcaacctaaaaagccagtgtacatacaggttagcatttcaaactcaaaggatttgttttcatcttaaagacgatgaaaggccagctacgtttagaaatcaacagcaatccatcatttttatccctcagtcattctctaagggtattttttgtgacacctatgaagaagcaaagccatgaaggtatatcatatatgccaaattttcactactgatgatgccattgtagacaactgcagaacaatgctggagactgaatatagcaagaacaatgctagagagtgaatatagcactccagaaaagcctctcacttaggtgccaagttcaaggccaaagaattacttagatattctcagggaaaacttggttatgtacaatatcatgaacatataaacttcccccttcatgctcatttgccgtttaccaaagataaattgtgatttcccaactttgtaagaaaataatagttggaatggcttgaggatgttcttctatgcttttttgccatcttctggttcttttcacttgtgaaaacagtatcaatctgttggggttttttcgttttgttttaattagatgaggatcattttattatcaagaattgaaggcttctgtgaatttctgccagcagggtgatagctgccagcagtgcacagctttggtgtgaggtagtagggattccatgtggatattgtccctagactaagggaaagccccattgctgtggcttgttcggtgattctgcctgccagccccattttatgtagcttatcatgcatggttcatggcttgtaggatgtttattcctctgggttaagttttcctcttgttcttctttggtttctagctgacttacttgtgagagcagaaaattacctgggtgcttgagacccattgttcaygtgatggaactgtgatgcacatacatttgaatacatttaagttttttatttgccgtttgtaacttacactggaaagctaccctggtcctacagttaaaattttcccctgagtattattcctaatatgttttttttttcatgccccaaaatgatgtttataattcacattttctcactggcacatgagtaagatttacttacgctggttttgaaaggtttagaataatcagtatttcacttgctaagacttgaaacattaacaataatacactgtaatacacagtgaaattctttgaggaaaagacaccaatgatctttcctattaacttataaatgcttccactgatcagcaaaggtagttcaaaatttcatcactcagtcctgatgctcagataataccagagtagtcagggtgacactgttgtgcttctgactggtagaaaatgttttgctttccatttttcaaagacagttgttgacagataatccattctctttgtgtatgtatgtatgtaatgaaaatagccaccgtgagctcagtaaacccctccttactaaatgtacacaaaagtccattttcagrtgtttgttatttgtgaaacttggttatgtacaatatcatgaacatataaacttcccccttcatgctcatttgctgtttaccaatatgattccccttgagactccagcattaggtgctatatggctgtacaaattggtttgggattgctttgcttacagtcatctcacctcagaaccccacttagcagtttctatgattctcagggaaagtgcttcagcagaagtagacctttaggaattagagacaagttacaaccaaaggagggacattcacctgcagaagcttataaaagcacatgagatacaggcatcgtagcctactcagattgacatctacttgcagattctggtcatcagtgacttcawtgagcactgagagcagtttcattgaaggagcagtaagggcaaaaactagatcgtagagaactgaagtcaaaataatagttgagatttattgtggatatctcctttcaagaattttgaatgaaaaagagaggagagagattagattggtaactagagagatagtggtgggggcagggtatattcatagaatggaagagacttgaacatgtttataggttgaagagggagagtcagcagagagaatakagtgaaaatatccaagagaaaaatgagaaaggggataactaatgaaggaagatcacagaggactgtggtcatggacacaaagaaaggttttgccttcagctgaaggagactttattctcttatattattcagaaagaagtaagaatgattgtaaatatagacaatttcttaggtagagggctagaaaggtgaaaagggtggttaaactcagtcatcgctgatcctcaacttaaaagtctgttccactaatctttattttgtattactgaatgcatatataatgagctacgttaacattgggttttactgtacattatgcgtagtataatatatagaaagtctgatccctctttttaaataatatatagaaatccaaactttatcartgtaaacatactgagtttgaggtgtctatagatcakcttaatggagatgtcatacagattagttttcatttttaaatttctccctatttcattgaaaatatgattcactatataaaattgtaattaatatagatatattacataaagacaaaggagaagctctatacatatggatgatcacatactaatggaagattttttaaattgtaaattaatattgtttcctagacaagtcagtaggattgagtatacaagttgaacatccctaatctgaaaatccaaaatccaaaatgctccaaaatccaaaactttttgagcacgggcatgatgcctcaagtggaaaattccacacctgacttcatgtgatgggctgcagtaaaacattgtttcatgcacacgattatttattgtataaaatttctttcaggctatctgtataagatgtagatgaaacacaaatgaagttcatgtttagacttggatcccatccccaagataacttattatgtatatgcagatattccacaatccaaaattcaaatacttctggtttcaagcattttggaatagggttacttaacctgtactgaggtgacaggtaatctcttagtcttctggctttatatgattactggttagctaaggacctgtctatgttagaggccttgtccatgccacattttttcccaagttaagcttctactgtagctttttcttattttctgacctgcttgataatctattcttatattcattctcacagtgaattagtctatatagtgtattagttataactcagtgtattcttaaagggtttcctcaattattttaatatttgacctgcaataatctgagaacsattttcattttctatacataatggctttgtagttcagtgttaaagctttggaatcttcagagtgaattgattgataaaagaaaactaatagtgcctggcccccagtttgcacttaataatgtttgatgaatgaaagaccgaatgcatacaatttcatttttgtgaaagtttaccatcctaaaaactctgattttttttttttaaagaaatagtacatgttctttttggactgtctgaaaacattgactcttaaccataataacaaataatttttatgagtcccaagctagagataaagagacctagttacttcattttaccttgggtatgagttttgatatttgatgataacagatttggatcgttgctggtttgggcaaggttcggattaattatataaaagagcacataattaaaaaaaaaaaaacctatcatatcctgttacccaattctctggtacaagagctttaggcactgatttaatcttgaaatgataattggacttcccactagattagcccatatgttttgagaggctgtctgggaatgagaggatgtcattcctatatgaaggaacatgaggcaagaatccagaatgaagaaccattagtctgtcttaccagagttctgacaacactgtgatctgaaaatgttttggccaaagtcagatttattgagggccataattttcaataaaaagaatcccagaggaagttatttgatggttggaataaaaatatgacttatacactacatgattcagctgctttggtgttgttttttgagttgtacccatatattcaccttcacatccaagtgtgctggaaaaagtttgtgttctgattgaattatgttcaccttaatttcctctgcagtgcttttccctcaggcagacccttgagtgattgtcttttttacctcctccaatttccaccattctcattttatgtgttcaagttaamtgtgaacaacagcaaacagctacactctgtaaaacataccatttctttccttgagtcaatgcattcacttttctggtaaatgattttgggggcctgcagaaaccaaatgatgagacccctgtaggtggtgaagaggagtttgcaagcaatgtttgcataaagttctcctggcctcttctgctcgtgtttggtttgttcttttaaacactgtcttaactacaaaaaatttttttatgactttggtctctttggagcaaggaaaatgacctggagggacagtcctatggcagtccagcttatattcttatgtaattgacttaactgacatatgccttggttttcctttttttaatttaacttttattttaggttcaaggagtacatgtgcaggtttgttacataggtaaactgcatgtcatgggggtttcatgtacagatcatttcatcatgcaggtaataatcacggtatctgataggtattttwtctgatcctctccttcctccaaccccctagcctcaagtaggccccagtgtctgttgttcccctctttgtgtccatgtgttcttgttgtttaccttcttataagtgagaacatgtggtatttggttttctgctgctgcattagtttgcttaggataatggcctccagcttcatccatgctgctgcaaaagacatgatcttgttttttatggctgcrtagtattccatggtatatatgtaccataatttctttacccaatctactattaatgagcatctagattgactccatgtctttgctattatgaatagtgctacagtgaacatacatgtgtctttatagtagaatgatttatattcctttgagtatctacccagtaatgggactgctggcttaaatgataattctgttttgaattctttgaggaatttccatactgctttctacaatggctaagctcatttaaactcccaccagtagtgtataatcattcccttttccctgacacctcaccagaatctgttatttttttgctttttaataatagccactctgactggtgtgaaatggtatctcgttgtggttttgacttgcatttctctagtgattagtgatgttgagcatttttccatatgcttgttgccacatgtatgtcttcttttgaaagtgtctgttcatattctttgcccactttttaatggtgttgaggtttttttgcttgtaaatgtaagttccttatagattctggatattatatcttttgtgggatgcatagctgcaaatattttctcccattctgtagataatctgtttactctgtcgatagtttcctttgatatgcaaaagctctttagtttaattaagtcccatttgtcaatttttgttttcattgcagttgcctttggcatcttcatcatgagatctttgccaggccccatgtccagaatggtatctcctatgttatcttccagggattttataggtttaggttttacatttacatctttaatccatcttgagttgatttttgtatatgatgtaacgaaggggtctagtttcaatcttctgtacatgactagccaattatcccagcaccacttactgaatggggagtccttgctctattgcttgtttttgttgactttgtcaaaactcagatagttgtaggcatatggtcttatttctgggttctctattctgttcattggtctatgtttctgtttttgtaccagtatcgtgttgttttggttactgtggccttgtagtgtagtttgaatttgagtaacatgatgcctccaactttgttcagtttgcttaggattatgttggctatttgggctcttttttggttttgcatgaattttaaaatagttttttctaattctgtgaagaatgtcattcgtaatttgataggaatagcactgaatctgtaaattactttgggcagtatggccattttaacaatattgatttcttcctatctgtgagcatggaatgttttctatttttgtgtcatctttgatttctttcagcagtgtcataattctccttgtagacatctttcacctccttggttagccatattcttaggcatattttattatttttgtggctattgtgagtgggattgcattccagatttggctgtcagcttggatgtttttggtgtatatcaatgctactgatttttgtacattgattttgtatcctgaaacttttactgaagttatcagatccaggagcttttgggctgagactatgggggttttctagatatagaatcatgttgtctgcaaacagggatagtttgactttgtctcttcctatttggatatcttatttcttcctcctgcctgatttctctggctaggacttccagtactatgctgagtgggagtagtgagagagggcattctggtcttgtgctgtttttcaaggagaatgcttccatcttttgcccattcagtatgatgttggttgtgggtttgtcatagatggctcttattattttgaagtttgttccttccatgcctggtttattgagggttttttaaatgaagcattgttgaattttatcaaaaacgttttctgaatctattgacataatcatgtttttgtttttagctctgtttataggattaatcacatttattgatttgtatatgctgaaccaaacttgcattccagggataaagcctacttgatcatggtggatttgctttttcttgtgctactggattcggtttgctagtattttgttgaggatttttgtatcgatgtctatcaagtatrttggccttaagttttctttttttgttgtgtttctgccaggtttgggtatcacaatgatgctggcctcatagaacgagttggagagggatccctcctccctaattttttggaatagtttcggtaggaatggtaccagctcttctttatacatctggtagaattctgtctggtcctgggcttttcttggttggtaggcttttttattactgcttcagttttagaacttgttattggtctgttcagggattcaatttcttaggttcagtcttgggaggttgtatttgtccaggaatttatcagtttattctagatcttctagtttgtatgcatagaggtcttcatagtactctctgagagctttttttatgtctgtgggatcagtggtaatgtcccctttgtcatttctaattgtgtttatttggatcttctttctttttattagtctagctagcagtctatctgtcttaattttttcaaagaagctactcctggattcattgaccttttgtatggtttttcatatctcagtttccttcagttcagctctcattttggtgatttcttgtcttctgcaacctttgggatttgtttgctcttgatactctatttcttctggttgtgataggaggttgttaatttgagatcttgctaactctttgatgtgagcttttaatgctatgaacttccctctcaacactgccttagcggtgtcccagagattcaggtatgttgtatctttgttctcattagtttcaaagaatttcttgatgtctgccctaatttcatcatttacccaaaagtcacttgggagcaggttgtttaatttccatctaattgtatggttttagcaattttcttgatattggtttctattttattgtcttttgccttaattttcatttatgaaaatataaaaaatataaatataatgcatgtgataaatgcatgaagtacaatactgatgctttttctttggtatgtacattccagaaattagttatgtttacacattagggtgagtcatgtgctgagcctttaaggggaaattttaaaccttaatctgtatatttctaacgtaaatggcaccatatatctctaggacacagtaatagaccccagaatttaggaccatgtcaaagaaatctgaaatgttttaatttttctcctactgtgagtttgcttcatctctacttgaaaaatgaagagtttcttttaggccaggcgcggtggytcatgcctgtaatcccagcactttgggaggccaaggcgggtggatcaccttaggtcaggaattcgagaccagcctggccaacatggtgaaaccccatctctactaaaaatacaaaaatgagccgggcgtggtggcaggcacctgtaatcccagctgaggctggggcaaggaaatcacttgaactcaggaggcagaggttgcagtgagccaggatcatgccacggcactccagcctgggtgacagagcaagactccatctcaaaaaacaaaaaaaaaaagcttttatagaactaatgtatataaaatatacatacaagttggaagtatagcaaagagataaataactcagtttctgaaattaggaaaaggtaaatttgaatcccatctctgccatttactaactctatgactctggaaagttttctaataggtatagtagttataataatagtactttcttcctagggtcattgtgaagattaaattatatcacctatagaaagcacttgtacatatcatgaaccaaagattataactaatccaatttttcagttcactgaagaaaaatggaagtgactgtccaatgtagatgtcagcacatactgaagggttcaagaaatgagagttgtaattatcactgctgttatcagtagatcatcaataagtagaactgatcagttagctcaaattgagcaatcaatacatgagttactagaaagcaatattttttaaaggtttattacaatataaaagtgatacaactaagggattgggaataaatgcgtatacatttacctaagaacaagtgtttaactccaatttcttttaattaagttagttcgcatttatgatagagccatacatattgcagaggacaataccatgtgcaatgctaagtaatattttcttatgaggtttagtgtcaggttcttcaggtagaagaagcacaagcagctgcatttagtagacctgggttccaatcctagctctaccatttatcaactgtattacattgagtaatttagtgaacctatctgagactctgtaaaatggcaatagtaatacttcattactatgaagtaatactttcataggcattatgaagattggaaataatatatagggtacttagtaaataatagctattggtgttattctaccactactttttttaaattaataaactgtgtactaccrccattttaattaataaagttcggttcctttacaaataaacattagttttctatccctgctgtaacaaattgccatacacatagtagcttaaaacaacaaatttattatcttatagttctggaagccagaaatctgacaaaggtcttattgaactaagattaagatgtcagcagggctgtaatcctttatggagcctcttgggaacaatccatttctttgcctttttcagctttctgaggccccctgcattccttggttcatggccttttcctccatcttcaaagctagcagcctagcatcttcaagtatccttctgtttctgacctatgcctccctgttccacatttaaaggacgcttctgattacgtttgacctatccagataatccaggataatctccctattttagggtcaggtgattagcaattttaattccatgtgtaaccctaattctcccttgacatgtaacataacatattcacggttccagggattagaaggtggatatcttgggggtggggcattattctgtctaccacaataatcaaaaaaagcatttgttgcatagtattgtatttgccttaataatcatgagaaactggcaaataaagatcagctggtaccataaattttcagatattaccatttttttgttttcatttttgttcttttttttaatgttattttagtatcttggttaaaagtactatcattttggaaattcacatttttggccactatagctgtattgtgttttttatttaaattgatatagttgaaactctaaagatacaactgcaagaatatatgtgggcaaatttttgaactattttgtggataaagggaaaaagggtaggaatcrgatgtttttcatcagtttttaggagtaattacaaagctaacaggaaaatatgtctcccttctaagataaaaggaacctgaatatttgtccctaatattagaaagcaaatggctcgcaaaaattctcaaagatagtgtgaatcatattcttttataacactggataaaggggraaaaaagtgacatttggggtattaaacctgagatgaacatcctaatccagagagtagctgatctttagacctacaggctgccagtgaggkgttgtcagatgttggagtttaggcatagacaaatgcactgggaagagaacagtgccactggctagtcacttcacttctgggcctcagttttctcatacctattttgtggattatgtgggttgctaattaagacacccatctacctttgatgttctttaaagtagaagaaagaaatttaaacaaatgaatgacactaaaaacagaacagaaaccaccaagatgtccttcaacaggtgaatggatgaataaactttgggaagtccagacaatggaagattatccagtgctaaaaagaaaatgagctataaggccatgacagtgcatggaagaaccttaaatatatatgactaaatggaagtagccaatccaaaaaggctacatactctgtaattccaaatatatgatattctggaaaaaacaaaactatggagactaaaaaagatcagtggttgtcagggattaggggaagggagggatgaataggcagagcacagaggatttttagggcagtgtaactactgtattcactacagtgctgggtacatctcactatatacttgacaatgtaacaatgtaggttcatcacttataacaaatgtaccactctgatgtgagttattgagtatagtgggcaggctgtgtgtatgtgagggcaaggagtatctgggaactctgtactttatgcccagttttactgtgaacctcaaactaccctaaaaattaagtctattttaaaaattaaacagggtgggaggaaatggaaggggagaaaataaaaaggctactcactgagcctttcctcatctccactgcctgtttcacacacttggccttttcactgtctgtagtttttcctctcctccaaccttagtcactttcacgtggatagttaggacagctttttcactctagtggatacagtatgctctaagttcactaaaacaagcatgtttgtctttcttactgggttagggagaatctgctgtatgatccaaataatatactcaatacattaactgggatccagtataacatgagtgattggtccataaaaatccaactctggaagtatcaattcgtgttttacaactatttttggatactgtatttctttctaaaccttccttagatcattgttacccttaagaatacaccctgtctggatcagcaaggtcacacagccaccgctgtgagacagggctctatgactggcttatcaaagagttggcatagctgaggggcagttccccaaagaaatagttcacttgttcaaagaactaagaagtcttgttatttaaaattaaaaaaaaaaaagtacaagggaaagaagcaggggggagaaaagaagaaggaagggaaaagaaaggaaagatgaggggaagaaaataccatgtttcttgtatcaagcctatcaagacacctaccaggatgttttataagattttctttgacacagaaggggaaagtcagtgtttcttctgtatcrgaacacttaatatatgaaaatgattttgcttcacaaaaactgtgaatataagtgtcttgcacttttatgttttgtccctggaagtctaggtcagatgctccataaaggttttggatgtgatctctaaagcatatgttccaccaagaagtctttctatattcaccatctctctggtttccatggaggtgatgatggaaacttatgtataatttcagactagcattgtgctgcgaatgatgtttataaaatattaaattctgataaagggaataatatttttaagtcattcttaattcctgaataatgctgcatgttaatggttagatatcatttgacttcaaagtctttcacaacataaactttgatttcatactagtataagtgacccggtaggaaaaaaaaaagagagagagagagagagagatgtttgtctttcttatagggttagggagaatctgctgtatgttccaagtaaatgttttctaccattaccatcttgttaagctaatgcaaaaaaagaacagcagttttcttacccagaatcccaaatttgagtcaaggccaatttcataggaatgtcctcctatgtaatggggagttaactgtctaaatcagggatcattaaactacagtttgaggattaaatatggcccacaaactgtttttgtgaagcccacaagctaagaatgttttacctttttaagggattgaagaaaaatcaaaagaagaataatacctcatgacacatgaaaaatgtatgaaattctaattccaatgtccataaagttgtattggaacacagccacactcattcatttacgtattgcccatggctgcttccacactgcaagggcagatttgagtagttccaggaggaactgtgttctccgcaagaccaaaacacttgctgtctggccctttacagcataagtttgcgcacccctgatgtaaataattgtttcaccatcttcccacctctgcaccgacacacatattcttcctatcatctctttctccttccttcccttcttctcttcctcttcacacacacatacctcattttgaatttggcaattatgatyacttacagtaaaggtaagcggaaatacattttaattttcctttgtcatttctctcctccctgtctgctttccctttcctctactgcctttatatagaatgtctgagggctgtgcccttttcccaaaatattttgttttaaggtgggggttagatcttggtacattttttgacttccatggaaagttttgtgttagtatgtggtcccatttttaacctatttgcagacacccccgattatctaaaatcactttcacatggggctgaggttaagctttatttcttttggcatgtccctaccacagcagacacttcctctttgccttgaaaggacaaaacgatgttcagctgtctgggcttaggcccagtatttgatttatacattatttaatttcctcctgaaaattggaagcaggactttcaggaatagaagtcagtatttttcatttgttttagaatacttctaggtstaatataatcatcagtggtagatgtcagcatgattagggggtgacttaaggtaaagcaaataaaatgtgaatacaaaggaaaattatttgacaatggagaagttccgaagtttttgaataatcattattgtatatgttattaggttttgggggtactacattttggggcacctgtcttcactttacccattgaaggaaagatgtctattatgttatagttgcaattgttgggggattagaagtttgaggaaaatgtaatgtaacccttccagtaattttacagaggatttttggattctctgtgagctgctactgcatttgtcttcacaattaagttcatacgaatgccaggatgtgaatgccaaaatagtttgagattttaacagcagtgaactcaggaaattaaaaattaactctggaaatactatttcatgttttacaaccacttttggatggtgtgttcctttttaaaccttccttagatcattgttactcttgggttacaacctgtctcctttttaccaccaaagttcttaaaagtctagcacacctactgcctctacttcctcactcataattcgcytctcaaaccctggcagtmtgggctttccctccctctgcacactgctaagctgacctcactatttccttctctccaattataataaccagctctaagtcctcagctttcctgacctttttgctccatctgtcagaattcgtaccctcttcctaaagccctctttcagtttttatgtgggactgtcctaatttcctctacttcttcctgtcttttatagacccatctccctagtatggagctgggcttaagtgtcccccaggttctgtttcttggaccatttttctccctacattcttaggctttcccttctcattttttctcattacctgagacacttcaggagaactcagagggctgcaaagagcacagtttgaaaatcaccccggtcctgtcagactacttttgagtccttaatacagcccaccctatgccacctctgtgccttcacatgagagtgtaccttagtgtgggagtgtgcactcccatggagtgccttgccaccaacaccaccagtacatctcttcacattcttctaaagcttattcctaaagcatctactcttttatgttaccaggctcccagtagatgctttccctccctcatctgagctatggtgggtaaagaaaaggtaccagagtcagacagatatggatttaaatatggatccaccacttacctgtgtgtgatgttgaacaaatttacctaaaggctttcaaatcagtttcttcatttataaattgggggtagggggaaggattttacctaccacattrgattgttggatagattcggtaacttatgtgaaggcagagaacacttggaaatcagtggtggtggaggtggtagtgctaatagtgctawtatcaccatcgtcaatataattatttccacagcagcattttgtttctcatatgtcagttacgtcactgtacttattgtcttgttctcatttcagaatttcagactcctcgaggttttatttatattcccctgttccccaagagcatagaacaaggacttaagcataggttttcctaagtgagttgagttgcatagaatagctattctcccctaaaggaaaatactgactccacagtgttcttaaaagtcagagctggtaagtttgtagctgtctcttcatattttaatcaaacattatcacactaaaaaaaatcattgttacattttgtcactctaaaacttgaaactaagtagtctttaaattttaaattttaatttctccaagagttaatgacttatatatttagatataggtggtctgaagtaattatttttaaaagaactacttttgtatttgatgcataaattatatcagtagtaaaatattcagagaagaaaaattaatatacaaacattaaattgcttttgattttatatgtttgattctgtgtccatcttatttttgattttgtaaaatcaatgccaactgcaaagttttttagcttaaataaccagcagtttttctttttacatgtttttacttacaaaacctttatcctctatctctcaacatatttctggaaaacagattttctgcttctgggaaacatcactttttcacaaatcacacatcgacctggttataaaaacctataactgctttgtttgttgctctgagggccagagttgtagattaggttctgctgtggatttctgaaggctaaagtagggaaggagtggttgtgctattccgatctgaacttctgtaataggagagtagcaaagcagtgaggagttgaaaggcctttaaaaaaaaaaaaagtatatgttcacatggagtccctctgaataagtaccagcaccccaaagtcactaaaattactccccaaatcaagcattcatcactcagaaagcctttatggatcaccagttttgcagggctcggtatttggtggtgtcctcacagctttgaaccagacatgcttcacctgagttaaggacacctctaccggcaggcccctagagagtggctcagggtactgatggggtcagaaaagggagggtgtgaccaaagagcagattgagtccacactttgaatactttcaggaactacttgcagccactcaggaatataaactagtatcacagctgagagctttatttaacattccacttagttataatctttacctaatctctactgtttttatttggctactagctatttagtgtaaccccatttttgtggaaggctggccaagagcacacttcaactcaatagtagtcaaakccagctctactgaacctacatgaacacatgagcacacaaattgtgtggttctgaagtttgtgggggtattttttagttcttgataaatgttcatctgcctaagcagtatatacaatgtaaagttaaatgtgacacctgctataaggcatataaattccacattcggttaaaaaccaacttgttaagactaaagtcctaaattagttaacattaagtcagatatcttattttatgctcttcatatattttccttctttccttcattgttctttttcattctttcctatatttgttgaccatgtactatgtgccagataaggttctaggcactagcatctaatattagcaacgaaaataaagaagtctattttgtgagaggcaacagaccatcaacaaaataaaatatagtatgtggcaataagagagaaggagcaaaataaagcagggaaggagaatgggattacagggagggctgcaggttttaatagggtggccatggaaaaccttgccgagaaggtggcatttgtgtaaagacttgaggcgagtgaactgcaattatccaaaggaagcacatttcagggagagggaacaagaagtccacatgctccgaacacgagtgttctttgcacattcaagaacagccaggaagccaatgtcactggagtgaagagtgtgagggggttctagagcccagttgaaaaaaagtgggagtaagtgattggtgtcgcatgctgctgatagattaaatagattgagaactgaggattgaccrtaggattagtgaccttgacagagcamttcagtgggggagtgttcagaagtgtcatttcaatgggtttaaatgagaatgggaagagaggaaatagaaaatggaaaatgaagagagctcttccaaggagagttgctaatgggaatgaaagcagatatggagacaaggaagggactagattacatctrtaaggtgagaaattacaacgtgtttttatggtggtggtaaagcttgactcaggtaaaaggaaatggaaccccatgcataaatagaaggattgatcttggcagcacagatacttcatctattgaaacaggaaagaaagttgagtrtgtacatacaagtagagggaaaggggtagactcaatggtgatagcatgttgaaagttcttctctgccacatgaacaaactttctttccagtgcttaaacaacacctgcagtatccttctcatatggtcatttgcatattatctctacagctgtcttatgtttggccagcttattaattgttaatatatctcttcctcttattgagcaaaaacctttcttctagaacattgatcctagttctgcttcccatagcctcccaagatggacagttctaatttttctatagaagagcctttgaaggactggaggactgatgtggtttctcaaggccgacctcattcctgctgattctaacacctagcccttcagtgtttctgctggcatgtgtggtttcaacccctgtcacattcagacactctcatctaacagggcccagggtatttaatcagtttcatttgctaatcaggcctcattggtcccggcctttggtatctgtttttctcccaggcttttttctacatatttagtgtttctcacaaatactaacattgaaccagcatgccattaagatttatttatttatttcagtagctttaggggtacaagtggtttttggttacatggataaattgtatagtggtgaagtctgggcttttagtatacccatcacccaaatagtatacattgtacccaataggtaatttttcattctttacccccactcccaccctaccccgttctgaatctccagtgtccattatacaattccatatacctttgtgtacccatagcttagctcccacttaaacatgtgagaaatgcagtatttggttttccattcctgagttacatcgcttagaatgacctccagttccatccaagttgctgtcaaagacgttactttgttattttttctggctgggtagtattccatggtatatataccacattttctccatcctcttattggtcgatgggcacttaggttgattccatacccttgtgatggtgaactgtactgtagtaaacatatacatgcagatgtctcttttatataatgatttcttttcctttaagtagatacccagtagtgggattgaaggatcaaatggtaattctacctttagttctttgagatatctccatattgttttccatagaggttgtactaatttaccttctcaccactagtgtataagcattcccttttctctgcatcctcatcaacatctgttgtttttctgtttttgttttttgtctttttagtaacagctattctgaccggggtaagatgatatctcattgtggttttaatttggagttctctgatgaatagtgctgctaagcatttttttatacggttgttggccatttgtatgtctttttttgtgtgaaaaatgtccatctgtgtcctttcccacttttttttttaagttccagggtacatgtacatgttgtgcaggttacataggtaaacatatgccatggtggtttgctgcacctaccaacccatcacctaagtattaaacccagtatgcattcactgtttatcctgatgctctctctccctgccctccaataggcctactttttaatggggttattttgttgctgctgttgagttgtttgaattctttgtaaattctgggtatcagtcccctattagaggcatagtttgacaatattttctctcattcttcaggatgtctgttcactctcttgataatttcttttgctgtgcagaagtgttttagtttaattaaagttccatttgtctatttttgcttttgttgcttgtgcttttgaggttttagtcatgaattctttgcccagaccmatgtccagcaatcttccttaggttttctttagtatttttacagtttcagttcttacatttaagtatttgatccatcttgagttctttttttatacagtgagagacaagrgtccaatttcattctcctgtgtatggcaatacaattttcccagcaccatttattgaaaaaggtgtcccttctccagtgtacgtttttgtcataaaagattgttggctatagatatgtattagtccattttcacactgctgataaagacatacccaagactgggcaatttacaaaagaaagaggtttaattggacccacagttccatgtggctgaggaggcctcacaatcatggtggaaggcaaggaggagcaattcacatcttaaatggatggcagcaggcaaaaagagagcttgtgcagggaaactcctgtttttaaaaccatcatatctcatgagactcattcactatcacaagaacagtgcaggaaagacccacccccataattcaatcacctcccaccgggttcctccyacaacacaagggaactgtgggagttaaaaatcaagatgagatttgggtggggacacagcctcaatgatccatctactgctgttggtggagcgtttaagtctcccactattattgtattgctctctgtcttttcttaggtctaagagcatttgttttatgaatctgggaaccctggagttaggtgcatatttatttaggattgttatatcttcttgtggaactgatccctttatcattatataatgaccctcttcgggttttttgtttgtttttgtttcgtttgtactattattgatttaaactgtttaatctgatataagaaaggctattactgcttgcttttggtttcatttgcatggaatatttttttcatccccttaccttgagtctataagaatctttaccagttaggtgggtcccttgaagacaggagatatttggcttgtgtttctttatccattccaccagtcagtatcttttaattggagcatttagatccactatttagacccgtattcaacattaatattgatatgtgaggtacaattctaatgatcattttgattgttatctagttgttttgttttcttcattatgttactgttttataagctctgagttttatgctttcaaatgtttttatactggtgcatattgacctttcattttgaaatttagaactccttttagcatctcttgtagggctggtcaagtggtgacaaattccctcagcatttgcttgtctgggaaagtttctctctcatttatgaaaattagttttgcaggatagaaaattcttggctccccatgggagaagcaccagctgtgtctacagtgatgggctgacagttattctgcttttgagaagattaaagataggacaccaatcttttctggcttataaggtttctgctgagaaatctcctgttactctgacaggttttcctttatctttcctttcaagttatctgatgcttttgtctcactactcttagaattccttcattcacattgacgttagatagcctgatgaatatatgccttgctgatgtccattttgcaatgaatctcctaggagttctttgagcttcttgtatttggatgtctaagtctctagcaagaccagggaagtttccctcaattattctctcagataggttttctgaatgatttgcttttcttttctctcaggaacacttatgattcttaggtttggacgttttatataatctcatatttcttggagactttgttcatttcttttaattcttgtttcattatctttttctgatttggttgattcaaaagcattctcttcaagctctgacatcctttcttctacttgatctagtctgtttttaaaactttgcattgcattttgtaattcccaaaatatgtcttcatttttagaagttctggtttttcttcaaaatatgtctctttagaaaactttccattcatattctaaattgttattgtgatttctttatgttggttttcaattttctcttggatctcatcgagcaacttaatagtcagcattttgaatttttttatctggcatttcaaagattttgttttggtttggatctattgctgggaggttagtgagatctttggagggtgttgtagaactgtgctttttatattgcagaattatttttctggttccttatcatttgggtagactactttttcttactatttttgaatttattttttattctactgggttaaaaaaaattccccttgagaatgtgactttaatgtttgcggtatagtcacctagcttaggctctgagtgctttcagtggcaaagactttccaagttccttggttataaaacatctttgcacagtggctttctcatatgctggttgtagtaccagtgtgctgggtgtgtgaacaggttcactgtctcgtggggctggaatggcagaggtcccatgaagcttacatcattctccggtggtgtgtacttttcagtttttttcccataatatttttcactgagttgaacagttcagcttttgggccagtaggaggtacccacaggtaaaaacagctgcagcttaagcagatggatatatgcaataccccagtggtggacagaagtcccagccttgacagaagcaactgggggagctctccttgaaaggcactgaggtctttgcaggagaaagggagggagccacctcagctyctcttccagaccagcacgaaagcaatctgcctccctgtcacactcatgtcgcaatgttctggatattcagatcagacgaggcacttctgtggatctgcagaaatgctgacattcatgtagagagggattgtgaacctaccccaaagtgctccagaaaggccatccataggtgcacccmagccaagctcctgtggaggagtcccagcsacgtctgcagtgataggcaaagggtagaagtccccttctccaggtcccttcacgagcactggggctgcccaactgctggggtagaatgacagtctttctaccacttagcccagcactgcatctgtgcctctgctgaaagaaacttcccacaagcagaaagttctaggactcaaaggctgcactctaattaattttgtcccacagggtgctcccttgatatggtaccctttcccttcccctaggagtgacagtcccttagggcaagactactgtaaatactgctgcttctctaggtatagccaccctgtgggggctgccacaatccaggctggtgctggggaatgtctacaagggatccagtgatgtgaagatacaagggttgaaggatcctgagcagaacaaagtcccacaacctatgtgcacgaatatggcagccgctactacagctcaggcctagggcaagagggaagggacactatgcaracaaggcagtgccctcaagaagtccccaaatcgcaatccactcctgtacttgtgcttacaagggcagagacactctgcctgagttcagatgccagcagtctgccacaagacctagagatgctgagagcactcccacctaccctttccaaagattactgagcctctgggggtttgacctctgccagcttcttgtaaaataaagcacactttattttgtggctgtatcatagattctcccagtgaactctgtgataggctctagcactctccccttaacactccatttgggctatgattattcacctataactttggttcttccttctgaggagaattggtcacccgtgtctcttatcagcaagctggagaagttttctgatgccacaggctgtggacaggtctgcaggatgtgcagtggcttgggctctgctcttagcttcagaggggagtgatgttgcgtggagctgaactgaacttcctctggtctcccaraagcaagtgcaagcaccagctctgatgagggtggcaggggagcgacatagactctgtaagatttctttggttttaaatagccctagtgtggctcagtgagtgagaactcactgaatatagttctcagatgccagctatggaagtaatgtgctgggcacatgaacagtctcaccattaagtttttatctaatgtgtttatccttaggatgaggccaaggacaaagtacaaccatcaaagratcccttccaaacctatctttacccattagttaaccccatctagacaggattgtaatttctaagtattcacatgatcccaggtaaatcaacatcaaaaccaggagacttggtcagattaaatggtatggggcaaagaaaaaggggcatatttccagtgtgttgaagccaacatgcctgggagtatagtgtatcactgaaacactatactctgaaacactgagttagtagggcaggcagttttcaaatcaagatgacacatctaatgttgaacactgtgggttgtaagtacccaacctgagctaaagatgaatatttcacagttatttgcataggagtgatacttaaaagacatgagagtaaattcattctttgagagattataggtaaagactaaaaaccaggggccaaggataatacatcatatgtctatggcatataagtatatgatcttaggagaattagaagctagtcctagcacattatcatgtacatgaaaagttgatgtaagagaaccatactggtttgcagcacctgtataaatacaaccatcctaattttcctattatcacttcctcaagcccatgattgctgcttctgacactttagaagcagtgtctgagctgatcttagtaccatgaccagccccattagcactgctacctcctttaccattacaacagagtatcagcagcagtggtgatcaccagaagactgagtgtgagtcagctccagtagccaagcttaggagaaaaggcaggtcagttcgatagcatgaagccacttggagatgtggaaaggtagagctgtgactagagctggcagaggcataagccttggaaggctggttggggcaaggtgaaaaatgggaaggacagaaggaggtaaagaagccagaaaaggcaaaattttaccaggttctttcctctttactggaatttgaattttgtcctacttgcctgtcttgagactttgactgacataaataaatcttaagacgaaaagggaacaaaagactgaaaacagctcaaatatcttttacttgaaactgggttaaataaactatgctcctataaaaggaatgagaaatagctctctatatagccgtgaagttgtttctagcataaattgttaagtgaaaaagacaaagcagagccagacgccgtggctcacgcctgtaatcccaactctgggaggccaaggcgggcagatcatttgaacccaggagtctgagaaagttgagaaacagaaagttctaggactcagagcctgcactctaccaaacatggtgaaaacctgccagcatggcaaaaccctgtctctaccaaaaatacaaaattagccaggcatggtgatgcgtgcctgtagtcccagctatttgggaggctgaagtgggaggacggcttgagcccaagagatcaaggctgcagtgagccagcatcacaccacctcaccagctgagcacgatcttgtctcaaaagcaaaacaaaacaaaaaaaagataaagcagagaaaagcgtgaatactatgctaacatttttcgggaaggtggcaggagaggtgggaaagcgtccctttatcaatatatcccagctaatgaatgaagaaggaataacagaaataggatagcatcattttgcagcccttcatgaatcaaaagacctggacaatcataagtggctactaacacatgaaaagaagagcagccatacattatgtgcawctcagcaatacctatgaagtacttgttcaaaaaaaaaaaaaatcaaacctgaaactccccaagcctctagatcttaatacaagttaataagaaatacaggaggcaggagatgttaaataacaccagagggatgcrggaagcaaaataaggaatatgggagactggataggatatataattctgtttcttgaacataaattttaagggaaaagagaaagagaaatcccttagatatgagatatagtaactaaatgtaatgtgtcacacctattctgatcccaattcaaaccaaccatctgtgaaatatactgactggtaaatgtgaacactaactaaatactgataatgttaaggaaatgtagctaattttaatgtggcataaaagtgttacagtatatctttagaaatacactaaaatatttatgggttaaatattgtgattctgagatttgcttcaaaaaattcagtgcagtgttggagataggattacagtgtagatgcaacaaaattggtcatgagttggtcattgttaaagctgggtagcaggcgagtgatttcactstatactgttctctgtactgttgtatgtgtttgaattttctatcgttaaaaaatattaagaagaaaacaaatagcattatcttttccctaagtgttcacaatctcctctgtctcccctttctcctattttctaaggagaaagaattgagcaagtttacaaagtggggtggagctgttgtgaaagatacttcaaatcattttttagctactcagaattatagcatgaagtcaaagttctctaggcttgaaatgctgtgtacctcattcttcccctccaacacatatttccagttatacgcacaattttaattgactgtagggactatcttcaaataacatttccataaacttccaaactgaaccgccccagattggagttttgtaatctattagccattcatgacccctcccctacccacaaaaaaagttgtttttgtttgctttctcttctgattttcatttagacttctttctttgccaatagatttaacacaaagatagcattttctaactttgaccataatccatactggaatcatcattcaaaaataatggcctaattgttcctacaaatttcataatcattttcaaagaagttgattggtggcccttgaggcttttcaactttatcctattttggatgatatctgtggcctagaaatcagttgtatagcccaaaatgttacctagactactaatgaacagcaaggtctaaggaaatggcaactagaggccgggygtggtggctcatgcctgtgatcccagcactttggggggccgaggctgtcagatcacaaggtcaggagatcgagaccatcctggctaacggtgaaagcctgtctctactaaaaatacaaaaaattagccagatgtggtggcgggcgcctgtagtcccagctactccagaggctgaggcaggagaatggtgtgaaccccagaggcggagcttgcagtgagccgagattgtgccactgcactccagcctgggggacagagtgagactccatctcaaaaaaaaaaagaaaagaaaaaagaaaatggcaactagaaacaagcagccccattgcagcacgctgaacaccgttttttggaagcatgcaccactgagcaggaattccaaaatggcacctttgcaatagtacattttgaggcattgtgttgccaagacagaaagaagagaggaagcagtgtataagcaccacaaatttacatatacatagaaaaggatagagggcagtttttacatcctctctctcatttcctccaccaaccaacaatcggcctgactcagattacctatccagccctcctaaggatcttcacttcctccccctagaaaactacagagttgctctgttgtcacagtgtgaaaacacacacacacatgcatgcgtgcrtacacatacacacacacacacacacacacttgatttggtgcataggaagtgacctaattcagtttgtcctcatcatagtgacaactagactgagccaatcagagactttctgtagggttttgattactggaattgagaaaatgagggctttctggtgggtgaagctgtgagatgtaaaacacagcaactgttcctggtcatgtgaagccaaagtacggagagaagcagagacaaaaactctcttcatcgagacggaatcccgatggcatcccaggccctgcttccagctggtccgctgaggcccagccacactgctttctttaagttcagttcgacccaataatatcattacaataaattcctccttttggattcaaattggctttccatccctagcagttcagccctaatatacagcagatgtcacaactgatttcacatatttggagaaataggagtagctgagacagaatttagtctrccttgctcagagacattcacagatagtgtgaaaaccactcatgagtcccctttgcttaaagttaccctggtcatgtttattacagcatgtaaaggtacatagccttaaagtcttttcaggacttgggatttttcttaaagaaaacaaatcaagagtgttcattaaaagattgatataaaaaattaataattctgaagttaacccaaaacttaatgtaatcttccattggaacatttgttgatgtgtgtggggggtttaaattccacaaatattattaaaatgagcaatcagcagcaagatgttttaaaatattttgtttcmgcatgtaaaatctcgttttattacagaattattttgttaaaggcacagctatgccaggttgctgccagagtgataggatcataacagcccagttaattttaaaagactcacaagtggtaggccttggaactactgatggcaacatgtacatcacattttagtataatgcttaaacttacaccacatcttgtgaatttatatgcatctgccaatgtgtgtgtgtgtgtgtgtgtgtgtgtgtgtgtgtgtctgtgcacgcatgcatgtagatacacatatatttatttcaaagagaagagagttggtgggaagtaggacagacttgtgaagtaattaagaatttctactggctctcacattcttcagtgtaacttaaaatgtgtacaaaagatatcttgaatacactgtgtcaaaactggtctggtttcatttccagttagttgccagcatgctaaaatggagatgcttgctaccaaggtgtagcttgtctaaagtttagtgattagatctccaaatgaaaaagtacagcctaaagaggaaattcttggcacttgtttcaattatctcctctttacaacattatagggtgctttcatgtgtatgtattatcattcatagtagagagtacattgactaagattgcaaaatagtttccattgtatcataatccccttgtgtccagttgactcacatctctgaaaaatttctgctcagttacaaatgtctgctggtctctttccaatgatactttgtttgtttgtttgatggttggaaatctgaagaaagttcacttagttaaaatggtgatgtaaagtatatgagtacagtcctaaaatttactaaatgtacatactcaaatttactcaactttaggtcttcagattttaaaaactagatgaataatctatcctttaaaaattcaccattaattcttcaagtataccaactgctgcatttctaataccaaaacaaccttatcaagtgataatttaattacaccttttaaatgaaattttaaaacatgatttattcatgaaaaacaagtagtttcatccacccttctttttctacaactctttgcatatctgtggcctgctatttattacagcctttctcataatttttagtgtaggcttaacaagcatatagttttaaatctttctttaggagactttctggcttttctcattgctgaattcgacacaaaccttattctcttattagcattcttgcaagggagtttaggtaataatagttaagaaagaatgtttaagtttgatagtacattaaataatagacaatgatcagaagaggaaaaaaatgcatgggtattttggttaaggttttcaaaacctaaatcatctttattctccaccttggcctgaacaaagaataactataatgaaaatttggcctatgtggcttttacacgtatgtgttatttccttccgttacctcacatatataattttttgttgttaaaatgcaacagctggatctcgctattggctttcagatcagtaaaatcagagattgccctttctttgcttcctttttagtggacctgcaggaaatagagttcagagtgtacctcactccttacaagacaacagcccatataattttgcagataaggaaacaactccttcagtttctaaatacccagtatatagtgttgttatcaaacatcaacacctgtatgcatttaaattcactcacagtttaaatgaaattacacatagttaatacatgccacttgtaaagtctaatcttatcttgggaacttggattttgcattccttaactagtgtgcttaaattttcagttgtattatcctatgttttttttgttttttttttttttagtagatgaaaataagacacaggtgtttaggtttctcttcatgtcgataaagatctaaacaagcatttagttatacttaggagcagctgttgaaattttctagggtacaaaagaaggatctaacaaaataaaacccactcacctctagcatgattagctccattttgtattttctgtactccccaactgtgataattccagccaaactgtattctggcctaagtcatctggaaagggggaaagcaggtgttattatgaagcattcagaggatttaagaagatttgaaatatagttactatagagcagtgattcctaacccctttttggttttggatcctttttagactataatgaaagttttgaaccttckctatagaaaaatatataatatgtatacatgggtrtatgttttcataagtttcaatgtattcttagatccatctagatatccrtagactctcagttaagaatctttactatgtggccaacaaacacacaaaattagtgaaataccaattgaaatagtatctagttcatgtaacaaagattgctttattatttgaaattaaaacaaaataatataatgtgagcttctaaataaatggcttataaacaacataagtattacaagtcagaggaagcagagaccaccttaaaaatataaaaataaaaaagatacatgagtgtatactgggtattttcagaatatcttatgtaattgggatgatgtgatttcacctcatttacatccttatttatttatatgctagatgggaaaaaaaagaactttcttccaaaaagcataccactgtcaatgagtatgacatgcataaaataagtgtaatataaataattctattttcttctcactctatgttatgtgctaatggtatacttattggttactcacaaggacctatcttcatctgccccttagctagctacagattgtcaagtcattttttccccctgtttaacacagatagccattaacaccatgtcatcttctttaaatgtaaaatcatttagggatgccaagcaaatctgctgattagctcaggccagcctacaccagattggagaatgggaaagtagtgaaagacacgcattacagattaagactgggtataaagagaagactctaacaacccacccccaccaaatatgccacacaagtgctcagagagaccagagtcccaaactagactacccaggtgaaactacagagtttcacaggaggcagctttatgtgtgtgtcaatggggcaaaatgtgagggctggcagtaaagaagtctgacagatgaggaaacatggggaatattaaaaccagtttaacacacttgcccacaccatcccccgagccgcttcctcccaagctcccagagcaccagcaaggaggttgagacactctagacttggggaggagtcttgaagtttttcaggaactttgcttgctttcttctcccaaggacatcccctgtcctcctctcctctttgcccaggaccaacctcaagctctcccattacatgagtgcttttacccaaagtgtggtgcctcttccagagctgtcagctttctggctatagcttggatatcagccccacaaggacccacaaatacaaacctcaacataggatgacttactgtgcctgatacgtttttgcctttttagtccatagtagacaattatcttgactataattgtcccagcaggagctgcctctgtgtctgtgtatatgcgtgtgtattttttttttctaaggcaaaaactagtttatatctttgttcaaagatgaccttagcaggagacctttttttttttggagttgatcggtaggtcaagccatgtgctaacctggcttgtctgggtatgtctgggaagcagagcaggaccaaggctgcagggcctttatggaatttctgtgctaggaagggagatagacatttaacacaaatatctctatatcttgacatttgcgatatggcaggaaagtacaggcacctatgggactataaaactgatcctaaaacaagcaggcatgaggaggtagtgaggtcacctctaggaatgcctcctcaatggaaacatttgcactgaaccttgaagattaggtagatgagccagtgcttttgcacaccttgttccatgaaagcaagactgtttttttactgttgtattccccagtgtctgcttccttgtaggtgatcaataaagatttcttgaataaatgaaagaataaggggctcccaacatctgtttgctctcttatccctctccttccctacccagtggttcctgttctctccattcccttaccaactggtatgttatttttaaaactaaaaatactctgttttatcatattattattcaattaaagttagaaacatttaaaatccccatagatgcaaatgctagaacaatgaaataaaagctcaagattttttctgcccccaaagctctgtggaataatcaattttataaatttttaaaaaacaaaaactatttggaaggctgaagcaagaggattgctccagcccaggagttcaagaccagcctgggcaacattgcaagaccccgtctcctaaaacaaataagtaaatacaattttaaaaaggaaaaactaggcttcaccatgcaagtttataatgaaaggttatacactgaatatatactttagctatatatttcaaagacctcaagataacgttaaggccgggcatggtggctcacgcctatagtcccaacacttgggaggccagctggggaggaccacttgaggccaggagttagagaccagcctggacaacatggtaagacttcatctctataaaacataaaaaagccaggcgtggtggcatacacctgtagtcttagctacttgggaggctgaggctggaggatcacttgagcccaggaggtcaagactgcagtgacccatgttcaaactacttcattccagcctaggtgacagagagcaaccctgtcttcaacaaaaacaaacaaacaaaaacaactttgaatcagcaaaattaagcaaccaagtgtgttccccttctctaatgtcattaagctttgagtgtgtctttacagaaatttttattttcttatgtatggcatcctagattgtatgactttaacataatcccagatggattaattatcatgaagcctattttgcagacgattcaagggaatttagcccaagagcaaaagttaggtaattccttaaatctgaaatctgtcctctgaaatactactctactcaccgcttaaatggttttcagtgaagtggcattttaaaaataagtgctgcttgctttacctctgaattcccttctccaatgccattttactccctgagctgctttcttggcagtttggggcaccccttgctgtttgtgcctgtgayagtctgacttccatctgctgctctgcagccaggagcctgctgtgctcccttcagtcacatctttcatgcctggccattcaagcacctttcatcaggtctcaatgggcctgggtaaagggccctccccctgcatccacatgagcacataatctcccaggtagcctcctccttgaagcacctccagtgcatgtgttcgcaaacagcaggacatcactctctactgggttcctaatccctcagacacacagaggaaggaggtcgcaaggctgtgaaagtgaaaagaaaagcgagggggcgggtgagcagaggcaacacaatgtcagcgcctgggccctccagcggctgcaccacaatcatcgccagctgcagcccaattaagctcaacaggtcacaggtgttccagacagaagatgcttttaacaaaaccactttcttgaaaatacctaagactttttgaagcactgcagcccatttcttttggtagattctttaaagctatttagtacccttcaaatacaaagaagctgagaagcacatttcggcctcagtggaaggcgtgcttgcttcatgcagaacagcgggggcagcagccaggctgccgtgaccgagcgcagagacagcatctctgccaatacgtggattcagtgtgcagctgcagaaaaaggacgtgaggggtgtctccctcctccagcttggtcgcgtctgatactgtagcctgaactgtgcagttcactcactcacacaagaaattgctgcatagccatgaccttgtgtgtactcttaaattacaatctctaggatgcagttgtagttttcctatgaacttttaagcagccctgccacatgctggttaaactaggtgaatgaattcagctatcaggaactacttttcatcttctgacacattttaaagtgctggcttcattttctccacagatccaagtgttccctgtgcctgccagaagtgtggggaggggatgacaggatccaagcagaaattaggtagttgtttaagtcaccttcggacctttgttacccttccacctttctttgaggatatcgataatctctgagaggcagttaggaatgtagtggggaaggtcaagttagaatttcggcatccctattggaagggagcggttcttggttcccctactcctcaggcgcacttacagcagcatcccttcttcccacgcctgtgtgccactctcatgggtatgtttgcctgttgtcattattgtaacctgtttacagccaatagcgaggacatgctgacgctacccaggtcttatctggaaatggaagcaactgcttaaatttacaattgggtttctaatctgtcaacgcaccagaaaagcccctagtactactgtgaaactgaaaagaacatgggaagagttaaagcacagcgggaatgaatacccagaatagggcccaacgttttcagcttttccttcctgttgattagtttttggtaaacagtctttgccttgactgttactttttatcacgtcatttttttaaattattactgcttgcttagaaaccatgttggttttaattttcacaatacgcctgtttctgttttgctaagctgagccacctgtttaaactcttcttgtctcatgaattgggggaaagaaccgtaggcaatgtataagaggtttcatttttttccacagtgaagtaagacattgttcttattcttcatggcattcagaattctgcacaattgcctcttttgcccttttgcatttaaaagtgaggtaattagatttcccaaggttcaatggtcaagagccttctcatcccgcggagttgcttccccacactgctcacaagtggagctgtctcgcgtaatccagttattgctatattgttgttataaaggaactgctttttcagagagctagcatagcatgaaactttatactcacatgtccctttgctttcattgcttttttccccacatttgaaactaattactattttattcagtgtctgtgaggatttctaaacatttttgttaaaaatcttttcctacgtcctaggaattcatttcaaatatgcctaaatccttcacattgtgagatcctgcctttgttgttttatgtttttgtcagatattcgatcgtcagatctattattactgctgaacaaatggaaagaaaatttgtgacatgttggcaccaaataaattagtgtcatagccactgaaacaaaggcatgtcttcgtctagctctgacagtgagatcttgggcccactctgctatttttttgtcttattttctcattttcacaaacagataatgttttacctttgcaaaaagctgtatatatatatatattctaaagcttggatatcaatttttttttcttttttttttctgagatggggcttcactcttgttgcccaagccagagtgcaatgtcacgatcttggctcactgcaacctctgcctcccgggttcaagtgattctcctgcctcagcctcccaagtagctgggattacagrcatgcaccaccacacccggctaattttttgtatttttagtagaaacggggtttcaccctgttggccaggctggtcaggtatccattttttagtcaaaactgaataagatgaaatactcagatttatagagctggccaaaacgtttttgtttttacagcctaatagcaaaagcaatcttgctggtagttggctagtaattcatttctatgatgtagtctgcagcctatgggggaagaggacaagatggtgaagggattaggggaaagcttccaaaatcctttttgccaaagaagttaaggagcttgagcgacccaggttttctctctaaatgggttagtttaacattccagacagtctgtgattcaaacttgtctattcacctatacatctactcagcagagttctttatggcctcataggaacaattcagctgaattcccccatcactgaaactgttccagactttatctacttttgctttttgttttttagagacagagtcttgcagtgttgcccagcgtggccttgaactcctgggttcagatgatcctcccatctcagcctcctaagtagcatgactacaggcccacaccactacacccagctccatctgcattttgaatgtgatgccagcagagtgatgagctttgtggtggtccctgggttcagtgtagatacacacacacacacaaacacacaaacacacacatacttatctcattaggttttcctataaactttatagctagtaatgagaaaggtcctagtttaaattgaagggttttttccctcagtttctgtagtattcattcctaaatagagagatatgttgacagatttatctgaaaagacctcatttttccaaagcttaacacagaaaggaaaatcccgtaatcttaggttagtttcatcaagtgagacaataaatcgccatttgcataattttctttttttagcaaagattccattctaattctccaaaataatatacagtcatgcaccacataataacatttcagtcaacaatggaccagatacataatggtggtcccataagattacaatattatatttttgctgtaccttttctatgtttagatacacaaatacttacattgtgttacagttgcctgcctacagtattcagtaacatgctgtacaggtgtgtagtgtaggagcaatagaatagaccctatagcctagtgtggaatgggctattaccatctagatttgtgtaaggacagtctgtctacacaacagtgaaagcacctaacaatgcacttctcagaacatatccctgttgttgagcaacacrtgactrtatgttactgcactgtttgtaaattttctgaagttgtgctccattccagtgcagtttttttctatgacaatacaacaaagaagctcctgttcctgtgggatacattttgataccgaagaaagcatctctcaaaaataacaaaagcatagctgtattcttgctagaatttctaatttatgttagaaattagttctacagaaagaactaaatgcagagtagtgctccaaactgaaaacatagcttgagatgaacatacatcacagtattaaacaattttagttatttactttctcttcattctaagaacttaagaagacctgacaacatctggatcaggggttcccaccacccccaggccatgcaccggtactggtccgtagcatgtcaggaaccaggccacacggtaggaggtgagcagtgggcaagtgagcattaccacctgagctccacctcctgtcagatcagcggyggcattagattctcataggtgtgggaaccctattgtgaactgtgcatgtgagggatccaggttgtgcrctccttatgagagtctaatgcctgatgatctgagatggaacggattcatcctgaaaccacccgcactcctccgccccctgtccatggaaagattgtcttccacgaaaccagtccctggtgctaaaaaggttggggactgcttatctagatcatatgaaacataagtaactaaaaatactatagattggccaaatctggggaagatgaacatagcatgcatctttttgaaaaggtagttgtagttaagtaactattcagttcagcaaacataccttgactatttacatagccagagcacaagtaagtgctttggctgctaccactgttgctgccctttgacccattaaacacactggcctyccttcygtctctcatgtcctctccccatcttctcagaaacacaaggaatatgtctatatgtctattccttgtgtttctgtcctccacccgcttcctttttctattttggaatggggagagcaaaagtaaaaagctatgctaataagcaagagccataatgtgccctgattgagttgtttggtatctcccaaagtatgtgccaaagatcaccattaaaccatttatagatattctgccagaaataggaggggaagagttctatgggaaacaacragtgtcgtagtccattctggctgctataaccaaataacttrgactgggcaatttttaaataatacaaatttattgctcacacttctgaaaactgggaagtccaggatcaaggtgccaacagatttggtgtctggtgagggcctattcctcatagacataccttctagctgtgtcctcacatggtggaaggggccaaccagctccatcaggcttcttttataggggtactaattctgtcagtgagtacagaacgctcacaacctaatcacctcccaaagacctcacttcttaatactagtagcattggagattaagtttcaacatatacattttggagaaaaacattcagaccattgcactgggttaaagaaaatcaaactgaccatcattagtagcctttgtaaaacctttaaaattctattgtgcaccatggggaacagaatatatacaggttgagtatcactaatctgaaatccasagtgctccaaaattcaaaacttttgagtaccaacataacacacaaaggaaatgctcattggagcattttggatttcaaattttcagattacaaatgttcaaccagtaagtagaatgcagatattccaaaatctgtaacatgtctggtcccmagcatttcagataaggaatactcarcctgtatagtgttgcccaaaacttatttgaccatggaatacttctcctgaacacactgatttcttaacggaaatgctggcgtggaccatgagaagagcaggagagctgcacttttcttgggagatattatatcatatcttggaactcataccacagtaagtggctcccagagcaaatagaaaccagccatcatggacatcctaagaatacatctgtttccaaatctacctttttattcgcggtaggagaaaagaaccaataatccagtcaatgcttttgcttttggaatttctactaagaagccttttcatgaggaaaaaataaaaacaaaaggaacttttaggagtggcgctctgtcagctgcttgtgcatcagctgcttgtggatttggtttagagctttagagaggactggcattgactagctttcactgtcattgtggcccacatgacttcgaaaacactatcattgtgaattttagttatatttgatggtagaattattcttttaaaaaaatttctccattctgtctactgaggctagttcaatgtaatccgtgttttctttcttcccaccttgctgcttctctactcattttattcctttcccttacctgtatgcatgtctcagttctgttcttcacactttggtttccaaagctgtaacttattccttctctccacactaaagccctttccatttgcctccctgaaagtacttctaataccatggtacacacggcatttaccttacatgcatccactactggtttgtgagcaggggaagacaggtgctatatcttagacatgcctggatcttccacctggcttaatatagttattgcacagagtagctattcagtggatgttgattgacgaaagaatgactggctaattatttgtagtgtcctggttacatttccctcagttactggcagtatattgctaagtaaatgtgataggaaagtaagagtggcagaagaagrtgaccttattgactagttcttcagagcatcctttataaataaaaagaaacagagtaatgtttattgaagcaagtgttgaattcaggcagtgtttctcccgccctaggacatacagacagctgcactccttcctctacacagaagaagtcacgttcatattgaggtccttgagtacccatgtttctcttttcattaacwctcagaagttctctaggtcatccctatctcatccaaccattagtgatctggtcaaaactctgtccaagttttctatatctcaagtttcgtagttctccaagctagatggaattgtttaagagacaggggagtactaaatatagtagggaaatttttcccaaatgttgacatatactagaggccccaagttacaaacattcacatttcaggtggtcactacttctctgaccataactgatcactaaagccgctttgtcattaccatgtaagccmccmcaaaacaacaayttatagctcatagaaaaatctatagmagcaggctgggctcgggggctcacacctgtaatcccaggactttgagaggccaaggcgggcggatcacaaggtcaggagatcgagaccatcctggctaatatggtgaaaccccatctctactaaaaatacaaaaaactagccaggcgtggtggcacgcgcccgtagtcccagctactcaggaggcttaggcagaagaatcgcttgaacccaggaggcggaggttgcagggagccgagattacgccactgcactccagcctggtgacagaacgagactctgtctcaaaaaaaaaaaaaaaaaaagagagagaaaatctatagaagcaaatgtgaaggaaagtaagtgattctgcaaagaggaatgcccaggggaactgaccctaaggacagccttctaggccctaatgatataacatttcccactacctacatttatttactgtgctgtattaggctccctgaggttccagtgattacaggagtacaaccatttcttcttctgccagtttgattactgtgtgttgagagtgaaagcctgtctgacaattggttcccttcctcggatgtgccagcggggcaaaccgcccatctsgccatgtgaatcaaaacccagaaacgttgagaggttccaggcagccttttggttacctctytttttctcaaccctgctctttttccaacccccgccctggccaccatggtacacatgctcatctggccactctgttggatgtgtttccatcagactttacacatacccctattagcaagatcactgcactgtgcaaaaacagggagatatcagtcatatagcaaatgaaatagtacagtaattaatatttgtccactcacatagtaggtgctcaataaatgttyccaaccattatgtgccaggctctctattctctgagggagtctcagctatgaggggtgggggaggtatgcaggagagagaaagagagctccgtcacctggcaggaaatgtagtgctctttgcctcttccagtgattcttcagacttcttagccttgcaaccattgcttcaaattcttgtccagatgaaagaagtgctgctcagaagggtgtgggtggggactcttcccacttggtcccttcacctccctttgtagagatctccaaggtccccttagaacacagtggaaccattggatagccagtttaccatgctggtcatttcacaggtttttactgtgcttattaattatcacattcttgttttcaaaagagctctttttgcaccagaacatgtgataaagtggttttactaatcccttgaagttttgttttttccttcaacaagatgatagccaccctcttttttcagaaaaacattaacatgcataaccactacagttaacttcggcgctcattaatgaagcccagaactaatagttacattgtcgtaatttgacaaagccatctaaatctatgcatgtttttgaaagctccctaaacatgctgctaaatcccctaaaaagctactaaactgctttggcagccattagcccagcataagcagaggaactcttttcagtgagtgaacaaacagagaaaatacgctgaatggatggacaaatgtgtttcagctggccctttcatttaccaatataagggcgcagtcaatatcaatcactgttttccctgttgccctgaaaatcacaatatctcttttcatcccacaagctcttttcactaccgtaatgtgtctttagaatgacactggcatcagcctgcttccgctgtctgaagtccagagagcttaaaaacacatttcgggattcttgaaccttcctccccttccgttttcctactgcctcctccctcctccctctgcatccattccgccccctccccagattcttttcaattcttccagctttcctggctgagtaaacagcattcacttctctgttctaatgcagctctccaaagtaaatgttgacaaccctatctgatattcctgagatttaagaactcattaaagagatacacataaagaaatgcttttacatgttggtaatacatcaaaggttgaaaggaatgtggaaactctgtgctatgacacggtgtgttgatgagcaaggcctcactctgtatcagaatatctccccctctgccctcccttgaccgttggctcccgcctccctccaccacatagagacatgcatcctttgccatcccttgttaaaagtatgtgcgtgcacagctacctacccttacagttaagagcaaatgcccttaaaagcaaatgccacttcttagatatcttttggcactcctggttctgagtacttaatacgttgctttgggatgaaggaaagaacagaatgctctgtatatgattaccttttatccttttgaaaacttgagtggactaattcttgcagataaattttagcaatgggcatttagttgtagaaggtaccacagatgaatatttggaatattatgtttctaaaagagtactgattgttttctacctccttttatttacttattttttaaaatttcagattgtagctgtctgcagagaggcagctcttctggctctggaagaagacattcaagccaatctcatcatgaaaagacatttcactcaggccttgagcactgtgacacctagaattcctgagtcattgagacgtttttatgaagattatcaagagaagagtgggctgcatacactctgagaaaatatatatattcaagatgctgaaaatcctttccagagaaaatttgtttctttttaaaattttttgagagtgttaaaaaaaattttactaggcaaaatgtttgaagtatgttcagtagaatttaggggctttggttcttacagattttcaagtcatgtaagtacagtgaaaatatctctgagcataagtttcaatcagttttacctggaaatttgtggtgtggtttaaaaaacaaatgtttagctttttcatttgcgacctagtctgttcatcccatgaagcgatttctttttccagaatctgtttgagtgtctttctaaaatgccaaacatgttggcatcaattttatacagggatataaaaaagtatatgtggataaattttttgtaatctttagggatataaaaaagtgtatgtggataaattttttgtaatctttatttttgaaggccagccagtaaaatggcccaatgtgccagccaggcttatgtggccttgttttcaaatatacatatatgtgttatcattaaaattcatatatgcatttttgttttagccttcttaatctctacctatggccaaaaaaattttttttgagagatattttgtataatacaatgccctttgaaagtgtaagcccactctaagcctagatcagtaggcttgggttttttttgttgttgttttgtctttttttttttttttgagacagagtctcactctgtcacctaagctggagtgcagtggcacgatcttggctcactgcaacctccgcctcctgagttcaagcaattctcctgcctcaacctcctgagtagctgggactacaggtgtgcaccaccacacgcagctaatttttatatttttagtagagacaaggtttcaccatgttagccaggccggtctcgaactgctggcctcaggtgacccacccacctgagcctcccaaagtgctgggattacaggcgtgagccaccatacctggagaggttttgtgtttttgtttttttttcataaaatgcttttaataaatcatatgaagcattcatgtttttacttatacatattttcagggtaccagtaaactttttagttcaaagataggccaaattgtacttttttttttttatgagacagagtctcgctgctctgtcgcccaggctagagtgcagtggcgtgatctaggctcactgcaagctctgcctcctgggtttacttacgccattctcccgcctcagcctcctgagtagctgggactacaggtgcccaccaccatgcctggctaatttttttttttttttttttttattagagacagggtttcaccgtgttagccaggatgatctcgatctcctgacctcgtgatccgcccgcctcggcctcccaaagtgctgggattacaggcatgagctactgcgccctgccgccaaattgtaatcttaaacatattatgttgcattctaaatatgtatatttatgcttcttgttatttatcctcaggatttcttcacactttattacttcataaatactcttgaaaaagctttcagaaagtgattctctgacttcagatcagaaactggcaatgggaagaatgtgcacttaaacttgatcactgtagatctttgaaaattcccagaaagacaaatcagacaagaaatacctgattatcaaaataatgggctatacagttttgtggtggcatacattccttgtttgtttgtttagagataggatcttgttgtgtcacccagggtggaatgcagtggcacagtcgtagctcactgcaccttcaaactcctggagctcaagtgatcctcctgactcagcctcctgagtagctaggacaacaggtgcacactgccatgtcaggctaatttttttttttaaacagagagacagagtcttgctgtgttgcccaggctggtctccaactcctggcctcaggtgaccctcctgcctcagcttcccaaagggctgagattacaggtgtgagccaccatgcccagcctgtggtgacatatattctgaagtcacatctcaaatatttaatcctcaaatatatttacatcctcaaaaatatcagattttcaagacaacactggtttaccagtacataaacccacctaggggacaaagaatattaccacttagaactgtgttgtcaaatacaataaccactaattgtatctgaccattttaattaaattaattacaattaaataatatttaagaattagtttatcagacatatcagccacatttcaaatgctcaatagctacatgtggcaagggtctgccacactggacagagtagaaaacattcccatcattcagaaggttctcttggacgctgcagatctggaaaacaagacttccatattgaaataaatacaacctcaaaacttttatgctctgtgttccctttagttgttatctacatagaaaattatgaaacaagagaggaacttaccttcttccctattaaatatatggctaagggcacaagaaaataagaggaaaacttatccttcagggcctaaacaaggaaatgaaagaaatctcattcccaatagaataaaaaccagaagcttgaaatgactctggtgcaggaggctgggtggtggggaggagggtagcagtctcaatcaacaagtttagatattaatagccactcaaagccttcagcccatataacatgaagtgacaactgagctctgcacataatgctcaagctctataataaccaacactctcagcacaagggtagacaagaaaagaaaaatctcctgctggccaggaagaccacaaggaggctttctgacttggcctgtgcttttgatttttaaaacattttttaaaagaggcctctctgggctgggcgcggtggctcatgcctgtaatcccagcactttgggaggccgaggcaggcggatcacgaggtcagaagatcaagaccatcctggctaacacagtgaaaccccgtctctactaaaaattcaaaaaattagccgggaatggtggtgggcgcctgtagtcccagttactcgggaggctgaggcaggagaatggcgtaaacccgggagacggagcttgcagtgagctgagattgcgccactgcactccagcctgggtgacagagtgagactccgtctcaaaaaaaaaaaaaaaaaaaacctctgagaattctgactatgagcttacctgcccatggctttagaatgatttgaattcacactaccttcaaattcatgaaacctcaaaacctacaaattaacctaaaaacatggagccaagctaaaaatgccctgggggtaactagcacttggactagttacaggaatgtagcttcgtctcagaggattccaaaagctaatgccttgcttaccaagggcttgtaatctcacaggatgtgatgggtggggcctcagatctgctgatgggagcataaattggtacaaccactttggaaggcaactggctatctagcaaagttgaagaccctacaatctaacagttctcctaggtgcatatcccagagcaagtctcacattgatgcagtgagatagtgaataggaaagttcatagcaccattatttttaagtagtaagaacccggaaacaatctaaatatccatcagtaatagatatatgtgatagtcatacaatggaatactgtggcaataaaaaataattagagctacatatgaaatagggatgaaacacggatgaacaaagaatgttttagaggaatatgatatttaaaatttgaagcatgaaaaatatgtgtttatgggggcacatatagtggaagaataaatgaatagaaaagaaaagcaccaaatactggtgaggaatttcctcaggggagaaaagttgagctgcttcaattgtgtcagtaatgtttcatatcttagggtgggtgatgggaatataggtgctgatttaatatagtctgtactttttgtgtacctaaatatttcgtgataatttttaaaagatgggccttaaaccaatacagtcatatcatttaactcaattccatgaatttacaatgcaatccacagtgcccacaaccccatgtttctggaaaatcaggagtattgggtacaatggaataaaatgcaagaaggcaaataagagatcaggcttttaggacctaggaaacaaataaagaggaatttgttgctgaaagtaatgtgtagctgacactctcattacctgacacaatgggagacattatgtctgggaataagacatctatttccatagcactgtagtcctgcaaaggagttggaagttatgaatttttaaagattttagaacattatatctttagtctctcataagccaattatttatatctccacatagcccattattaccattgaaaaggcatgcaattcttctatttgaagcttgttccctttttacaaaagtactagtaaaaatctgagtcatacaaaagagcaggtcaggtgtcactaataacagtttacctcagcttcatctccatgaaggttttacttctaatcccagagtctcatgtttatgtattacaagagtgtatgaaagctgggcgtggtggcacacaccagtagtcccagctactcggtcgggggttgaggtgagaggatcgcttgaactcaggagtttgaatccagcctggtcaatgtagcgagatcctatctcttaaaaaaaaaaagggggggaaacagtgtatgatcctattatttgggtttgtgtgtgatcgaatacatggtatatagttcatggaaaatttaagctcagcaaggaaagaaaatggccagcttcctgtcttaggaagacaatttactttttggcatctgtttggttgaaagtttgcctttgatccagattctttcggatgtcagggatattcacattgacatgtctttttagtgttccaggagattttagtttgaatagtacaattttttcttcttacaacaaaacttagaacggcttctaacttatttcttcatggccaagaaactaccctaacttatctcgataaatatttagttctgtcttatttctaatgtgtaaaacaggttttaaaaataatatatagattttgcatttataaaaaaagatttaatttatagaaccaaacttgaacatatgtttaatttagcctaatcagaaggttacagaaaaagttgctgtaaagatagaataaaagtattgtactggtctgtttttactgaagttccagaatgtgaggttattagagtcttggcttattgtgtcatgttttcctgaatgcttcctttgaagatgagcacacaccaaagcatcctttgatattatgtatggattaaattaacactgctttccaaatgtggtccacatagaaattctaatgttacaaatttgcctttcttccttgcattttcattataacagttgtgtgcacacataggccttttgcctaatgtctttatcaaatataccccttactccaacaaatttttgcagaaagagatgttacagggttttgagagtcctacaaaatcatatggaaatttgtagactcttctttcaggatttagtgataaacatttctggaaagacggttaagtgtcacacccacacacagcaaaacccaaggatatgaaaagaaaaaaaaatagaaacatagaattcatctatgcttaaaatagggaacaaatataacacgtattacaggtttcaattttacaccaacttaaaaaggatctaggaagttttacacgtactgtgcttgacaacacattcagtgtgacaggaaataccttgtttacttggtttcaatacaccatcaattgtaagcctcactatttaaaaacatatttttctagaaaaaagataaagtactataatattgatttgcatgttaatggtattacatcctgattccagaagcattaaaatgtgaacaacatatataataaaaatcaatgaaatacagttaaatgcaaaggaaattaacatgtaataatacattcaaatattttataatacacccacagccattaaaatattacttgcacccaacataattataggtaataatgaaaattgcgacaagcaaataggagaattaaagatactgaatgcagattattttggggccgtgaataatcacaaagtgaaatatcccaaatgaaaatagcaggggaactatgccaaaaatgtggggtgaaggggaaggctgggaggaggagagaaaacaccaaaagaaagctggggtacatttggaagaaggaacattttctgaggaaagaggaaaaaagtttagaatacaatggctttgaagtctcaaaaaaagttaagaaaacatggatgatgt

SEQ ID NO: 5730 - DNA, 12442 bp, Homo sapiens
atctacatattaataaattctgtacagtggtttggcttaatgttttatatgttataagaaataagcaaaacatagggatgatatttttagtaaaggtatttcagggtatatgagaatcagattcctagggccctgggtacctcatcttgctgtttaaagtcctcatggaggatcagtggagtgcagagcccagaaatcatcctgaaggctgaagctccctggtgaaaaggaccctctcctgcaccctggggctcagagggaacaacaaagctccctcccagggtctccagcctctggcctatactgtcagcctgcactttcttggccttcctggctgctaatattccagttcccagcagcctcctctctcacccttcacctcttctgactgggtgcgaatggtaactagaccaggcagtgccctccttgtcagtctgcctgtctgcctggttccctctcagagtttgtgtcttcactcggttcatcatccccagccccagcaggaacagggagaagtgacttggcaaatgccccactcaaaatgggatccctcaaccagagaccacttgtgaaagtcagttttccctgactaaagaaacaggacatttaccctgttagaagttgatgtctgccagagacctccacctgggaaatgctggttcatggcagggtctctcttttagtaaagggaaaaattcctggctaattgatagctaataagtcatttagaatccagttcatgtaaaaggattacctacttaaaggattaactccattataataaggacacacatcccacaccgcacatccaatgtcatttgtgagattgctttgattcgctcatgtagaatgttactctgctgctttgcagagaggcttgccacacatttcaaatctctgctcctcatttcacaccatctggctcatgaggtgaaggtgatgagaagtgtcttcagacaatactccgaggtttgtctatcagagtcatagtcatatattacatatagagattattttcttagaagttgtaatttattgatatgtattttactcatggcatagatagatactatccaacaattcgtttttattacctctacattacactgcttaggtagccactactggtacctctgcattttctttcttgtatgtgacattaacgtataagattgtatgtacatggtggcttggtttccaggaattgctgattaggtaatttagaccattccttccactgagtacaatgggaaaaggaggaaaacatacatatttgaaaaatctggttgagcaaatggatgggctaacaaagcagtgaagatttgcctggccaggaaccaggagaggggagaaatccagaagagcaacttgagctgtggggctgcttttgtggatcagaggcagtaacacctgctccctggccagaagccaacttccaggattcaggactcagaattcagaacttagacggtcccttggtctctctagaattcagtgctcatttagaccgggctaagaccctcacactcaatggctggaggatccaagcttatggcatgactgcctctggagcatttcatgctagagagatcccaacaggtgtaggtaaatggtctagagggtactagccaggcttccatggaactctgtgtaaggcacttccctgtgttgttactcatgttggccatgtcctcgggaatttagtggaacggccatgtcgtcttgagtggaagtgaggacggtgagggggtccctgggcagtcagagattttgtgtccctgcgtcctttccttccatctcaaccagagaccacttgtgaaagcccaagaacaaatgtcattaaatgtccgaggcgaatccaagaccaccgatccattgcgcccaggagccttgggccatgtagcccagcagtagtgaggtctgtgaggccttggtcacccccaaagtgttgccccaagaggagctgccgctcgttgccatcaggcacctcaggagctggacatggtattcattataatttctgatgaggaactagagaggtctcatagcatatagaccttgatcaaattgggtcatggtggagtcaggcaaaactctgcaatgactcacaggtacctaagtataaaacaaagtctcaactcagagcatccatcagagcttcaggctcagtagtcattcctttatgctgttgctgtgtttgtactgtgataactggtgcttgaagggaggacatatagttacatgttgcgggaaaacacatgtcattagaaaacttggcatgatttagggaccattgccttttccatggtagatgtgggactctctgtcatcttcaccctgttgttccaagtgcagaagagaaagcttcttcctgctttcagctgcgtgactgacaacggaagctggaattcagagaatcagtggcagcctctgtctctccaggccccaaccctgcaggtttaaggaatggacttaggtctctggcactttgttctcaacacacattttccttcactcattcagaaaaaaaaaaataataatagaaaatgaaccaaaggctgcaattctcatggcacctagagaactggagtacggaccaaggttgccacatgcctgtcattgctccaccacactcggttgccgtgtgacctcgggagaagctctctaccactagggacttttaaactcatctgtgaatcctggataaacacagacattccggtaaccttactgaaatgaagtgaggaccaatgagttgacaggtggagaaaaatttttttttttttttttttgagacggagtcttgctctgtcacccaggctggagtgcagtggagcgatttcggctcactgaaagctccacctcctgggttcatgccattctcctgcctcagcctaccgagtagctgggactacaggcgctcaccaccacactcggctaattttttgtatttttagtggagacggggtttcaccatgttagccaggatggtctcgatctcctgacctcgtgatccgcccgccttggcctcccaaagtgctgggattacaagcgtgagcctccgcgcccggccgcagaaacagaaaaatttaagtgatggcctttactcctagacagggcttttttaggaacatgcaccttaaaagtaggaggaaaacataatgccagcaacaccctgcctaaaagcccctttagtgatgataattatcattcatctttctataaaagtacagcaagactttctacctcaatatctcaaatcagttaaatatatcttctgatcatataccagtgtggacccacatgttttgctccaagtgaaaatgaaaaggaatgagaacatctccacctttgtgtggtgaccatgggaccacggaggcttggaagccagcctacatctgcccaaactctacatcacctgccattgtcaattttcaatctatccgttctatgctttggaatcctacataattcatactcttgaaaaatctcattttcatatgtagggcagggtagaaaaggtgatatctctgttttaatttgctaagacttccataataaagtggcacagactgggtaagttaaacagtagaaatgtattatctcccagttctggaggctacaggtccacgatggaatgtattgcagggctgattgctcctgaggcctgtctctggcttacagatggccatcttctccctctatcttgtcaacattggcctcaaaatatgtgtacagggacacagtttagcccataagagtctgcgccatccttggcggtgcatattataagaaataaaagagaatacaaccctttggctggactctgttgatattttgaaatgttggtcttgcaataagaacaccaccaaaggccaggcgcagtggctcacgcctgtaatcccagcactttaggaggccgaggcgggcggatcacgaggtcaggagatcgagactaccctggctaacacggtgaaaccccttctctactaaaaatacaaaaagaaaaattagccgggcgtggtggtgggtgcctgtagtcccagctgctcgggaggctgaggcgggagaatggtgtgaacccaggaggcagagcttgcagtgagccaagatctcgccactgcactccagcctgggcgacagaccaagactccatctcaaaaaaaaaaaaaaaaaaaagaacactaccaaaacaagggagccgaagtttagttttccctggaaggtgagcactccctgagcctggccgccccagggcagcaagacccagtgctatgtagttctccaaagtcctatttactttagtgattctgattctgtatttttaactgggaaaaggattctctttcaggaaagcaaccacttctgatgctatttaggtattattctccttatacttataggagaaaaaattgatgttaatgaacaggaaatatttgccaaattatcacacaaataatttttgtatcattttaaaatactccttattgtactgagcttgttggtattttaataaaaattattggcacataatatttatacatactttggggtacacataatattttcatgcatgtgtagaatgtgaaatgatcgagtcaggatatttaggatactcatcacctcaagcatttatcagttatttgtgttgggtgaatttcaaatccactcttatagctattgtgaaatacacaatacattgttgttaactacagccagcctgctgtgctatcgaatattagaatttattcctcctatttaactgtatctttgtacccattaagctacctcgttttatctcccagatcccccacacacccttcccagcttctggtaactattattctactctccacctccataagatcaactttttttcagttctcacatgtgagtgagaacatgtgatatttgtctttctttgcctggtctatttcacttaacatactgacctccagttccatccatgttgctgctagttattatgaggtagttctagctggaagaatagagaattaaaagaaatctttgtgaagcccctacccaggtttgtcaatttgtaacattttaatattattggctatatgtagtatacatagaaaataatagaaatatatgcagatagccctgattctccacagttctgttatgtatgtgtttccgctgaaacacatacagtacagtactctatgtactgtacagtactactgtactgagtactggactgccagtggggagtggcggatgtcttgaatttggtgaatgcctttatattgctacaaagtgtttttttttttttggttgtttgttttgagacggagtctcgctctgtcgtccaggctggagtgcagtggcgcgatctcggctcgctgcaagctccgcctcccgggttcacgccattctcctgcctcagcctcccaagtagctgggactacaggagcccaccaccacgaccggctaatttttttgtatttttagtagagacggggtttcactgtgttagccagggtggtctcggtctcctgacctcgtgatccgcccgcctcagcctcccaatgtgctggcgtgagccaccgcgcccggcctacaaagttttttaaatcctttcgtttgacatgattttagactttgtaaaaattgttttttgttgaatgtatcattctgtggcttgctttatcgtttaatatggtctatgaggtgaacccacacacccatagaaacagttcatttgttttcagtgctggatagtatttatgagacgaatatcccacaatttatctcttctcctgtccgcgacctttagcttgtttctgttacagacactgccacaatgaacatcctgggtcatctctctctggtcccctgtgtgagttccccaagatacggatgtaggaatgggattactgtgcttttaccatgtgatgttataggatgtcaaattgttctctgaagaggttgtatcaactcccccctttaaaatcttctttgacattttacaggtcaagttatcttcctccccaactagctgctcmkcctcagtcccccttcaktggctccttttgctgtagatgctggagcactstggggttttactgcctcccaatcactcyagtgtcctccactcccaggrttttaaatatcgtctagacacagatggctcccaaatrtatatctctacatatttctataatcaaaaaactaatggtaccaaaacaggtactctgatatattgcagatgggcctgcaaactggaaatgttttcaggaaaggcagtayggcaatttctgtctaaattaaaaatgcatacacccagtagtcccacttctagaaatgtgtccaaaaatasacctgcattcctgaaaaatgactgtattcagaattatatgwtgcaaccctgtttgtaaaatcaaaaaggaaagaagaaagaaamtgaaagataaaagaaaaaataatccaaatgtctgtcactagcggactagttaaaaaagcattgcaagctgggcacagtagcattcacctgtgaatacactctactccactctgggtaacatgaggaggcctccctaccttcctaagaaaacccaaacaagcactgcatatctacacggcggagtctacaaacatttaacacaaaagaagaaagacataggaaactcttgatattccctcatgggatggtctccatgatacattgttaagaagaaataaagcaaggtgtagaataacatatagagtctgctaaaatttgtgtgaaaagggacaaagagatatatatacacatttatatttgcttgcatatgcataaaatatatttggaagaataagcaagaagatatccctggttgcctgttggggatgagacagggtaagaaagagacattttaccttttgaatattttgaattttgaattttgaactatatcaagaaataaaagataattcctagggcaaccaaacaaaccccaaaaaaattcaaaatgaaaaaccttttaaaaactaatagaatttttttacctttattaaaataaattttaaaaattttctaaatattatattattcctttaacaaggaggtttaccgccattttaattcagtacgttgttttctttttaattgcatgatctttctttacatctatcttttttccattacaaggtaaaataacagcatgattaattaaatgcaatttgtttggtgaatgaaattttgttcaaatcttggtctaagtgggaaagggattctaggggatccagtgcagcagttatgggtttcagtatgctcacgacgccctccagtgtttgtgtgggctcatggatgccatatctagaaaacactggaattctcaagcacacgtgactgaagccatttgccaaatgttcaaggtcctattaatggcccatctgagtacttgtcatacgcggtcaccctatctttggatcagaaggtacactcagagctcctagtgtcacatcccaggcccaacctgctgagattagtcgaggaaggtctggaggtcagtgtcgtgaggggtgggaagactgagggtgtgggggccagttgtggagtggcgggagccccaggtgctgtatgaagccgagcctctggatcaccctgtgaccccacatttggtcccttcctgggtgtcttccattcccaggactcccaggaaataaaatgctgcaagattggggtggggagctgtccagggtgggtcaggtgtggtctcactgatcctacacctctgcctcccagcccactcccagccctcttctgatattagaaaccaacacagattgccttagggtggtggttctcaaagtgtggtcctgggggaagcagcattggcatcacctgggaacttagatatgcaatcttcagggcctggcctggacctactgtatcagaaactctgcatttaacaagcccccagcagaattctgcttttcaaatcagatctctctctctctctctctctctctgtgtgtgtgtgtctctctctctctctctctctctctctctgtgtgtctctctctctctctctctctctctgtttcaagtctcaatattgagtagctgtgacttctggatagtcaggtgtcagacaccctttcttgccaggaggcaccaggctcctcaatcagcttagtctcattcttggcctggcccagggaaagatgttcacttcctggattctgagcaaagctctcctatcctgggtgcctgtggggctcccacttacaccacaaaacaaagctcaaataatattattttcttttatgagatttttggtattccttcattagtcagagctgaagatctacatatatgtctaccaagcaagtgtgcatgtcccactagccagtttgttagtcttgccaatgcaccacaacgtagcagcctctcagtctctccttgtgaggtgttacctggagttctttgtctcaccaccaagagaattaaggagcgtggatacaaagggtgaggttggagcaaaagtttaataagcaaaagaagaaagctctcccccacggagagggggcttggaagatggttgccatttttacagctgaatgcaaaggcttttacaagaaactgatgagggctgggtgtctcatttgcataaggcacgaatttccggtagctccaccccatcctcctagtgcccatgcaggcccttagcttgagttactccatattgctttgtttccctgactgcccatgtatcgggggacagaattttccattgcgggcatgtctggacaagtctcctgtgcagcctttcttatttgtgcagctgtgggcatgtcttaggcaagcccccctgtgcaagttcccttctctgtgcctgcaggccgttcttttgtttgaaataattcaactgaggacccaccataactgcccgcctgaccagtttcttccttttttctctctcaatttgtgttatgatttccttactgatctctgcctgagcaagactgggcacgccttgagggcaaggagggtttatttcctcttacctcagttccagctcctcttaaaacaatgccccacgcacagtaggtatttgataaatgtttaccaaatgaagggattgcctggaatggcttggcagacaggaaagcagaatgaaaacccacaggccaaaagtggctgggaaaagattttccaaatcctagtgctgggcacagggcccactgaaattcactttcggaaccttcccatctgtcttgttctcctctcatcagggacttccatgcccctcaaagcccacctagtcacacactacctttcaggaccaccttccagatcagccaggtgcaaatcccacagacttcctgcctgtggctccaaatgctcagctgaaattctgaggctaatttcagtggagttagaggcttatcccttaggagtggcaatggctggctttaagattcgagaagtagtgtttacatctcaaaagagaagaccgctccaccagaaatgcagagtttttgtatgtgcgggtccggggtcttcaggagataaagaatgatagctccaggagcgctgggacccccgtgcagccaccagtcaccacagcctaggcaggggttgggctctcacctcggcccctcccctgcacgccctggatgtggatggtccccgagtgtgaactcgcctgggctctgaccctgggtgctcttcccgccgttgtggagcctctgcgggtgtggtgcatgcacagggggcttcacaggagacccggggccctttagagtctcaaggccaacattcttggagaatccatgtcaggcattcaggctctcagagactcagatgcccaaactatgaaaatgagagaatctatcccactctctcaggtgtggtgagattcctattatatgactatcggtcatctatacatggattgtactctcagagttgcctttatcagtcggccaatgcctaaaacccaaagatgggtcaggcatggtggaggaagagttcctttcttaccttctgaaggtgccatcaacaggaatttctaccctgtggagtctagaggagactttccttgaagctgagttgggaatggacatttggacttttttttttaagagttagtaactccgtggagaaccacacatttatttgcttactttaattctacagcaacattcgaggtggcttactgcaacaaacccagtgtaataaatacatacgaattactttaaaataacaccaaggaaaatatacattttaaaagattaaggctggggtaaagctggaacattactaggcgggaaggaacatctgaaacatttgctgaaatggagttgaccctttacctagccatagatttgttgcctcacgatttcattacatctgagcaccagggaggggggtggcagttcaggtcaccagtcccttgtttcctgcttcaggaacagtgtcctgttctatacttacagtcaaagcaaattacatcgttgtaagatgtttaatgatgaagtcaaagtccacagagtcagcaagtaagtgtaaaaacctcaggagtccaaggacagtctacgtttctccccagaaatggcctcactatgcactgttgaagggagagggtcctttcaaggggccccaagatgcaggagcaattgggctgcagctctaaataaagatgtcctttctacctgcagattccacaaaacctcacaggcaaatttggtgatctcacctgagctaggaattcggttttttgatgttggttctctttgagccattgtgtgagctttaaaatgtgacgtggagattttgctatactggtatttccttgctggaatttgacatccacagtggctctggcttccctgtctggtcccaggaggaaatggagtgtcctgcactttttttcagcatcgctttgtgtaagaaggatcaggagacctggagtcaggggctcctccaatctcactctccttcataaaacagtgtcccttaagctttctgggggtgagggccttaacaccgtgctgttctgatgaatataattgtcccagctcccgaaacaaaagcacaggtgcacaaaataccgactgttgcaagcaatgccaaggtggggatgtttcctaggtgccaggtttagcactttgactttgtatgtacacacacaggggccaggcgttgtggtttatgcccgtaatctcagcactttgggaggctgaggcatgagaattgcttgaagccagaagttcaagaccagcatgggtaacaaagcaagacccagtctctacaaaaaaaaaaaaaagaaaagaaaagaaaaaaatacacacacacacacacacacacacacacacacacatactgggtgtggtggctccagtctgtagtcccagctactcgagaagctgaggtaggaggattgcctgaatccaggagttggagcctgcaatgagctgtgatcaggacactgctctagcttgaccatcagagtgagaccctgtctcaaaaacaaacaaacaaaacaaaacaaaatacatacacacacacagccagagccagcactgagggagaggctggcctcaggggtggggtcacaggcatttctcaggtccctctcagtggtctttgtctctttttcctggaggtggaggagtctgtacttcatgaggagaagtcctctgaagaaggcgggagatactcaggagcggggtccggagagggaaaaggatgaggaagtggagacaaagtggagggggcagggcaagaagggcacatgtgaggaatggggagggggaggaccttccagctgtcagaaaggtcccacgcagaatttggctcttggtttttctgctttatcaggatggatttgggaaaccagccggagcgggagataaggagtctactttgcaaaggacacgtgtgagtctcctcctaatttgaactcatgagtagcagctgacagccaggacccttgtgtggggcgcgtgacgcccctttgcaaccagggcgttttctgcaccccaccagccatccctcctgggaccacgctggtcctctccaaccctaacagggagagaaggaaggagaggtctggaggctttgggtcctccctcgtgctccttcttcctctgccatttattccctgagtgtccttgactttcctccgctacccggaccccactacagcaaagcacatcctgcacactggcctggactccctttgtaaccacccagtgtgttcaccttgctgactgcctagacaaagccgatttatcaaggcaggggaattacaatagagaaagagtaattcatgcagagccggccgtgcgggagaccagagttttattactcaaatcagtctccccgaaaactctgatcagtttttaaggataatttggtggatagggggggccagtgaatcaggagtgctgattggttggctccggtatgaaatcatagtgagtg

SEQ ID NO: 5731 - DNA, 16006 bp, Homo sapiens
ggtgggctcgttcgtgttagacgcggtggactcgttcgtgttgtgttagacacggtggactcgttcgtgttagacgcggtggactcgttcgtgttgtgttagacacggtggactcgttcgtgttagacacggtggactcgttcgtgttagacacggtgggttcgttcgtgttagacacggtgggttcgttcgtgttagacgcggtggactccttcgtgttgtgttagacacggtggactcgttcgtgttgtgttagacacggtggactcgttcgtgttgtgttagacacggtggactcgtttgtgttgtgttagacacggtgggctcgttcgtgttagacgcggtgggctcgttcgtgttagacgcggtgggcttgttcgtgttgtgttagacacggctcgttcgtgttgtgttagacacggtggactcgtttgtgttgtgttagacacggtgggctcgttcgtgttagacattgcccattgacttcctcagtggatgtgaggaatgggacctgagacattgctgttccttcgtttcctcccttcagtctcccaatattaaataatatccaagtacattacaatagtatgcaattgtgtagacaagtattgtaaatactattgcatattgtatattattgtattttattgtctatgtaatatatgcgataaaaccccacactaatgggatgcattgggctccaaggatggagcaggatggagcctcagcgtgtaagtcaggacgtctcagcatgtgctggccatgggtttcccggtatttacaacatttggttgaatcagtattccatgattacatgataggatgtaatatatataataatcgtttcaaatagcctgaaggaggatggggaaagttcccaacacagaaaggatgcatgtttgagaagatgggtgtgctacttaccctgatctgattactatatgtatatacacatatagtacatatatgtaaacctacatctatacatacatgtgtatgtacatatacgtgtgtacatacacatatgtgtatatgtatgtatacgtatatatgtatgcatgtgtgtgtgtgtatatatatacatatgtatacaaatacatgtgcataagcgatcccctcctggaattgcttgagcccaggaggtcaagtctgctgtgaggtaagattgcaccactggccgggcacggtggctcatgcctataatcccagcactttgggaggccagggtgggcggatcacaaggtcaggagttcaagaccagcctggtcaacatggtgaaacaccatctctactaaaaataccagaaattagctgggcatggtggcacgtgcctgtaatcctagctactggggaggctgagtcaggagaatcacttgaacccgggaggcggaggttgcagtgagccaagatcacgccactacactccagcctgggcaacagagcaagactccatctcgaggaaaaaaaaaaatgatattgccccattgcactccagactgacaacagagcaagaccctgtctcagaaaacgaagaggaggaggaaaaaaaaagtactaattatctgaaattccaatttaaccaggcatccagtgttttatctggtaaccctcattcttacacacacacacacacacacacacacacacacaaaggcgggatagttgtcattcccactgtaaacataaggaaactgggcagaggccaagcaaccttgtgtagctcacatagcaagaagtgggtgaacccagctcatgtcttgactctgagctcagagagtgacaacttgtcaccagcgcccccatagccaccaccctttgtccaccccaggctccctctgcaccccaacccaagctccggccgcttctctgtccccctcctcctgccgcatcacagcccacctcagcctctttgtaggtttccatgcgacgctgtaccatggctgggagtcttccaggcgccgtgctgagcgccttctgtgcatggactccaagtcgccataatcgtacgggttacccaccattatcagtcccctcttatacatcaggctagtgagacagtatcttatccacagtcctacagctggcaggagtagattcaaaccctagcagcaccaattagtggtaaagagtgtggacttgggaacttacaggagtagagagcacagtggtggttaccggggcggtggggtaaggtttggggagatgttggtcagaggaggacagtttcagttggacaagaggagtatgtcttggagatctactgcacatcatggtgactgtagttaataacaacatattgtacacttgcatatcaccgatagtagattttaaatgttctcaccggccgggcgcgctggctcacacctgtaatcccattttgggaggccaaggtgggcggatcacctgaagtcaggagttcgagagcagcctgaccaacatggtgaaaccctgtctctactaaaaatacaaaaattagcggggcgtagtggcaggagcctgtaatcccagctacttgggaggctgaggcaggagaatcgcttgaacctgggaggtggaggttgcagtgagccaacgtcatgccactgcgctccagtctgggcaacagagtgagactccatgtcaaaaaataaaaataaataaaaataaatgagcgtggaatactactcagccattaaaaggagtgaaataatgtcttttggccaggcacagtggctcacatctgtaatgccagcactctgggaggccgaggtgggtggatcacgaggtcaagagatcaagaccatcctgcccaacatggtgaaaccccatctctactaaaaatacaaaaattagccgggcatggtggcgggtgcctgtagtcccagctactcgggaggctgaggcaggagaatcacttaaacccgggaggtggagtttgcagtaagccgagatcacaccactgcactccagccttggtgagagagcgagattccgtctttaaaaaaaaaaaaaaaaagtcttttgcagcaacttggatggagctggaaggcattattctaagtaaagtaatacaggagtggaaaacaaaaatctgtatattctcacttataagtgagagctaagctgtgggtatgcaaaggcatgcagagtgatgtaatggacttcagagactcagaagggaagggcagaagtggggcagggatgaaaaactacacattaggtacaaggtacactagtcaggtgacaggtgcactaaaatctcagaattcaccagaatataattcatccatgtaaccaagaaccacttgtatcccaaaagctactgaagcaacaagccagatgcagtaacctgtacaggccacacctgtaaccccaacactttgggaggccgaggtgggtggatcgcttgagcccaggagttcaagaccagcctgggcaacatagcggacccccgtaactaaaaaaattacaaaaacaagccaggcatgatggtgtacaactgtagttccagatactcaggaggctgatggggaggcactggttgagcctgggaggttgaggctgcagtgagccatgatcatgccactgccctccagcctgggtgacagaagtgaggccctatctcaaataaaattaaataaataaaagttaaaacaggctgggtgcggtggctcacgcctgtaatcccagcactttgggaggccgaggcgggtggaacctgaagtaaggagcttgagaccagcctggccaacatggtgaaaccccgcccctactaaaaatacaataattagccagacctggtggcagatgcctgtaatcccaactactcgggaggctgaggcaggagaatcacttggacccgggaggcagagtttgcagtgagctgagatcatgccattgcattccagcctgagcgaccgactgagcgagactccatctcaaaaaacaaacaaaaagaaaaaaagaatacatccatggatggataatgaatgagaggttgtttatattcacagttaaccctctcatctccagtaatgcaaccatcttcttcctgcttagccttttggagatgctgtccctttagtggtcaaattctgaagaaatcaggaaataattcattcgacatgcccagcacaagtgaagatcaggcagcagaaatgcattcgacctgccacccatccatcaggagactatttactccactactgtaggggatactgacaaattaaatccatacctagtccagatatcaattccacaattttttttttttttttgagacggagtttcgctcttgttgcccaggccagagtgcaatggtgtgatcttggctcaccgcaacctccacctcccaggttcaagcgattctcctgccttagcctccagagtagctgggattacaggcatgtgccaccacacccggctaattttgtatttttagtagagatggggtttctccatgttggtcaggctggtctcaaactcccgacctcagatggcccacccgcctcggcctcccaaagtgtgtaagccatggcactcagcctttttttttttttttttttttttttttgagatggaggctctctctgttgcccaggctggagtgcaatgcctgacctcagctcactgcaacttctgcctcccagtttcaagcaattctcccacctcagcctcccacgtagctgggattacaagcacccgccatcacgcccggctaatttttgtagagatggggtttcaccatgttgaccaggctggtcttgaactcctgacctcaggtgatccacccacctcggcctcccaaggttgagattacaggcgtgagccactgtgcctggcccacattttttaaaaaaggggcaactgcagtgtagtagaacaaagttgtgaccaatgctaggatactctgttcatttcctgacccagccatgaatacactggaataactcatgcaaaatgccagctcgctggccccccgtttccccacccaacaaatgaaggggctcttacaggttcctttttgtcctgaaattcatcaccaatgcaaatttcttaaaaatcctttgtctggcagtccatgcctgtccttcagcatttcccagatctgaccctcaggactcaccaagacagaagagggcggtcggggatggagacatggttcctcagccctgtcctgagctctgtggccagggagggaagtggtgggagcctggggcacaggctcaggatgtgatgaggatgaagaatgctctcctcccttcctccaccagccccggcctttcctaattgagactcatcgagccgtagccggctcctcagtacagtgacttgcacacaagctccaaggagccgcgcttatctcctctggccagcctggcgttgcaccgtttgtccgcctgctggggcctggtctgtgttcccgtgctcccataaactccctgatgtcactaggaaaatacgcatcaaaaccacagtgagatatgacttcacaccttctggaatggctgtattttttttttttcttttgagacaaagtctcgttctttttgcccaggttggagtgcagtggcgccatctcggcccactacaacctccacctcccaggttcaagcgattctcctgcctcagcctcccaagtggctgggattataggtatgtaccacaccaggctaatttttgtatttttagtagagatggggtttcactgtgttggccaggctggtcttgaactcctgacctcagttgatccacctgcctcggtctcccaaagtgctgggattacaggcatgagccactgcacccgaccggctataattttttttaatggaaaatagcagatattggtgagtatgcagagaaattggactgcgcgtgcattgctggcagggacgtaacatggcgcccctgctgtggaaaacagttccagcagctcctccagaagttaaacgtgggattgccataaaatccagcaattccacttcggggtacacacctaaaagaactgaaaacagggtctctaacatatttgtacacagtgttcatagcagctttattcacaatagccaaaaggtgaaaccacccacatgtccatcaacaacaatggataaacaacatgtggtatatacacacaaggtaatatcaaccagccttaactaaaagaataaaaatcagccaggcacagtggctcacgcctgtaatcccagcactttgggaggccgaggcgggcggatcacctgaggtcaggagtccgagaccagcctggttaacatggtgaaaccccatctctactaaaaatacaaaaattagctgggcgttaaattagccgggcatggtggcaggtgcctgtaatcccagctacttgggagacggaggcatgagaatcgcttgaacctgggaggcagagattgcggtaagccgagatcgcaccactgcactccagcctgggcggcagagtgagactgtctcaaaaataaaaataaggccgggcgtggtggcccatgcctgtaatcctagtactttaggaggctgaggcaggcagattgcctgagctcagsagttcaagaccagcctgggcaacacagtaaaacccccaaaaaatacaaaaaaaaaatagccgggcatggcggcasgcacctgtagtcccagctactccggaggctgagacaggagaatggcttgaacccgggacgcggaagttgcggtgagccgagatcrcgccaytgcactccagcctgggtgacagagcgagattctgtctccaaaaaataaaaaatattataaaagaataaattcagatacatgctacaacgtgatggaccttgaagacattatgctaaaggaaatattccggacttgacagataaatactgcattgtgccgcttatctgaggtatcgagaggagtcaaattcatagagacagggattagaatggtggttgccaaggcctgggaaaagtggggagttactatttaatagggagcgcttaggttgaagatgatgacaaagtctgggggatccatagtggtgatggttacacaacactgtaaatgtatttatatttaatgccattgactgttttttgttttttggttttttgagacrgagtctcactctgtcgmcgaggctggagtgcagtggcgcgatcttggctcaccgcaacctccgcctcccrggttcaagcgattctcctgcctyagcctcctgagtagctggractacaggtgcsygccaccaygcctagttgattttttgtatttttagtagagacggggtttcaccgtgttagccaggatggtctcgatctcctgaccttgtgatttggcctcccaaagtgctgggaatacaggcrtgasccaccgckcccggccagtgccgttgacttgtatgtgcacttacaggtggttaaaatgagamctatcagggtgttgatatctaaaaacctccctgccatcatcttccctacatctctcattcagtgaccatggttgaatgcctgccacctttcaaatattatgtcaggcactcagtattggcagttttatccattataaatgctttaagctgcatagaattttaaacgtgttaataaaagtagttataaatctttaatacataagctggctttaaaattattggtaaaataagattagaaatgtcttaagaattgttggcgtttttgtttgcacttattgaacragtggtttcatgcttatccctgcagaatactatgagatttgtcataagggttataaaactataaacccggctaggcgtggtggctcacgcctgtaatcccaacactctgggaggccgaggcaggcagatcacctgaggtcgggagtttgagaccagcctgaccaacatggagaaacgccatctctactaaaaatacaaaattagctgggtgtggtggcgcatgcctgtaatcccagatactcaggaggctgaggcaggagaatcgcttgaacccgggaggcagaagttgcaatgagccgagattgcgccactgcactccagcctgggcaacaagagtgaaactccatctaaaataaataaaaataaaacatttgttttttgtagagttggggtttcactatgttgcccaggctggtcttgaactcctcctgggctcaagcaatccaccgacctcagcctcccaaagtgctgggattacaagtgtgagccactgtgcctggccctattgggtccttttaaaagatacataaaaaatcaaatgcaacagtgaagtcaatcacccgatggcagaaattggggtgctcctggcatgtggtcggtcgaagccaaggacactgctcagcattctgcagtgcacaggacggccccgcccaggcggagaatgatccggtgacacatrtaggtgggaaggatgcacgaatgatggcgtttaggaagaatattatcacttctttcccgtaagagcaacttagagcaagaaaatggwattcttagggccttctctcttatggaggctccaagccagggttgccatggcagaagatgctgggcttgctttttccttgagagaactgtactcaagatgatgtaamtgtcaccccgggtgccacttgggtgctttggagaagcgctcagacgcgacacgccgtgacgactccgcggcaggcagccggacctgtcctctggcgtgcggttcacgggctgtgtttatccccctggttccttcacagccaccttgggaaatacgttgcctctgaatcacgccaggcaggvtctcastgtgtgtgctgcggggctggaaatcagggtgacactccgctaccgaacagcctgactaggaagccagaaagacgctgccggctttagtttgtcctttgactttccttgatatgaatgaagatagagcacttccacactgcacaacaggaaaagcccagaacgcttcctggagatagcgagggggtgatgcagcggacagctatggctgatgaccccctcacctctgactccccctccctccctgctttctgaacgcacatccatcaccaaccataggttcctgtttggggtttgctggctggaaaaaaaaaaaaaaaaaaaggaaagctggctttctagtaaaaaccacttcctttgctcatttatcaaactcaaaygctaggagggccacctaacatcctccgtcccacgcaatggggtgtttctggagcactccggtktatcagggaccctgtcagttgccatcgcacatgtatatggggccagcccctgtgccaccgaagaggggggatattgaaaacatgttacagccaggagcggtgcccccttggttcaagcagttcttctgcctcagcctccctaatagctgggattacaggcgtgcaccatcacgcctggccactgttatgtagtttttaccacaatttaaaaaaggaaagagtgcctgggtgagtcctacgcacctatwcggagaaccaaaggctttgaggttatcctcggcccacccatctgatgggagtgtttctcaaacttgcttttccgtgatctcccagtaagaaatacctactacacacacacagtctccggtcggcatgcttagggtagtcttccaattccccctcctggtatttacaccctggagtggtccrctcctcttgggctgaacctgtaacttgctcccaagcaagagcacacagcaagctcacgcacrtggttgttggtgtgattctgtttctccagattgtctccattcctccctggcttctccacagggccgctcaccatggcagccggctccatcaccrccagccagcgagagggcaagacaagagggctgacgagggacgctaccatcacagaggtcagttttgtaacctaaccacaagactaacctactgtcacttctgccctatcctactgctagaagccagtcgctacatctcccccacactcaaagggaggtggtcgcacygtggggtccactggaagttgcctaccagactcaggtcatcccaaacacaccctctagccatttggtgtggcatcggaaagaaaactaaggccaggtacggtggctcatgcctgtaatcccaacaatttgggaggccatggcggaagggtcmcttgagcccaggagtttgagaccagcctgggcaacatagcaaatgttatgttgccacctctacaaataattagccaagtgtggtggcatgcacctgtagtcccagatactcaggaggctgaggcaggagaatcacaggtcgaggttgtagtgagctgtgayggcactgcactccagccttggcaacacagtaagacctcgtctctaaaaaagcaaaaagggctgggtgcactggctcacacctataatcccagcactttgggaggccaagacgggtggatcacctgaggtcaggagttcaagataagcctggccaacatggtgataccctgtctttaattagccaggtgtggtggtgggcgcctgtaatcccagctactcgggaggctgaggcatgagaatcgcttgaacatgggagacacaggttgcagtgagctgagatcatgccattgcactccagcctgggcaacagagcgagactaggtggctgttctgtgtactgtgggatattgagtagcatccctggcctccccagtatctcaaatatgaaaacatgttttctatctcgattactgagcttttcggtgcctccttcggttctgcacctaagctaagagccccttcatctcaccctgatctctatccagtttctaacacagcagtcttgtaagatgcccggacttaaacggttatttcctgtgaaacaggtgaaaggggctttcatctctaaaaagtcggaactttttttttttttttgagacggaatcttgctctgtcacccaggctggagggcagtggcatgatctcggctcactgcaagctccgcctcccgggttcacaccattctcctgcctcagcctcccgagtagctgggactacaggcgcccaccaccatgcccagctaattttttgtatttttttagtagaaacagggtttcattgtgttagccaggatggtctcgatctcctgacctcgtgatccaccgcgcccggccaagtctgaacttttgcatggcctgttgccctggtgataaactgatgccttgtttcctaaaaggaataaagccatgagttgcctttgttcagctcatgggcattcacccatgcacagaggaaaaataaaatctacgactcgggtacattttcttcttttttttttcttttaaatgagcaagtttgagagtctgcagtttggactaccatgagaattgataggaaggtgggagtcccaggcaatcccaggtcctgtagcagcagctggtggggttcccactccatgccgtgcagagcctgaactcaggatgacacctgcacctgctctctggctgggctctggcacaggaagccctcagcaaacacccccggcacagccatgccatagccagacaacagctcgctgtaccacaccatcatgggagacagcagttattctgagcatctcactgctgaagaaaccaaggctcagagaggaccatgcatgcacaaggtcccacagggacccaagaatccaccaagtgtcagacaacttgcccatgctcttcacggagcaccttggaaccctccccgacaggcaccgctggctctcctgacgtggcctgcaagtgcacggagccccttcctcctcggccattcccagtttagattcccaggggaagcatcagatggcccctctcccctgctggcagcagagcagacggaaccagccagagcccagggcagtgctcacctgcaggccagtccactgcggccagcaccgccccctagaacctactgcgggcatggcggccgccagtcctgggtctcccggctcaggtagtgccaggaagctgcgggcatggcggacagctgtcctcggtctggaggcgccatcctggctttcaaatctgctccagaggttatctggggaggggctgctccctcacagagggagcctctaagcccaccaggcgggcactttcagcccaaagcctccgggccacctcctcatcctcagcctcgggggccggggccttctgtttgagtccatcgaagtactttccggaaacatccgccagttcctccgccacggccaggtatgtgctgggctgggcggccagctcggggctcttgaccagcagccagaagatgggccctgcaatcagcccacagggcatttagtccacactcgctcagagagaaggaaggaagccccgctccccggtcagggagctccgggtccctggagtcccacagagccctcctctagccctttccccttggctgcctccatctgcagttcccttccctggcactgcccaggcaaatcccaccagaccagggatcagaccaaaagctgcctcccccaaggagccttcctggctttgtccaggaaaatggaagctctcttcctcttggtcagccccagtcctcaccctaccccatttctcctttaataacatcttattaaatgcacctggcaccagcctcaggttaaggatttttttttggccaggcgaggtggctcaggcctgtaatcccagcactttgggaggccgaggcgggcggattacctggggtcgggagttccagaccagcctggccaacatggtgaaaccccatttctactaaaaatacaaaaattaactgggtgtggtggcgggtgcctgtaatcccagctgctcgggaggctggggcaggagaatcccttgaacctgggaggcggaggttgcagtgagctaagatcacaccattgcactccagcctgggtgacaatagcaagacttcgtctcaaaaaaaaaaaaaaaaagggctgggcgtggtgactcacgcctgtaatcccagcactttgggaggctgaggcaggtggatcacctgaggtcaggagttcaagaccagcctggccaacgtgtgaaaccctgtctcaactaaaaataaaaacttagctgggtgtggtggtgggcgcctgcaatctcagctactttgggaggctgagacaggagaatcacttgaaccgaggaggcagaggttggagtgagccaagattgtgccactgcactccagcctgggtgacgagcaaaactccgtctcaaaaaaaaaaagacatttatttatttatttattgagacctggtgtcttgctctgtcacccaggctggagtgcagtggtgtgatctcagctcactgcaacctctgcctcccgggttcaagcgattctcctgcctcagcctcctgagtagctgggactacaggtgcacaccaccacacctggctaatttttgtatttttagtagagacggggtttcaccatggtggccaggctggtctcgaactcctgacctgaggtaatccgcccaccacagcctcccaaagtgctgggattacaggcgtggctattagcctcgccaagttaagattcttgatgccaaccaatcacccactccatgtttttcaggattataaacactagtcataaagcatgaactgcctgggggtggtggctcacacctgtaatcccagcactttgggaggcagttggatcacctgaggtcaggagtttgagactagcctgaccaatatggtgaaaccccacctctagctgggtgtggtggtgtgcacctgtaatcccagctacttggagacaggagaatcgcttgaacctgggaggtggaagttgcagtgagtggagatcatgccattgtactccagcccgggcgacagagcaagacttcatctcaaaaataagtaagtaaagctccaactgtttgttccacctattctctgggcggggtcctgtgctggccctttcaaggaaggtctcgtataacccccccagtgactgtgaggtgagtcctattaaggcctgcactctgcagatgaagaaacaggctcagaggggtaacagctcttccccaggaggtgcagctggtttggggtgaagctggagttaccctgagtacagcctgactccaggcgtcagctccacggcctcttcctctgagacacggttttctcatccgccagcagggctctgcctgcttcccggggctgttagaggctggcaggccaggtcaacggaggaaagggacctgtgctctgtgcctcagaagacgtaggcgaggagcaggcatgaggcctcagggacggtctctgagggagggtcctgggccctgggctgagaaagcaggggtggagggctccacgtggagaccccaggctgggaggggactcaccgagtgtggtgctggagaaggtggagccatggatgcccgtgtgtctgcccagctctgtcctggccacgccggggtgcagggcgttgacagtcacaccagagcctggggaagaaagaaagagaagactgagggaggggtccagcctcacctgggaggctgtggcagcccacacccagctgtggggcttccgggcaccaggctgcttcctgcactcaaaccccatcgtccctcttgctctggaatcttagtgaagtggtcttatcttgcggagcggctctgccacatggctgctgggagccgagctttcctggagggcttcataaacccagaacgctgagcttaccccgggagcctgcatcggtgcgtggcggtgggacctaagatactgtaactctgaccagctcccagtggggctggcaccgctggtccacagaccgtctttcagaagcaaaggcctagcacagatttctcaatctcagcactgtggatgctgtgggttgggaggagtgaggggccatcccgtgcgctgtaggacattgagagcatctgggcctttaccctccagatgcccagagcaatctctccccaagccagctgtgatcactgtgtttccaggcattgacaactgcgggtcaaaactgcccctggttgagactcactggctggagccaaaaggctgagctgcctgcccaacagcagcagggaaggacatctgatccaggcagactagaccacctgggatgaacagacaatcctcagaagaacgatcgattagtgatgtctgcttcaggcaccagaagcgggcagcgtggtccacatgctctacttttgctgactctgttctggatccaccgtttggcctcccatcagcctaggatcatggaaaggccgctctaggctcagagtaaagcaagagggaggccgagcctagcgcccccgtaccttgcagccgccggctcagctccttggtgaagaggacgatggcgagcttgctctggcagtaggcggctttggtgttatacttcctcgtctgccagttcaagtcgtcaaagtctatgtgcccagcaacatgggccagggacgagaggttgatgatccgcgaaggggctgaggctttcagcttgtccagcagcaagtttgtcaagagaaagtgacctggattaaggatgatgaaaaggtcacttttgactcacacctaaaatcccagcactttgggaggacgacgggggaggatcgcttgaacccatggtgcagcccctgcccaggcctcacccaggtggttaacgccaaactgcatctcgaagccgtcctcggtggtccagtgggggcaccgcatcacacccgcgttgttgattagaatgtccactcgctcctcctctggaagagaggggtggaggaggagacatcccggtgaggacagaccccagcctgatgcaccagcagaaacactcctgtgctcccacaacctgtgaatgtggcctgtgccggaaacagggtctgtgccgaagtggccatgtcaggatgcggtcattagggtgagccctaatccaatgactggtgtccttataggaagggaaaacagagacagagacacatggggagaaggccatgtgtggacagaggcaaagaccggagaggcacagctccaaggtgagggtgggccgcccccgctggaagtggaagaggctgggaggattatggcccgtctcacaggtcacag

SEQ ID NO: 5732 - DNA, 18557 bp, Homo sapiens
tttcattgatcttttgtgctactttatttcaaaatctttaattctgctctgatttttattatcttttcttctactaattctgggtttggtttgctcttgcttttctagttctttaagatgcattgttaggtaatttgtttgaagtttttttttctttttcgatgtagatgcttttagttataaacttccctcttagtacttcttttgttgtatcccataggttttggcatgttgtgtttccattaacatttgtttcagaaaacttttcaatttcccccttaacctcttcattgacccactggtcattcaggagcatattaatttccatgtatttgtatagtttctaaaatttctccttttattgatttctacttttatttcattgtagtcagagaagatgcttgatattatttcaattttttgaatgttttaacacttgctttgtgacctaacatatgatctatccttgagaataattcatgtgctgaggaaaagaatgtgtattctgcagctgttggatgaaatgttctgtaaatatttatgaggtccatttggtctatagtgcacattaggtgtgatatttctttattgattctctgtctggaagatctctccagtgccaaaagtggggtgttggcgtctccagctattattggtctgtctctttagctctggtaatctttcctttatatatctgcgtgttccagtgttggatgcatatacatttgtaattgttatcctcttgctgagtcgatccccttatcattatataatgaccttctttgtctcttcttatagtttttgtcttgaaatctattttgtctgatgtaagtgtagctacttctgctcctttttagtttccattggtatggaatatctttttacatcatttttagtctgtatgtgtcttccataaatgaagtgtgtttcttctaagcgacagatcactgaatcttcattttatgtcttttgattggagagtttagtacatttacatccaatgttattactgataagtaatattcatgccattttattatttgttttctgattgttttgtggtcttctcttcgtcctttcttcttgtcttccttttagtaaaggtgattttctctggtggtatgatttaatttcttgctttttacttttgtgtctatttgttgtatgtttgtgatttgagttaccatgagattttccagcactattttataagccattattttaagcttatcactgttatcacaacctaatagtgcttgcataaacaagcaaaaagaaaactaataataactctatgccttaacttcatcccccacattttaactttttgttgtttctatttatatcttaatgtactatgcatcccttgaaaatttcttttagttattattttcaattggttgatcttttggtctatttagtataagactagtttacaaggctgggcgcggtggctcacgcctgtaatcccagcactttgggaagccgaggtgggtggatcacgaggtcaagagatcaagaccatcctgccaagagatcaagaccatcctggccaacatggtgaaaccccgtctctactaaaaatacaaaaattagctgggcgtggtggcgcatgcctgtagtcccagctacttgggaggctgaggcaggagaatcacttgaacctggaaaaaaaaaaaaaaaagagtagtttacaaatcacagttacagtgttttcatattctgtgtttttctgtgtacttactattaccaatgagttttggaccttcagatgatttcttattgctcattaatgtccttttctttcaaattgaagaactcgttagcatttcttgtagatcaggtcttgtgttgatgaaatcattcagcttttgtctgtctggggaagtctttatttcttcttcacatttgaaggatattttcacgatatgtattattctagagtaaatgttttcttttccttcagcactttacatatgtcatgccgctctctcctggcctgtaaggtttccattgaaaagtctgctgtgagacctattggagctccattttatgttatttgcttcttttctcttgctgctgttggaatctttcctttatgcttgacccttggtagtttgattattaaaagccttgaggtagttttctttgggttaaatctgcttggtgttctataaccttcttgtattaggattttgatatctttctctaggtttgggaagtttactgttattatccctttaaactttttactcctatctctttctctacctcctctttaaggccaataactcttagatttgcccctttggggctgttttctagatctcatagatgtgcttcattcttttttattattttttcttttgtcccttctgattgtgtattttcattttttatttctttatttttttatttgactattttcaaatagcctgtcttcaagctaattctttcttctgcttagtctattcttccgttaagagactctgatgcactcttcagtatatcaattacatttttcaccctgagaatttcttgattcttttaaattatttcaatccctttgttaaatgtatctgataggattctgaattccttctctgtgttatcttgaatttgagtttcctcaacacagctacttggtctctttaaatctattttctatctttatgctttcttctttcttccctggaaggatactattatgagctttcatacccttcggctagttacttctctctttcctctttcctttgggcccagggatggtgccagctacactgctgccagcctcaggctcctgcactatccctttttggttccatcacaccctatccaccataagttgttcctttgtaaataaaccctcctctaattattctaatttaagtgttccaactgttttatattgagtccttgactgatatgggaaaattggcagaatatgaatctcctagtaccatcactgaggtgtagaatactgaaagttattatggaagagttctgagatcttagcagtatagagcattgcacagtcttattcctccattatggagaagaaggggctatttggcatgtattttctgaatttgggagcatattttaatatagcaactcatgtttgctactgtttgaatgaagaaatttcactgagcattttttaatgagacactggtcaagagtgccaagcctgaaataatcataatgtattgtgccttagaagaagatgcaggccattttcaactcattttacttctctgcagcccttaaagggtaaacaagagcatgtcagggattcctgtggctccatatgaagggtcgtggagactagcagaagggcagaaaccatcagactgcagtttctccaggctaaacaatggaacatccaacctgaaaatgacgttgggatagtgtcccgatgaaatacggatttcattctagaaggagttcttttggtagcaaagataggcatgaagctgaacattgctccaagaaaaccaaacattgcttataagaaccatataatgttcacacaggtagccagtagcagatggcagagatacatttgactacttactaagtggtttcttcattctctctttgcttccttcataggagatgtatgagaatatgagactcaaagagagagaaaaaagggaaagttcatttttaaaaaaaaagataaaaagataagccctctcctttactgtaagcctctaggttcaaaaacaggtttagcttgagttaggacaggtggagaggaacatagtttaggaaaggaggctggaggcaaggagatgagtctagaatggactttgatatggaagctataaaagaagcaatcttgaatattgaaacaagagtatactattaaacaagaatgattggaaaattgtggagttggccacgaaactgttaagcaaaccgctactcaggagaaaggaagagttattagaaaaggaacacaagttcatgtttatacttcaactcttgagactcactgcaattcccttctgacaggaatttttttttgtcttatatatggtagagttaattgttctagaagcctacttcaagctaacttaagcaacaaagtgggatttattggaaagccgcttgggtgtctcacagaacccaaggaagagaattgagctggatttcacaggacctggaaaaccctcagaaactcaattgttctctctctttcttctctctccagtcagaaccttcaggaaggggagagtggctcatgggctgagtggataaaccacaaaatgggtaatatactataggtgagttttaagtgacaaatgaagtctaagctgttattgcactggtcggtgactgaaactgaaaatgggaattagaggttaagtggagggaatatgttgccaaaatgttagaaggatcttcttcaaagagaagttgaggctctagaggataatggtagggcacagagtggaggtgaagcttgtgaggggtgggggtcaatggggaggataggagagcattcctgattttgaggaggaaggatagagggttttactggtgaatgacgtgagtaagtgtcatgaccgctcgtattctcaggattcttcagtattgggagatgtgactgcagtggacagggcagtgtcagagagactagattttataatagaagcttttaaattacctacccatcaccaacttatcaggagactgacactgtccatctcctccaaaaaaaaaaactgacctgcccggcactttgatgtccaccagttgagctttatgtttatcaagaatagttgtgtaaacttccaaaactgtttatggcaggcacagtggctcacgcctgtaatcccagcactttgggagggtgatgtgggtagatgacttgaggtcaggagtttgagaccagcctggccaacgtggtgaaaccccatctctactaaaaatacaaaaaagaaattagccaggcgtggtagcgggcgcctgtaatcccagctactcaggaggctgaggcatgagaatcgcttgaacccaggaggcggaggtggcagtgagccgagatcatgccactgcactccagcctgggtaacagagcaagactgtctcaaaagaaaaaaaaactgtttatatcagttatatttgttattgtaatgatgaaatttatagacaaactaatgaaataggagtataaacataccagtattttttaaaaataagttgaatattttatgactacataaacaataatcttttaaaagtcactgtcaatttgatgactaggagtcagccatacaactataaaaggttttgagaaaactgtaaagatctaaatagaggctgcatttagtttttttccccacaagaacctttaggttctagacatttatttcaaataaatgtcaactcatctggatgtagcttatgcaagaaagacctagaagagctcttattatggacccccattcaatgaaaacacaatggccctttatttctctttcaacatgaggaggtggaagggctgttcaagcccttctgttcacgatagcccaggaggtccaggagagaggcgagccgtgggtgagcaggagtgtctggggagtgtcaactttccattgaaaaatacccctatgatcaagccatttcacttccgtggcaatcttatttatgtattcaccaaaattgggtgggagctagtgtttagctgtcatcgtccgtaggctgctgtgtttggctcatggcagggtgtgaaactggcatcagggagtgtttgccaagtgaataagggtgaggctgccctttccagagccgccgggagaaactctggatacagagaccctagcctggcgccagtcccagcgttcctcctagtcggggaggaatctgtgggtgggaggtggggagcctgaaacccaaatacaacagccactctgggctgggcgtggttccctgggagctgggtctcagatccttttaaagctgatttctccccggatctccgggcaagatgggcaagtacacggtccgcgtagccaccggggatttgctcctggcgggctctcccaacctgstgcagctatggctggtgggcgagcacggggaggcagacctagggaagcagctgccaccggtgtggggaaaggtgagcgcggactgcggtgagagctggggccctgggactcagaggtgtcactgggggccggggccattcggagggtgctgctgccccacccatgagaaacctgggaagcggggtaggggctgaggtcgggtgcacttggtgcgcctgataggaaaagcgagaggaacaggagagatgagaggcattttcctgcccgagcggaaggacagagacgcccgctggggtgggcacggcaggcccggggggaggctggcgccccgcagtaccagctgctcctcctcacctccacctctccccggctgtgctgtggaggggaaacggagccaggattctctgaaggttcaccgaccccgccgtcctccctraagaccccaaaacctgagctgtgtactgtcgcgcaggaggcagagtttgagatcgacgtccccctgcacctggggcgcctcctgatggtgaagctgcgcaaacacaacgtgctgttgagtctcgactggttctgcaagtggatctcagtgcagggcccggggacccaaggcgmggcctttttcccctgctaccgctgggtgcagggccacggaaytatctgcctgcctgagggtactggtgagctcggtggagaaggggcacagcccctggcaggctggaggaagaagcgggtggggggaggctactgtaaaagagggaaaatgagagatgagggagatggggagaagtgaagggggagggtggctgatggggagacccgagcgcggaggggtgaccagggagggcatgtgctcttgtccctctcccccagcccggaccgtgagtgatgacccccagaacctgtttaagaaatatcgggaacaggagctcgaggaaagaaggaaggtgtaccgttgagccccaggaagtctttgatcccctaccagatcccaagaaacctgccacctgcctccttacccctacctgtgtgttcttcctccaggtggggctcctggaaagatgggttaatcctgcctatagcagggaataggcaaccggaccttcctagggacgagcgattcctcgaggataaggatttagactttaatgtctccctagcaaaagggtgagtaccaggtagaggctgggcacttgcttcctagggcacaaggtgggatkcttccttgatcttcttgcactccattctttccacaggttgaaggrcttggccattaaggggacactggatttcataaattgtgtgaaaaggctggaagatttcaaaaaaatattcccacatggaaagactgtcctggctggtcagttttcacaacctcccaaaaccaatatacagacttccaacccagggatttgaaaaaggagggggatggaggattagatcagtgggattaggagttcggagctcagarctcacagggtgctccccaattgatgttcctagagcgggtttatgattcttggaagaatgatgccttctttgggtaccagtttctcaatggtgcaaaccccatgctcctgaggtgttyttcaaggctcccagcctgcctggtgctgcctccagggatggaagacttgaagacccagctggagaaagaactccaggtgctgctgggctttytgcccatccaccatcccagccattacccccacctcccttytcctcccatytccagccccttctctcatctcctccatctacacccaaggtttytcaacgttggcactattaacattctgcaccacataattctctgttggctggcggggggggggggggggggctttcctgtggatcgtagggkgtttagtagcattcctggcctctacccattgatgccagcagcatccccccggttgtgacaaccaaaaatgtgtctagatagtgctgaatgtcctggggttggggaraggaggaattgcccctgattgaraacattgatctacaacatctcctcctgtatcttcttttctttctccacattcctctcttcyttcttcattgaacatatatcagccttagggaaaagcgcaagcttctggagagaaatagcaagaaaaactaaacaaagccttggagagctaaaagctgaatctgtttttggggggagatgggtagctaaaggaaatatttttgctacattggctaaagctggcagaagaggggatacgtgaagaatgcagtggccttatgtggtggaaaaccagaaacttcgctgcagggagctccaagtctgaaggaaracatcastcatgaaaactttgcattcagttttttggttctgcagaaagtgattggtgtttaaagtaaaaaagacttgggtgggtagaggaaggatccaccctggaaaatgagagaagggcagctccagaaacaactccaaccctgttttctattcctgcccctggccctgtaggctggatctctgtttgaagtggatttctccttgctggatggagtcaagcctaatgtcatcatttttaagcagcaatgcgtggcagcccctttggtcatgctgaagcttcagcctgatggaggactcttacccatggtcatccaggtgagagggcccaggtatttttctaccagacactgatctcctttagggacttagatacacaagttctcagcccccactctctctcctgctctagctccagccaccttgacacggatgtcccccacctctgctctttctgccctcgcatccccccatggcctggctcctggccaagacctgggtccggagctctgatttccagctgcagcagttacagtcacatctgctgaggggacacttgattgctgaggttattgctgtggctacaatgagaagcttgcctagcctccatcctatctacaaggtacttcagcatctctgtcattctgtatctgactgtccttcatatttcagactcctacaaagagtctaaccttgtacatttcagtctagcagcaatcaatttatatgtggagacacatacacagatacatacacacacgcgtacacatacacagtaatatggaaacacccaggacacacacttactatgagttggggggagaagtgagaataggttttgcaaaggagttgaaattttggctgaggaggtttccaggtgggcaagtgaggggtggaacattacagccacaaagatctaaagaggcgaggaaagaagggaacatggataatggctgagattgggtgagattaaagtgtagggcatgagttgggatgaggaggaagaagaagtgggaggagatgagagaagaagccatgttacttagcggggagaagaatcaagagttattttctgaccatgtggggcttccaatgcctataaagacccatttgcacatgtcaggagggcaactggatatgtgagtctggagttcctagaagaggtgtaggttgaaaatacagattttagagtcattagaaaacaaaagtatcaaagtcattgtactggatgaagttctctagggtttgtagagaatttgaccgagatataactctagggtgaaccaacatttacagactgagagaagggagcagagtgagaaaagaaacaagaraaggaacctcattgaggtaggaggaaaatcaaaaagtgcaatccatggcagccaggaaaagaaagcgtttcaagagggacgcgtgattatctgtctcaagtgctgctgagagatcaagaaagttacagagaagtgacatttggatttctcaatatggaagtcattggttaataaatggacatgcgccatctcagggaagtggaggaagcctgattcatgggggtgagcagcaaatgtgaggtgggtaagcaaagacaacactgagtgaagatttgctgtgaaagggaaagcaagaaacagggagatggcaagacaaggatgtgggggtcaagcacaggttttctttagggtatccaatattgcacatgtttgtatgacagagagaggagaaggaatataattataggagggtgaaggcaaaaagggatgggctcatatgtgggtacctgcgaggatatgggatttttagaattcttccaaggacatgaaactgtggaaataagtgaactcctaaaactttcaccacgggatgctctgagaagacattttcccatctctatattcccaaatgttaccctgacccactccaatttaacgagaagtctctccatttcataaagacccatcctctcccttcttttctgtcacttcctttaacatcctcttccctcatggatgctgggaactctcttatttgaccatgtcccatttctttcttccataatcagctcctgatcccccacttccgctacaccatggcgatcaacacgctggcccagagtagtcttgtctccgaatggggaatttttgacctggtatggaaatggatgggtgaaggggaggatggttcaatattggaagaatcctaggggttgtttccctttcccattcctcccccaagctctccttcctccatggaaggcctctcccaaacctgcctcatgcctgaagagcttcctgcttaaaagggctagagtaggatcataggcctggagtttcctgatactcatctccctccctctgcaacttggcatggctgtgggttatcctcaggtggtgagcactggtagtggaagccacgtggacattcttcagagagccatggcttgtttgacctatcattccctctgtcctcctgatgacctggctgaccgtgggctcctggatgtgaaatcttctttttatggctaagatgccatcaggctgtggggaatcatcagccggtaggtgaaggtggcacagagaggcaatgaacggaggggcgggggactgtaggtccagaaggtcctgcattggcccctgagactgagtgtcttcttcccagggaataggtacrtggaggggatggttgggcttttctacaatagtgaccaagccatgaaggatgatctagagctgcagrcctggtgcagagagatgactgagactggactgcagagrgcccaagaccaggggtgagacatggatccytccccactgaaccctgtcaacaccyactccyctgcaaacaatctgcttcttctcacatcatcatgagacaccccacctgcccaaggaagctgagaattctccagagtgtgtccagaaatgctaacaagcactcctgatctccccagccctgttcctacacagtgttctctctcctctgcactaagagcttcctctggaactagatacaaaacttctcttaggtattttccctcactcttccctcccctctccccatagctcaaggttcatcccamgtgcattaacctttgagcacacacaaggtgggagtcctagggtgtgcaggccagaaccacagaaaagttcttttctgtatctccacatagctttccctgcstgagacctatttcgtgttctggtttcgagatctctgattctcatttcaccaggattctcatttcaccaggttcctcatctccttagagtcccgggctcagctctgccactttgtcaccatgtgcatcttcacatgcacaggtcagcatgcttctaaccacctgggccaggtaaccyatgtgatcatcccacaasggctcctgggatggagaagtgggggatcaaatgcccaggtcatcagcctgcatttctctgggctctcctccctgcagctggactggtacycctggatccctaatggcccatgcaccatgcagaagcccccrcccrtctctaaggatgtgacagagaaggatmtagtggacttactgcccaatctccaccaggcacgtatgcaaaagaccttcacaaagttccttggcagacgccagcctgtcatggtgagaagcaaatgcctgggtcctgggaaggaggcagctcaaaggaggggaagtattcygggctgagagtcccaaggggctgagccaacttgtcttctgcctctcagcatgaggagaaatatttctctggtcctgagccccaagctgtgctgagacaattccaggaggaactggcttccatggacaaggagattgaggtccggaatgcagtcctggacctgccctgtgagtacctttgacccagcatggtagagaacagcgtgaccatctgagaggccttgcccgcctcagctccaaagctccaccatccctgagtgcctttgagtattccgtcctcctcacatcctctggtgaacaaattgtccccaaagctttgtggtcagggtatccagagctgctcaccacacaactatggggaatacacagtgatggtccccattgcatttggaagtggcatcccccaaagctgccctaccttaaatgtccatccagtcctgcacttcctcaccccgatccctgcacacctcctcattgccaaaggacctggcttagatacaagtaaaaatatatgattaaataacaaaacggattatatgtgtggtggtggaaggtgggaggagagaccttgctttgtttcctgcccctttattcagattccaaagaaggaaagaaaagttttcctggaatgaaaattttttctagcaatcaatgctttttccaagggtatcttggaacctctctaagttaaatgacaagtgttctggatgactgagtccactggggctaagaaacctggctcttgacaagggtttttggcttgaggcctctctgaatcctcaataagccatcccttaggctacctgcagcaacgcctctggtgcaactcccagcacagccctcctgcatgatccctccccagctgcatcccagccttcctctcagtcctgtcccaggactcttgataaaccctcttctcatcatgctctatccttgcatccttaaaacataccatctagcccacagtcctagatactggagataaatggataaagaaggaactagtaggccagactctatgttagaaattttaaatatataatctcaatttatcacaccgggcacagtggctcatgcccgtaatcccagcactttgggaggcccaggggggcagatcatctgaggttgggagttcgagaccagcctgaccgacttggtgaaaccccttctctactaaaaatacaaaactagccaggtgtggtggcaggtgcctgtaatcccagctacttgggaggctgaggcaggagaatcacttgaacccaggaggcagaggttgcagtgagccgagattgcaccattgcactccagcctatacagcaaagagtgaaactcggtctcaaaaaaaaaaaaatttatcctcacaacttctctgtgaggttggtatcactatcaccatcttataacaggaaaatgaaggttggagagataagggcagaaatgacctgggaccaaaatgcagcagagtcagattccatttgctagaaggaagcaaagcccaggattgtggtcatagcaataacagttaaaagactgatcataaaatctagaggccaatgaaagcctcggatggatctgatgtaatgggaaaaaaaggagagataaagattctttgagtcttttaaagaatcttatgcattcaaattacttatgtcccatatatttttaaaaggaacatatacaatacggttaatacggtagaaatagacatgtgtgagccatccagattcacctactgatgccctcaaccttctaatgtcccgtcctgttctgtgtattgcttccgtccatcatatgacttttttcagtagatgacgaaagaattttaagatagccacagaccatagactcacagaatctgacttggttgctagaagtttttgtggttgcatggaatggtagcaaggagagtcagaagagagggaggggatgaggaagaggcagaggtcacgctgaggttttcagttgcggcacaactggcgagaaatacaaagattcagaaggaaggttgtttaagtttgatgtaatactgtggttcttatgggaagaaattaaacaggtaattggagaggctgaactgaaaaaagaaaggaggtgagttctggctgggcgcggtggctcacgcctgtaatcccagcactttggaaggccaaggtgggcggatcacgaggtcaggagatggagaccatcctggctaacatggtgaaaccccgtctctacttaaaaaaaatacaaaaaattagccgggcgtggtggcgggaggctgaggcatgagaatggcgtgaaccgggaggcggagcttgcagtgagccgagatcgagccactgcactccagcctgggcgacagagagaaactccgtctcaagagaaaaaaaaaaaaatggaggtgagttctacagtttggatgacttaggagctgaatttatgaacaagggaaaaagaagaggcagagggccaaggtgtccttggccctaacaagaattagggatataaaaaagaacatgaggccaggaacggtggctcatgcctgtaatcccagcactttgggaggccgacttaggtggatcacctgaggtcaggagttcaagaccagcctgaccaacaaggtgaaaccccatctctactaaaagtacaaaaattagctgggcgtggtggcacgtgcctgtagtcccagctactcgggaggctgagacaggagaattgcttgaacccaggagttggaggttgcagtgagccgagatcgcaccactgcactccagcctgggcgatggagcgaaacttgtctcaaaaaaagaaaaaagaaaatgaagccaggaagtgagaatgatcctagtttgaaaggtaagaagaaaagctggatgatgcaggtcacggaagccctgtcatcacttcctatgactgggttgtctccctgagctctctcattttcttttttcttttttctttttttctgaaatggagtttcactcttgttgcccaggctggagtgcagcggcacgatcttggcttaccgcaacctccgcctcccaggttcaagcaattctcctgccttagcctcccaaatagctgagattacaggcatgtgccaccaagcctggctaatttttgtatttttagtagggatgaggtttcatcatattggtcaggctggtctcaaactcctgacctcaggtgacccacccgcctcggcctcccacagtgctgggattacatacaggtgtgagccaccacacccagcggctctcccattttctagatgtgtcacctcactcccattttcctccccaatctactccccatcctcgtgtgtttcctcagcaagtgtccccatctctgcacagcacagtcatatcctcagtccagctttcaaattctcccacctcatctctcaggagggtctgatataacgactcttttactcagataatctgttcaggcacctgtgcctatgagaggcttactgtgatctctgaatctatgtttgtggtaatcctacgtggactgctcacctctagatgtcttatgaaatcacctccccttatttctacaacaggctcaaattgccttcgggaatcattaaagctcagtgttctggctttgattggtccttcgctccctagtccgcctgcactcatgtagggtcatgctattacaaaactccacagggtaccatttatgttgtattccatgtggaaggtgtcctctggagtttggcaatatagcagctgtctgtaaaaatgatattgaaagcatcctgagttctggagctgcgccgattctattaggctgagaaccccagtttcaagttcatctcttcatttttctctcattccatttcacagcggcttaacagcaggtcctttgtattcgtttctggcccatagagggatctttattcaaaatcacagggttgtctctaaatttctgctaagctaatgaatggtgttagtatgttctcttctccagggcagaggcagagttttttttttttttaattagccaaaagcaacattacacaataaatcacatatcattgtagaagagaagagttaactattataactaaaagataaaatgccatggcattcaggcaacggtggattagaagtacttcgaacctatcagttctgtaaagcctagcttaagtctgttggtctaactttctaactagacttaccttcctttagaaaatatttgatgtgcagagagctagactgaggatctagcagtcacagatcaccttaattcaatcaggaactaagattatttgatgctgggttttaacccctttaaggcctgaatttccaccccacctttactgctagggtgcagctctttgaggtcccaacccaaagtgggtgagaaagagacagagagagagatacagggatggtcgagaatccttcaaagacaacatcagccacagattaaagagaaatcttcaatgtggagaaaaatctcattactttcacatgggcatcaataatacaggtagcattttctcaaatgaaacattagctgccagagacaatgaataatcttggaagtgttgaaagaaaatacctgccagactagaataaagactttctacaaatcagtaagaagaaataggcagttcaataaaaaatggacaaaaggcctggcacagtggctcatgcctgtaatcccagcactttgggaggccgaggcaggcagatcatgaggtcaggagatcgagatcatcctggccaacatggtaaaaccccgtccctaccaaaaaaaaaataataataattagctgggcatggtgatgtgtgcctataatcccagctgctcgggaggctgaggcaggaaaatcgcttgaacccaggaagcagaggttgcagtgagccgagatcgcgccactgcactccggcctggtgacagagcgagactccatctcaaaaaagaaaaaaatatactcaagacttaaacatacatttctcatggggacatccaaatgtcagtaaatatacggaaaggattatatttgatgattctatttgtcagtttaatatcacatcaacttttatggtatctggaggaattgatcccattctgggtaagtctgatgcccgtatggctcaattcgttgcttgtatctctggctttggttactgctccagagaattgcctgattccatactgcatgaagttttaagatatttgaatactagagaaatttccaaacctagcaaaagggtcctgtattatacaaatcttacagaaatctccaaggcctctcatcacatctccaggagatctacatctgtgtctcttatatgtggccaaagaggctatccttgactaactctgggtcactgggatgcctattttccccataccaccttattatttggatactttaccagaacgggtaggaagtctgctggtcagatatagatcatagttatcacagtcaacagcagtctatgtggattcttggtggcatttgacacagccactttcactttgcttaaatacttttatctcttactttctatgacatcatagtctcctggttgtccactttccttaatggttctctgccatgcaggtacccattccagggagtccctggttcccaaagtcatcctgattttcactcacaagctacccttaatatttaaacaaataggctggaaactctgtctctaggcttttgggaagggcccataggagaatgactgggtttctcattaattgattagaaggtacattgttaaggtaacagctgctgtaacaaatcagcccaaataaataatggttcaaagacaatagttgttcttttgtttcactcctgataaatttaaaacaatggttcctaattggtgcgtagtcctccttcactaagttagggactcaggctcccttcatcttgtggctctgcatatttaacatgtggtcaccatacttaagaacatttaggtagcaaaataagagagaacataaaagatgacatgtgtgatatttttatgggacacacacatagcaatcagaatccctggcaggaaacagttggcataatcaaagtcagtgtttgtttgtaaatctcttttattttctctaccataaaaattgctattgttattttatattgatatggattattgttatatttttattgtgaattattccctctagccttcaaaaggctgggcgtggtggctcatgcctgtgatcccagcactatgggaggccgaggcgggcagatcacgaggttaagagatcgagaccatcctggccaacacggtgaaaccccgtctctactaaaaatacaaaaattagcttggcatggtggcacgtgcctgtagtcccagttactcgggaggctgaggcaggagaattgcttcaaacccgagaggcggaggttgcagtgagctgagatcacgccactatactccagcctgggcgacagagcgagattccatctcaaaaaaaaaaaaaaaaaaaaacacgtagccttgctttctgctctgaattctataatgtctaattttttttt

SEQ ID NO: 5733 - DNA, 12795 bp, Homo sapiens
atcaaaaattcacagtgaactacttaatggagtgaaaaatgtaagttttcttttagtgtataaaaatcttattttaaggccagcacagtggctcacgcctgtaatcccagcactttgggatgccaaggcgggcggattacctgagctcagaagttcgagaccagcctggccaacaaggtgaaaccccgtctctactaaaaatacaaaaattagcagggcatggtggcatgcacctgtaatcccagctacccaggaggctgaggcaggagaatcgctggaacccaggaggcagaggctgcaacgagccaagatcccgccactgcattacagcctgggcgacagagcaagactccatgtcaaaaaaaaaaaaaaaaaaatcttattttaaaaacatgttttcaaagaagaaaaaactactcaacaaaacctagatattgtaatatcctatatattaaggctctaatttaagaaaatgcaatatatggaaagatagcagatactttaaatgaaaaaaaatttgcataaataatggatatagtatgcaactatttctgtatcaacttaacaacaacaaaaaactgcaactatatatctgcacagtagtagggtcagagaaaggaagtctacataaatgccaaaataccaacagtgatcacaactgaggtacggaattagaaaattggagtccttttcaatttatatgcaacagtgttgctcaaattgatattgactacatatcactcttttttaaaaaaggtggaaaatatgtaaaaatttgaacttatgtaacagataaatcaaaagagtaaaaattcctattacaaaaggagccattattttgccaagtgatttgctacagacttttatttcctcttaattttctgaggggagaaaattctaatctaatctaaccactaaattatatgagagactcatctatctcacttaaatgtactatgaatatattataattaagactttaacaaaatagggttagtttaagaaacaccttagctcaatggataaaaatacttgaatactgataaacaaattaaaggaatttagcagaattaaaggaagggaagaagatggaaataacgggcaatgctctgaagccttaattaccctctacctcactgctcatgaagaggaaagtttctgttcacctaagatctgtagaaagcattctgactctcaatggtttcctgctatcctaagtcttcttggaggattaaaaatgggtacaaaaatctttcttgatctccttaaaaaaaaaaattcatattaaatacctagatcttcaatactgttgaatgttacactgagtctggtctttatttcctagtaaggagttccagaaaggtattccagacttaaggatgtgtttgcagacaataatttgtaaactgcatagaaagcaacaaggggcactggggagagggatatctgttggggaaattataatagtctcggctaaaaagtaacaaagacctcaattagcagagtcaacatgaaaaacagaaagaaacatttgcataggattataagaggaccaggacgtcagaaaaccaggagaacaatattacacacaaaaaaggcaaactgctttaaaaaggagagtgttattataagggaaagtgccatagagagtgttattataagggaaagtaccatagagactgaacaggatcaaagattaggaggagataatgatctgactgtggagactctaacctaggacaaacagccttcttcaaaagaacttttcctctttaggatgaaagggaagtgaaacacagtgagtactcacttcagagagcactagaatggccagaacactcagaatatattcgatccattcttgttttattctgaatataggacaagaaagccaggagcaaatcctacatttcaattattccttaaggtcctcaagaataactccaggattttcttggcctagcatcaatattccctttagaggaaaacaccaatgatgttctttaaactctatttgtctatgcttgttttgtgtttgtattggtagaagctttttttttttttttgaaacggggccttgctctgtcatccagcctggagtacagtggtgtgatctcagctcactgcagccccaacatcctgggctcaaatgatcctcccacctcagcctcccaaatagctgggactacaggcatgcaccaccatgcccagctaatttttgtattttttgtagagacagggattcaccatgttgcccaggctggtctcgaactcctggcctcaagtgattctccaacgtctgcctcccaaagtgctgggattatgggtgtgagacaccatgattggacaagaagcatttattttaatgtttaaaattataaactggccaggcgcagtggccaacacctgtaattccagcactttggaaggccaacacaggtggatcacttgaggtcaggagttcgagatcagcctggccaccatggtgaaaccccgtctccactaaaaaatacaaaaattagcctggcatggtggcgcacacctgtaatttcagctacttgggagactgaggcaggagaatagcttgaacccaggaggtggaagttgtagtgagccgggattgcgccactgcactccagcctgggtgacagagcaagacactgtctcaaatagtaaaataaaggcttataaaaagtaaaatataggcttttgaaaacttcttaacatatatatttaaaatgcctttaaacaaaataaacagaaaaaagtactaatgccagtttcctcaacaataaaatgaaaataatacgtaacttactgagcagttatagggattaaattagatcattttatatagaaagcgcctacaatagtccttggaacacaatacaggctccactgtgtttgtaaggtgaccttttctaagctccttaagactgaagtcatgtaattagtaaactagacagaattcagatgaaagagtcattttatgtttgcttgtttacttatcaatcattaaaagtatatgtcctagccaggcatggtggtgcaagactgtagttccagctacttgggagactgaggcaggaggactgcttgaacccaggagtttgaggctgcagtgagttgtgatcacaccactgcactccagcctggacgacagagagaccctgtctctataaataaataagtaaaattttaaaaaataaaaataaatagtatatgccctgtttaagcaacagaatggggtattaaaatattaggagaattggtttctgcttttaaaaatacactagtctcaatcactgaattgattatataacatcatgcttgacttgaaccaaaactaggtggaatttgaaatatgttaaatatgcattagaaggaaatcgtaaataacataaaatacataagttgttaaaaaaaaaaaaaggaaatcattaccaaaattcatcaaccattaaatccttaccttgttttgacaagaaatggctgcagatcctgaaggatattccctgtttttcgcctaacttctaaatacaggtttggtcgatcaaaaccagtacaggtgatctgaggatttctcagatttaagcaacgtacaatgtcttcccggattgaagaacttgcagtagcagtaagtgcaacgattggaacctgaatgatgtaaaactgatattttaaaaaggaaagagctcattcattcccaacatgtctatagctttcttacaaagagactggtaggacaacagtttgtggtacaatgttaaagacacaactgtaaaatttttttgcaaagaaaaaatctccctactaacttgtttctcagccttctggatacaatatttactttttaaaaatcagaaatcatttaaataaaacattaaatccatgaggtttccaaatgccatttactttgtcttattaaattaagcctacttgttagctatctacttctccatttattattttttaacattacatttgaaatggtgctgatataagcaggggggtatattatgccttatatttgattaatgtataattacaaatgataaactctcaattcactgaaaatctaactatataaagcaatggtcgtttttttttggcctcctattttaaatatataggtttatggcttcacaaatctagaagcaaagctccaatgacccagataacctctcttcagtggtactgagataatcaataacatactatatataggaaatatgtataaatgaaacgtattattaattgattgctagcaaaggcttcttgactggattggcagacagagcaggagactcagcagttatcaggaaaagcatgaatatgtcatcttccagaaattctaaggtacagtaacaacatgcctcccctaaaactagaactcgtgtttttattctattataggaaattacacttaactatggtattatttcataatcagaaaaagtggactgtcttacagttgtttctaaattatcagctgttctatcaccaagaatataactttcttaaaaatattctttttggctcgtgacagatacaagaaacaatattctcataaaatagctcttcagatgcactgcatctattatacaaaccaaccatagcaattatcttgtatataagtggaaatgtatgtgcaatttaccaatttgcaaagaagcacttctagaatatgactcaaaattaaaacaagatcaatttattaaaaattataaactactttttcaatcactataactttactgaattaaaaattatctccaaacttatatttaaaaaaatcaattaagtttaagagtaggttttttcaaattaaaaaaattaaatcaaaactaatgtgatgagataattggcatcatttttgcattctttatccttaaattttgtgacactattttaaaaggcaaccccaaaattaatttcattgatttgtggcttacaatcagattgttctctgaatttacagtgcctgcctagcaacttaaagatgaacaagctaatctataaagaggttggtttctctaattaacccctaacatgggtgcatctgtgttaacacacaggttttaacaaatataaggctgagaataagggaggtttaaaaattagaggttcttagaacatgcacattctcactctcacagtaaagcactttcaccggttaagtgttttggttaaataatttatataaatgcactaataaaacacttgtttaaccacatattaaaaacagtgattttcaggatacagtccataagaaaacagggttgggtttgtttctaagcaatataatgtataagtgagcaggtaatatatttatgaaaatgaggaagtaagcatgaaacatgacatatatttaagaagttaacagaaaaaccaggcaaaagaatggcagcacagtgaaaaaagtctgttttggaatcagattgcttgagctgaaatcctgtttttgccacttactagatgtgagattttgagctctttatttaactctctaagcttcagtttcctcatctataaaatggctacaataacagtgccaatctcataaagttgtgaatatcaagtgagataaaacatgtaaagtgctgaacataatgcatgaaataaaatatagtaagcactcaaaaagtttcaactatcataaatattgttattaaaataaataaaaagaattctatataacaacttcagagacatgagtactactcccagatttgcaactgacatttgcaagggctcagttttttcagcaaaaaaaatgagatggagacggctatatgatgtgttagacccttccaacttaaaaattcccatcttgctaccagaaattccctattccagcaatctggtaacagtgaaaatcactataaatttactcttttgcctcaacattctagaaagatatagctaagaatgttgcttctacaattagaaaataaagtatcagactatattaaaaattaatagtacttcgttactactaaacragctagtacttcgttttcattggatacattttcagcatcatgagttgtcacagcctctgagcccctgatcttaagccacaagggctgagtgtattgtaaacttattcttgcatgttgctgtctgggaatagaccacactacagctggtagttctgggggcggtactgccgaaaggcctgaacacatgtattttggctgcaattraggaacttgggatgctgactattaattttgtatttcagcaactgccccttctcctatcccaaagaaccaattactgccctctgcctcagcagtaccagtataagatgacattccaaagactggaggcaactcagcctgagttaattcacaaaattgtgccatgctggggcttgaacttgagcttgggcttaggcttgggctcagcttttgaccctcaggcatctcctttcccttcctgccttcctctcccttctcctctgctgcagcatgattttcttaatcttcagacactcactattttcatgaacarttaccctccggccccacaaccaaagacaactcatggcctcctttggcccttgtgtaacaytgcaaacctgtggctttgcaaaatgyacccaggtcacaaggggatttttttttttagcaatgatatccctttctgggtcactttttaagcttataaccagacttataatcttaaatgtatttttcctttgattaagctgctgcttcctctgtttcactggattgtgctagttatcagtggttcttgggttcaaagtaataagaattccaaaactggaaaaaaaaataaataaataaaaattaatgataaacttccacttcagcaatgaatagaaccttttctcttataagtatgtggtattttatgacatttaaaatatataaactagagtgaagcttaaaaacaacacacaggcaggctgagaaaggtgacaatacatcctcatttgccaggacattcccagtttatgcctgcagtcacagcataattattaatagcttgaactctttaattttcagaagcaaactgctttgggtaataaattatactgtcatttagttcttaactcacaaaatgtattctttaagttgacaggtcttaatttcttttttaacaggcagcaagttttgctaaatcaaacaaccaaatataaattaatcttagacatatacttcaatggtgtggtgcccacagactgagaaaagtataagtatcccacctgcttctaaattcaggtcatgttgctaattctaactttgtactccataacatcacacatacttcattcattcatgcactcattctaaatagttactgagtacctactatgtgctgatctttgtaatagatactggggagaaagtaatagaaaaaccccacatgtcttatggatttcacaattcctcttacttgaaatgtaaagaactttaagactgatgcaaagctttctgcctggctgttctttctcaacactcactttgtctgattccttccaaataggaatctttgtgccaaacagcttagtgatttctgctgtttttgaaattactgaaataatatagtgtgaaacattccaggtttatagcagttgtcctagtataactggaatcagaaggagaagaaaagcaccaagaacagtgagaaaaatgatactactataaccaccaggtggcatgtctcaccacttagctaataaagagggttcttgaaaacaccaggggaaaaacgttttctcagccactgctcggccaacaccctccccgcactggaggcccaacagaaggaatgtgctttattaatcctcccaagaaatgaaaatgatccaatgacgtccatggccagacataataaaagatttaattcaagcttaacaatgtttaagaactgtataaaatatttaaaactcctttaacacaatccttctagaatcaaaggcctaggaaaggattacagaaagtaatcttcctagtttccaaaagcttactttaaaccattctaaatggaatggaaatcggtcctccaggtgcactgtgcctagtgactttcaccacagaaatcccttctaaacatgtactactaacactgttcatctttttatattatttgtaccacttcataataccatatttcatttggtgctattacttctactgttataggtatgaatctaaactcctttactgaactatgagctacctgagggcagaaattatgttttatgcctctttcaaatcatttgctttagaaactagcaggatgttgtatggtgcagctatttatggcccaactctatactgcccactacctgttttggaaagtcactttactgattctcagctttctcatcatcattcattcattcattcaccccattataaattgagcacctcctataagccaggtattgttccagattttataaaccaaacaatcaaaaactcctccctacaaagaatattctagtgaagaagaactcacagaaaattaacaaaatataacacagtaagttagacagtgatagtgctatttttaaaacagcaaagatttacgaggaatgctgaatgatgggggagggggaactaatctgatatttcaaatatggtggcccaggaggcctaaatccaagagatctgagagaagtatgggagaacatcctatagacaatgtgggggaaacgtattcagggagaggaagcagcaggcgcaaagcccaggcactgaagcatgcctggaatgtccgaagaaaaacaaggagggtggtgtggctgcatccggtgaatgaggagaccagtagagaatgagatcagagggaaaatggaaggccagattacatgaggatcggtaactcatcataaggacttttgcctttatttagaatgaaatggcatgctactagatggttctgagccgaagacatgatctatcagacttcatttttaaagtatcactctggacgctgtgttgaaacagaatgagggatgggaagagtgaaagcaggaggccctaaggagatggtggcccgtacctggggaatggcagggatcaagagagaagtgatttaattctgcatatattctgaagacctcacgagatttccttactgtttaaataaacagtggagtgtaagaaaaagagaaaagattgaggaaaattccaaaattttggccaatggagctgctgttaaacaagatggaggagagtgaggaaagagcagatctggagtgctatgcagaagtcaattaggaagaggttaagtttgagatacctgttggtcatctcaccagaggcatgttgagtagttatatagatgtgtgcctgtgtatacacacatatatatgtacatatattctattaaatggctaaaatgaactaatagtgacaacaccaaatgctggcaaagaggcaaaaacaactgaatcactcatatactgctgatatcagtctatgatggagataaaaatttgggagtcctcagtatagacttgatatttaaaactgtaggctggacgtggtggctcacatctgtaatctcagcactttggcaagccaaggcaggtggatcacctgaggtcaggagttcgagaccagcctggccaatatggtgaaaccccatctctactaaaaatacaaaattagctaggcatggtggcacgtacctataatcctaactactggggaggctgagcagaagaatcgcttgaacccgggaggcagaggttgcagtgaggtgagttcacgccattgcactccagcctgggcaacaagagtgaaactccatctcaaaaataaaaaaataaaataacataaaactgtatgttgggtgaaatgaccaagaaaatgagtgcaaaggtaggtccaaagactaaagtttctggaaggccaacattaaaaggtcagggagatgagaaggaacaggaggctgagaataaagagacagtaaggaaagaagaaatccatgagtgtgtgctgtcctatgtgactactaaagaattatttcaagaaaaagtatgaagattttaatagctaccttgttgaaccatgatactaaaatctgacccaaggccagccacatcattggagctcaattcacatggtttgattttccctcaatataaacttgctaactagtatatttaatttatttttggtttgttctgttttaatatctgctccaaccaaactctgtgagataagctaacaaaagatactatttttgagatgcctctcaatttgctatctataagcaagattaatgagcaatgaaattgaactagacaacctaccaaaagaataacaaacaatttctaacacagtttactcacaaaattgtgaaatcctgggctcagaaggcaccattgcctcgctactaccaagaaaacttaaacataagccaactttattcgttcaaaattaatataacaggctagagaacccagaaatagacccacacaaatacacccacatgactttcaacaaaggggcaaacgcaatttaacaggggaaggacagcctattcaacaaaggatctgctgcaatttaatctattgggaaaacaatgaaccttgacttaaacctcacaccttatacaaaatttaactcaaaatggatcacagacttaaaacataaaactgtaacaattttaggaaagaaccacaggagaaaatcttcaggatctagggctaggtgaagagcacaatccataaaagaaaaaatgataaactggatttcactaaaatgttaaatatttactctgtgaaagacacggtaaaaagaatgaaaaggcaagctacaaagtgaaagaaatatttgaaaccacgtatctgaccaaggactcatatctacaatgtattttttaaactcttaaaactcaacagaaaaaaacaagcactccaattatgtaagaaatttcaccagaggcaaattagtatatgaaaagacgttcaccatcattagccatgagagaaatgcaaattaaaagtgagataccactcgacacctatcgaaatggctaaaataaaaaacagttgcaacaacaaacggtggcaaggataactagatcattcacacactgctgacaggaatgtagaatgctacagccactttggaaaacaggtttgtgacaattccttaaaaactaaaaatacactcctggacatttatcccagagaaatgaaaacttttatattttcaggttgtttaaccattcacccattaaagaatctctgaaggccgggcgcagtggctcacgcctgtaatcccagcactttgggaggccgaggcaggtggatcacgaggtcaggagatcgagaccatcctggctaacacggtgaaacgctgcctctactaaaaatacaaaaaattagccgggcacagtggcgggcgcctgtagtctcagctactcgggaggctgaggcaggagaatggcgtgaacccaggaggcggagcttgcagcgagccgagatcgcgccactgcattccagccagggtgacagaaccagactgtctcaaaaaaagaaaaataaataaaaaaaaataaagaacctttgagatatgaacaaatgttcatagcatctttattcataatagtcaaaaactggaaaacaacccaaaagttcttcaacaggtgatcagttaaactgtggtacaaccatactgtggaatactctgtaataataaaaaggaacagaccaccaaaaaaaatagtcatgtggtacttaacggcatttctgtcaatgacagagcacatgtggaacagtggtcccataagattataatggagctgaaaaattcctatcaccaagtgatgtcatagccagcataatgtcttagcacaaggcactgctcacgtttgtggtgatgctgctgtcaataaacctactgcactaccaggcattaaaaagtatagcacatacaattatatacagtatataacttgatgaataataaacaagtatgttactggtttacgtatttacctatacccttttccattattttagagtatactcctcctacgtattcattttttaaagttaactgaaaaacagcctcaggcaggtccttcaggaggtatctaggagaaggcattgttatcacagatgacagctccatgagtgttactgcccctaaagaacttccagtgggataagacgtggaggtggaagacagcaacattgatgatcctgaccctgtgtaggtctagtctgatatgtgtgtattttagtttttaacaaaaaagttttaaaaataaaaataataaaattttaaaataaagccttatggaatgcattaatcaaggaagaaaaaatttttgtacagctgtacaatgtgttcatgttttaatctaagaattattacaagagtccaaagtcaaaaaatgttttaggtttatgaattaaagttacagtaaactgagattaatttattattgaagaaagaaaatttttaaagaaaattttaaaaatttagtgtcgcctaagtgtacaatatgtataaagtctacagtagtgtacagtaatgtcctaggcctttacattcactcgccactccctcactcactcagagcaacttccagtcctacaagctccattcacaggaagcaccctatacaggtataccatcttttatcttttatactgtatttttactgtgccttttctacattagataagtttagatacacaaatacttaccattgtattacaattgcctgcaatattcattacagtaacatctgtacaggtttacagcctaggagcaataggctctatcatatagc

SEQ ID NO: 5734 - DNA, 14341 bp, Homo sapiens
tcaagtgaaataatggttgtgaaacttcccctaagaaggcttgagagcttaatgctctcctcttgcaagtgaaagatacctcagtatttgttaatatatttttacaaaattccaatgtcttattagaggataagtgatgcattgcatatagaaatttatgaaatatttattttctacatcttataatctgtccagactgttttgatgtaaaagcttgcaacattaatatattttcttcaatattaaacttcctacattaataatggtgcttttttattatggggaatttctaaacttctaaaaacataaaaacatataggtaataagtattttttctaacaccactagaaccattagcttatcatattttggtttaaacataaatgtggctctcataggttaagaaattccttttgatagcataatatgagccatagtatcttggtcctttaacaacactacgtaacattcctatcttagatccttgatgatggacagtctcccaaacacagtcagtgtcagaatcgggccgttcaggaatggagtgtgcagcaggtttctcactggttaatgagcctaaatctggagcagtatgtatctgaattcagtgcccaaaacatcactggagaacagctcctgcagttggatggaaataaacttaaggtaaagaattatatgtctgtcttaggttaccaggtataatttgtattactcatatcacctaaaatgttttcattaggtaagagcattctgcatatctgagaggtaattctcatcaatattcagcagaaaggatgttgaattctttctgagtagtaaatgaagtctcagaaagtccatcaggggttccaaatcaaatggtaggctgctgattaggagagtgagggacccactccattgcttccacctggcaacacatggtccatatattaactctccttacatctgatgtagtatgagttttaataatggccactgtggactttttcatcacattagaattaagacccagatccacgagtcttcttttccttgttcatttctccttcacctccactcttccttacacaccactcccaaactgggatgatgttctccccagaagttttttccccaaatatgtacacacatcttccctcccctccatggcactttcatttccacttgtccagtccatctctcttagagaccaaggtggcatccatccctttgggaaagggaaaaaggtgcttacagccaactccatgtacccccaagccccacccccgcctcagccccctgctgggctgacgggcagacgagtatctcttgacaatcttgaaaaggttagagatcaatcaatagcttgtgaatatgaaggcctcattgacaaggctgtccctgttggggagatagatagatgcatcctgctgttgattctgaaggtcacgaaacatttaaagtacataagcaactccccttattctgaattctaagttcatcgagcaacctcctcattataatcaacttcctttataggtctgcctacagggaaagaatggctagtcatgctgacacgagcattctggccccaaagacatttttggttctcattgtaatgaaaacattggcagaaaggaagccatttcaattcttcttgcccttcttggagccctctgtgacagcaggtgctcactcctatgctttgaaaatattgatgagtttagcaatacctttacccgtaaatgcctacagcccaaaggttggagaagtagaattgtgccctttttccattcattcacccattaattactcatttggaaagcatttaattaatgagctttagggtatactttgcaagggacttcaaagaacaaaagaaaaaataaagggtagcccccagtgtgttggtttttagcaaatgtaactagttcttcctctgttcttacctcttcaatgtttgaattagtttacgaacttggatatatggtatgttaacaccatcagagggctcattggttttcaaattcagtttgtgtgtgtgtttctttcttaggctcttggaatgacagcatcccaggaccgagcagtggtcaaaaagaaactcaaggaaatgaagatgtctctagagaaggctcggaaggcccaagagaaaatggaaaaacaaagagaaaagctaaggagaaaggagcaagagcaaatgcagaggaagtccaaaaagacagaaaagatgacgtcaactacagccgagggtgctggtgagcagtaacacataccctcttacagatgatggagatgctccaagagaagtccccacctcttcctgccctgctctcctccagaggatgaaaaagaaactaaatgataagggtaatgcggctctaggccggctgaggaactgtgtgttgaataactgcattttctgcaatagaatgcactcttaattttaactactaaaataatcccaagccacctttggttcattaacaaaccagagatttcatttaagtagctgtgttttgctcttctctaacttaccaacatcttgtgttgtgttgggtgtgttttgtcacttggagaactagtgtgaccccacccaagagcatgacacaccctggtgttgttaatggagcgccgtgaattttcagtgtgggatcctgaaatggcaattgcacatgtctgcatggcagagagcaccctgccatgagatctgagaccagtacttaacttctaggactgcaacacctactccaatgtgtgggaaagatttgctcttaattctcagtctggacagtgagaccaccccgctgtggaaacatgggtgctctgctctgtagttacctactaagggaaaaggcaagcaagtcattctgcttgctaggcatcaaaaagaaagaaaataaattatagctatttgttaaccactgaaaaaagcaaaagccttaagaatgtggatgtgggtattaccttggggttctgagggtaatatttatcctctagatacggctgaacaagaaagaaaaaaatcagacattaatgcagccatgggatattgggatctgttgaccttgctactgctgtgtgttcagcatttcagcaacactggcaaacacaacacagttcctcttccccctacctaacccaagaaattgaacaggaaattgatttttaaggaaaccaccattttcaggtttcctctcctggggaacattctggctggtcttcagcctgcctatgtcacaatcaggaactcatcacatattttctactcaagatttcccaggtgggctcagttagtattttaacaaatgtacttttaagaaaaatagaaataccagttagaggaaactgtcagttaacattttagagagattttgaatggtttttccgaaccattcctttccatacttcaaagattctcaattttacagaaaaagtttgtttaaggcagtgcataggtatactttagtagtggaggaacttatactaattttaagccagcattaaggatttccatgtttcaccaaactaagtcaagtgcaggagactggggcagaagaaggagaaaataaactcgttttgagaaatttcatgtgatgagggttttttgttttttatgctcatgtatctggttctctttgctgcgttgactctaaaaatgaggttatccactttccaaaggacaagtttcagaataagacttgaggccacatgaattcttggacagtattttacttcttttactttatgggaatctctgctctgttcccagcatctcgtatcttccactagaagtattccatatttagagcctcggcaaggcttttgagtgtaacagattaagggaactcccttgtagccccatcttgtattttaataacagtgtgatttttttttatctgaaaatctgaattcagaaattatctaaactggacatttttaattctgttttacccccaaggcctgttttcttttcattgccagagtattgtcggttatgcgtcagctcttttgtcattaggtacagacccttcattcaatcctcagaaacgttgacatgaagtaacattgtgttttacagttatcaaagtcaccattatgtttttctgtctgtcttcattaggggtatgataatgaaactgccatattggatactctattaatgtcttgagatgtctggtgctttgttattttttaacatcatgagaaataagaagccactattaatgagtgatacaatttggcaaaacttttcaaatactaaaacactaaattagtaaaaatctggtaatattagtgcttgctattgtaaatttttgccatttttgcttatctttgggaaaaaagtgacctggatcacactggaagtttcactgtattcaagagtagaaatagaaggatgattatcttaagttatgtttacactttggtaatatttgaaaatggatgtatatactggaaatgtctgtaagtgtcttgtttttgcacctaatttatgatctattatattgcattttcttaaatatcttagaagtatttttctttataactttgtatattgaatgtttagataaatgtccaactgacaatgttataaatcaaattcttattcctaaaatcatttagtattataagtattttgattttttaagttaaattatagtaattttaggccgaagtgagttattttaacattaccacttaaaacggatgaaattgtaaaagtcatttggtttgattgccccacaaagcataagatgtaaactgattaagggtatgaaagcaaagtgaaagacctcagatcttgtgcacattttgttttcctattatttcttttattgactgtagtgcatgatacctaatcaaggctccaatgtcttgcacaattcctactttaatgctagtggttttcagtgtccttacaatttaacacagaattgttatttcatcaaccttaaaaactgcagtttttattatcagaaaatgaacaaaaagggaatatctggttgctatgaactgattccctaaaggagagctcagtatgattctaacaatagccaaaagtgttttggggtataggttatgctttgttgggagggaatgtgtggtgaggaggccaagctgcagacagaaagcattgtatgagctgtatctgggtcagggtttcccattaaaggatgttagttttataacagattactttgtttaagaccatctcccttcaagtaactcacagtttatgtaatactaatctcattctttttttacctgaatcaggaattttctgcagaatgttaagttagggaagaaacctcatttcatccattctaacactcctgatgaagtccccctttagtttcatgacaataaagctgttctgtggctatcatcctttagctgggattgacaattgatttcacaccctcaacatcacaagctttttttaacccacagcagttcatgattgcagtatgataggtactaaagccaaactcagctttcaactggcacaaaatgggactgtcaccttttgctccattgttgttggaaacaaagtggcaagagggaaaatgaggaaccagatttacctttgccactatctgtgaccctgtaatcatcactagcctgaaatcttaaaatatcccagtcccaagctacaaaaatggtcacaggtggtttgatctagcacctcggccgttagagtttgtgctgaagacaaatttgtctgggttcattgtgcaccagaattagcatgtgcttgaaaattgcattttataaaagggaaatgaaaatttgcatttatatagatactctgattcatgtttaagtgttaaaggttatgcagactaaacttcaagaggagatccagtgtttaacaatagtgttctagaggattctaaaggaagctgccccagcagccctgagagaaccatctatactttggatatgttgtagccccatcattacactgagatatttccatttgagtaactaaaggtactcctgacagagctggagatgaggggcattttggtgggcagtggycactagggttcacgtcacctacttaatgcaaagaccttagtggtctcagaatgaaaaggtaaaatggaagagaaaagcacagtcctttcctgtcttttcaaatttactttttattaaggatgtacctgtgcactattctaaagctaagcatttaaggataaagtccagaaataaaatgtccatattttcttttcttttytttttttttttttttttctgtcatctgtcacccagactggactgcagtggtgccatcatgtcttactgcagcctcaaactcctgggctcaagtggtcctcctgcttcagcttcccaagtagctgggactacaggcatgtgccaccacccccagccaaaacatccatattttctmttagaatggtttacattatgatgggggatggggagctgggggagggctgtacattcccaaaagaaagtagtgttataggaaatccaaatgcrcttcagtgattcactcctgaaaagcagcctgggtatgttggcagattttgtttgcatttgtcttgcgtatttaaagtctcaggaaatctagtcttggtccaaaacactggagaaaaaaataacaccagacaaaacacatttgagtaacttgaagtagcagcatagaataggcccaactaagaagttggaggggcaaagagaaagccgacagaatcagcttctcctggaaagtgaaagcatcaagttctatttatggtagacagagggtccttatttgcttgtccgtggtgtctatgtgggcctattgagggaatggtagttacttgaaggttcacatatgtaagcgtgtggacccagcacagtctgtgacctgattccagatcctcaagagtggagaaggaaagaaatatgatgatttcctatgcttgaccctaacccaaccccaaaactgctagggattcaacagtgagtaagatgtatgcaataagagaacagataacttctcaacaatgtgcatgccgtttgtgtagatgttcagaactacatatgtgtgaatatcactcccaccttacacacgcacacacactgcaatcacatggcattaaaaaatatattgtgtatggaacttggcgaggtcagtcaggacctggagctgtaatcatagccttattgccacttcttkcgttgtgtatacattgaatggctcatagattttaagagatttttttattgtaagtatttctactaaatgcacttatccttctatatgtttatatattttggtaaaattgatttatcagatacttggtattttagtaagaaaatttcctcaaatatttggctaatgctttgatgtcaagattgcatattgctgagttggagctcagaagaaatgtatgcagctaaaaattgcactgtgtgttcttgtgaatttgctcacaattctaaaatgacataattggtggctgtgatgcttacagtcactgcctactggctctcttatgatgaatgttgccatcatatgatcatttatttactttttgtgcaagcaatggcattttggttgttgccaaaaacaacacaagtggttgggagtgtatgttgttggaaggtgtacacttctgtttctttcagctgtattatttatacacccaggttttctgttaaggatgtaatcattcattcaagaaagaacaattggcaagaaataattaaattaccttaaaaagaattaagaggcactccagccagataacacctcccaacaacatgaaatttagttagtgcttagtgaaattccttaaatatatatgtatatgttttcttcaacattatttaatataactactgcttttatattttttaatggtgttgcaaccacttgtacacctgctacaccttactgacaaaactgggcagctgaaaataaaagagaataaattctattccactgtaagaagttgatttcttttcagctttctttgtatatcagtaaagaacacgaattgtttgaaaataattttaagtctgataagtatggatagcatgttacctaagcttttaatttgtacattttgatgtctgatcatttgcatggaagagacaatagtgccacgtctgaattgttctcttgtgcttggttaatatgtacttctctagattgttcaaaaagtttcaaatgacattccttactctttggttttcagaggcattcaagcaaaatatcacagtggtcttttgttttctgaccaatctaamaatacctgtgattaaatttaatttgttagtgtaaataaatttcttgccaatgagtattattgttgttagacaacgaatgcaataaaaagaaatactgaggtctgttgaagcaattttttttccctcttccattttcaccttcaactaaaacaagccttgactgggtaaacctgtatcaattgtcaaagcatatatctgtcaatcaggagcaaagtgcacatttttcatggaaatgaaactaagtcttaactgtggtaaagtgtaaattggcagctagaaattacatttgaaagcacaattatggaactgggcataaagttaaaagagcaaagcctgcactcgaagcttcctcgcccgtcattttgttcccctgtcgctgcttcaccatcaaagtctctgatatctctcagccaggaaaacctctgtgacaaatccattaagtagtcagtctcacatagcgaggggcaagctaaggaagaatcaggaccatcgtagagtatggggttattttaaacaatattctttctaaagccttaaaaataagtgagggctattaatttcattcattcttacacacgcaaactataatttatatgtgactaagcctatgtcagtgcgaaaatttagatctgggaatcacagaatacatgaattaagctgttttcctctttttcacaatgtatgttatgaaatttctaaccaagccatgtccctttttgagtgatcttgagtatgtgctgtgtcaaattggataggcttttgtttcttcagtggaatttgcttatctatcatcaagaacaagaaagaacagaatgtggtcattttattgaagatgttagggagcctaactactcaggaaattctttctttctaaataatgaaatatgttgggggtgttccctaagcatcacactcattgataatttcaagacagtctttcagagaacccagcatcctgggctgtgagcagcatctcagaaaaattgagcccatgtagggcacgggatattatgtcactggaatcatgagtaactccaatcttgctgtgaataaagtggttttttgacccaaacaaaatgttcctgtttattacttcaagtcagtgattcttaaacaactgttggtggttctcaatttattggcaaaacattttcccggaaatgccagactatcatcataacaagtgccttagaaaaacttcgtttctggctgggtgtggtggctcgcacctgtaatcccagcactttggaaggccaaggcgggtggatcacctgaggtcaggtgttcgagaccaggctggccaacatggtgaaaccccgtctctactaaaaatacaaaaattagccgggcatggtggtgtgtgcctgtagtcccagctatccgggaggctgaggcacaagaatctcttgaacctcggaggtagaagttgcagtgagccaagatcgcaccactgcactccagcctgggcaacagagtgagattcggtctcaaaaacaaaacaaaaacaagaaaaaaatttgtttctaaagtcactgccttaacaccctgaagaagtaattcatcatgaaggttataccttcaaatcagaaaaacaaataaatgaaaatgtgtaacctttatatatcagcttctataacaaaatgataaagtcatgttttcttcctagtcatgtctcagtagatagccaaaggggttgttgatcttttctatttatttgtttgtttacctttctattattttttttcttttcagcctccacaacaagaagtttaaatattaaacaaaaacccaccagcactaccaccacctcaacaacagtgtagtctttggggacacttttagcttcgcccatgtcaattatgggattcattctgtatccagtcatcgaagtgaacaaacttcctttaaccaagtcaaagacactcaaatgtacaatttgtgccaagatcatagagactcataattttcaggtgtgacaacactcccaagaattttaagattttcctatgtgtcattgcaacaggagaattgaaaaagcaagagtacaaggggagttggaatagttcaggttaatatttactgagaaaaagtcatatatcgaagggaaaatgggagtaagtaagtctgactgccatagtcagacttactatgtgcatggagtagaggggaacttcataatgcatatgttttctggcctgtgaactggagtccctgggtgagtactggagttctaaagacacgtgagctaaccctgctcccctgtgtcttctgaacaagacatggcaaggcagcgatacacacatgtgctttcaggcaacacatgttttagggtaagtacttttggggtcacacactgttatttaatatctgacaattgacataactgatttatccattttagtgagaaggatttttatggtaaatgaggttttcaagtattccaagactgatttgatagtgtattctcaaaaaaaagccctacacatcatatcactcccagttaaacagtgctttgatgcttcatgatgtccacatttagggtcagcattcattgttcagctaagaacactgggtcctcggaatatggcaagcggttgaaataatggcctcagtttctatggcatgggtgcaaatcggtctgttagagctcacagtaaagagctttgtgaaacactgtgccaatcagcagtttccctttgtacacagaggcaactgtactgccttgcaacactgtgccattttctgcataaacctgtgtcactttaggttcttctgttagaatgttctggattcgaagcacctgtggaagaaataacattgggttaatatttttgttaagtcacttaaaacaaccttatgcataatagggtcatcctccataagaagccatataatcttatacaatgagataaatcctattttgttccaaaattacacttaacacacctgtttcttcatttgggaacaggtgggtactgatctcaagtgatctttagcagaggtggagagtatctagacctacagggatgaggcaggaaatgcaaatgagcagcgcatcctggatgtgggacattagggagcagtggggatttcagtaaatgtggagggaggaagctgttactcagtatgatggttaatactgagagtcaacttgattggattgaaggatgcaaagtattgatcctgggtgtctgtgagcgtgttgccaaaggagattaacatttgagtcagtgggctgcaaaaggcagacccacccttaatctgggtgggcacaatctaatcagctgccagcgaatataaagcaggcagaaaaacatgaagaggagagactggcctaccctcccagcctacatctttctcccgtgctgatgcttcctgccctcaaacatcagactccaaattcttcagttttgagactcagactggctctccttgctcctcaggcttgcagaccgcctactgtgggatcttgtgatcaggtaagttaatacttaataaaccccctttacatatatatatatcctattagttctgtccctctagggaaccttgactaatacactcagcaatagccaaactgttgccatgcagtaattaaggtccgttttcatgtattttcaggtaagccagggaactaactggatgtttacacttaattcctggtttttaaaatgcagacaagaaaaaaaatgtggccctcaaaaaaccatatctgtgtaccatactcatgtgttctgaacttaacctcctgtctctaaatgtataagattttgtaagttcagtttccttcacttaattgaggagaaatgtgattgtatcaataataacagtgtagtatcatgttaagccaaccatatgaaatagccaatatctgatcattctgactgtaaaaaatagcaatagcgtgtgattcaacttagtatgaaaagcactacactgaggtgggagacctgggtcatgtcttggatcttccactcacatttgtttctcatctgtagaatgaaatgggtgggactagattatctctaaattccccttcagctctagctttctattattaagcctttatgataatatataatgacttgaagaaaggatatctacatcacaaatgtggcagacggtgaaggccactgcgtggatataaaagggtctgtgggaacgttcaaaatgacctcttaaaaacagctggcaccaaagacagatgtcttaggaagttgccatagcattaacatgtagtagttacagggaaatagttgatggtacaccttggcttagctaagcttcttgttaataaaactaaatcactcatctaggggcagtgcattggataaggaattgttactactttttgctactcctttgcagatcaatcattagaaatgaagtattttctccagaacaacaaaccaagtccatgctatagcaaatgacccaaggttactaaatgagctaacaagcaagaacaaattagaatctaacattctgctcagttctgagcactgaacactccacagcatacatttcttcaattctattaaacataccattcagcaaccctaatagctaaaaactagcaaaaggcacaaagggttgccattaaacatgatcacaattgtcctgcaaacctagagataaaaggtaagagagccataatgtaaatggaaatacacatttgtttcttttttttttaacccaagagatacgggctttaacacttttttttttcctgttgggcaggtgaaatggactcttaaaactgagctttaacaatacccagcagtagacaaatatgtcaagatgatatcatatatatgatgtaagtaataagtatccttagtagatactgaaaactcagtaaatgtgcaaatacctatattgaagtaggttgcaaattcttacttgtacccaaaatagttcactgaataaagaccgtggacaaaaaatgggacctttgagtactgtaactaaggtggaagatgagatcttctaagccagaataattccagctatttatcttgccacctgcaggaagatctagagaggctggccagtgtgctccaggactggtccattgcatggacctgtgcgtataccgccacacaggaagggggagttgaataggaaggcaggtaatgaatgattaaaccatagcagtatggcatcattatgttctttgaggatcccttaaccagaggccaagttcctgtcaggcaaccctctccacccaccaccgtctacctgttctggcttctggtattcatttcctccctcccttgctagccctggggtactgcattataactctgttgattaccctacactgtgtccacacattttgtgtatagtccgttgattaaactcccctcaaattatccaatttaagtgtgccatgtgtttcttgcctagactctgactaaagcacctccaaaagccttcatttctgatcatttggatcatctatccatgtccccccttttatttgcacatagaattgagaattggccgggcacggtggctcacgcctgtaatcccggcactttgggaggccgaggcgggtggatcacaaggtcagcagatcaagaccatcctggccaacaggatgaaaccctgtctctactaaaaaaaaaaaaaaaatacaaaaaattagccaggcatggtggcatgcgcctgtggtcccaactacttgggaggctgaggcaggagaatggtgtgaacccgggaggcggagcttgcagtgagccaagattgcgccactgcactccagcctgggcgacagagcgatactctgtcacaaaaaaaaaaaaaaaaaaaaaaaaaaaccaagaattgagaattatgttgtcaactgaaaaaacagtagctgggaataaagtcacttatctggttcatttttaaaacttacctctgatgcaggaggattctctgagtcatagaagaagattttcatgccattgggatggcatccaacccaaaggtctcctgtctcaggatccacagatatgttatccacgagggtattaaagtcaagggacttaaaagattaaaaacaagaaaagaacaagacataaagtaaaacacaattgtgatggag

SEQ ID NO: 5735 - DNA, 13243 bp, Homo sapiens
  misc_feature (1)...(13243): n = A,T,C or G, or insertion/deletion polymorphism (see Tables 1-2)
tgacagaagtcctccaagggtgaagccacagtgggaggcagcggcctggagagccaatgttcccagaaatctcaatgcccacgctatttgcagacctaccactgtcaccttaccaggtggtggccagtgccaggggctcactgcctgcacgggtggtgcactctggagggtgggtctgtatcacctgtgccgtccctgcagtgcagggtctgactctgagctgacaaaagggagaaggaatcatcaggcagtttgtttgtttgtttttgttttgttttttgagacggagtctccctctgtcgcccaggctggagtgcagtggcgccatctcggctcactccaacctccacctcccaggttcaagcaattctcctgcctcagcctcccgagtagctgggattacaggcgcccaccaccacgcccggctaattttgtatttttagtagaggcggagtttcaccgtgttggccaggctggtctcgaactcctgacctcaggtgatccacctgcctcagcctcccaaagtgctggggattacaggcgtgagaaactgtgcccggcaggcagctcttaacctagcaagcgggcatgtgagccggcaggccccggagctccccagcgtagccgcggcatctgtggaaagggagcaggccagttcccagggcgaggagtggacgccctgaccctcctccactgaaccctggaccccaatgatctcactagtaattctcggcgaagacccagaagccccttccaaagagccctctcctaacagctcccctgtggggtgactggagaagctggttgtaaaatcaggagcaggtttctgccccaacgcctgccctgagttagttcctgagctcaccgagccggagaaggcccgtgaccagccagaagcacggagcgcagggcaggacagccggcctgaggccggtcaggagaggcggccctggcgctgcgcggtccaggacgagggagaccaggaggtgggggcggaatgagccgcgatggggtggcggcaccacgtggactggccggtcctccgcggggggcgcgttccgagggctgagggcggacggtggcggagagcccggccgtgaccccctccccgcagtgctgcagttcggcttcgtcaccatcttcgtggccgcctgtccgctcgcgccgctcttcgccctgctcaacaactgggtggagatccgcttggacgcgcgcaagttcggggggtcttctagagcgcaccaggnnnnnnnnnnnnnnnnnnnnnnnnnnnnnnnnnnnnnnnnnnnnnnnnnnnnnnnnnnnnnnnnnnnnnnnnnnnnnnnnnnnnnnnnnnnnnnnnnnnnnnnnnnnnnnnnnnnnnnnnnnnnnnnnnnnnnnnnnnnnnnnnnnnnnnnnnnnnnnnnnnnnnnnnnnnnnnnnnnnnnnnnnnnnnnnnnnnnnnnnnnnnnnnnnnnnnnnnnnnnnnnnnnnnnnnnnnnnnnnnnnnnnnnnnnnnnnnnnnnnnnnnnnnnnnnnnnnnnnnnnnnnnnnnnnnnnnnnnnnnnnnnnnnnnnnnnnnnnnnnnnnnnnnnnnnnnnnnnnnnnnnnnnnnnnnnnnnnnnnnnnnnnnnnnnnnnnnnnnnnnnnnnnnnnnnnnnnnnnnnnnnnnnnnnnnnnnnnnnnnnnnnnnnnnnnnnnnnnnnnnnnnnnnnnnnnnnnnnnnnnnnnnnnnnnnnnnnnnnnnnnnnnnnnnnnnnnnnnnnnnnnnnnnnnnnnnnnnnnnnnnnnnnnnnnnnnnnnnnnnnnnnnnnnnnnnnnnnnnnnnnnnnnnnnnnnnnnnnnnnnnnnnnnnnnnnnnnnnnnnnnnnnnnnnnnnnnnnnnnnnnnnnnnnnnnnnnnnnnnnnnnnnnnnnnnnnnnnnnnnnnnnnnnnnnnnnnnnnnnnnnnnnnnnnnnnnnnnnnnnnnnnnnnnnnnnnnnnnnnnnnnnnnnnnnnnnnnnnnnnnnnnnnnnnnnnnnnnnnnnnnnnnnnnnnnnnnnnnnnnnnnnnnnnnnnnnnnnnnnnnnnnnnnnnnnnnnnnnnnnnnnnnnnncgccgtgggcaggggctggggggaggttccccgcggtaagggacggagctttgcggggctggagggcaaatcgtggattctaggtgaattgctagttggtcatagtgtagcaggacgagtcgcagacagaactcctcagacaccggattaaagaaggaagaggtttttttattcggccgggggcgtcggcagactcgtgtcttcagagcggagctcgccgaaaaagaaattcttagccctttgaagggcttacaactctaagggtctacgtgaaagagtcataatagatcaagtaagcgtgaggaacgtgactgtgggctacatacatcagctaacggtacaaaaagttttacggtgctttctcatacagcgtctggaattcacacataacaccagtagttttggtcaggggttaatattattgttattttaaccgccagggccaggtggtggcgccaaggtcatctagctatttatcttctgtttctttccagctttttgctttcttccttttctcctgtcttataaactagggaaaaggggaggttggggagaaactgggaaggacaacaggagaagtggtggcctcataccataatagaacctgcagagcaggtagatgtacttcacccgcagttgtggagacttcctttgtgatctggttacaatgaagttttgcatgtgtttcaataaacttgaaaagcatcatagtctcctaatgttggagcaaatctcagcagtaaaattacgaaaccatagggttatcagtcttttcatatcggtctctctcaggttttgcttttgctctatgtattttgagctttttagttgtgtacgaattcatacttgtgatctcttcataatggatacttactttttccttttattctttatcttttttattcctcctctcctgacttctggtggatgggtaaaagtgttctggttgttttttttattattattcttttgcttatttggaaccgatggcatatatttctattattttaggggttactcatatgtttagcatacattcttttcttttttctttttttttagagactgggtcttgctctgtatcccattctagaatgcactgccacaattatagctcactgcaccctagacttcctgggctcaagcaatcctcccacctcagcttcccgagaagccagaactacaggcgtgtgccaccaggcctggctttttttttttttttttttctttaaagagatggggtcttactatgttatgttactcaggctagtctcaaactcctggcctcaagcaatgccctggcctcccaaagcactgggattacaggcacaagccaccacacccggctagcacacgttctaaactatatattatcctaacaaagcctgaatgaactcagttttgtttcctctctctgtgtatgactaggatcttcacatgccttaccacctagtaagcagcaatctctccatcttattattgttacatggagttttagttttactgttaaaaacacacatgaaaaaacattttcagtcatctgttcatcaaatttatttgtgtattttgttaacttctgtggttacagtaatttcttatgtattgccttctccgagtcttttttttcttgctgaagtatatcctttagtaattctttcagtaaaggtatgtggttagtggggtcttcacatgcagaaatgcatacacatatgtatgcatagaaatatgtatcacgcatatgtatgataatattgccatgcatttttgtccttcaaatagcggatataaaagtataggtcgagttattttctctcagttctttggaaatattattcttttgtgacttggcttttctgattggaagcattcatagcatttaagaatttttctggctgggcatggtacctcatgcttataatcccagcactttgggaggccgaggcaggtggatcatttgaggtcaggagttcgagaccagcctgaccaacatggtgaaactccatccctgttaaaaatacaaaaaaaggctgcacacagtggctcatgcctatgttcccagcactttgggaggccaagaccatcctggttaacaccgtgaaaccccatctctactaaaaatacaaaaattagctgggcgtggtgctggacgcctgtagtcccagctactcgggaggctgaggcgggagaatggcgtgaatccaggaggcagagctttcagtgagccgagattgtgccactgcactccagcctgggcaacagagcaaggctccgtctcagaaaaacaagaacaacaaacaaaacctggctgtggcagttcacgcctgtaatctcagctgctctggaggctggggcaggaggatcatttcaactcgggaggcggaggttgcagtgagccgagatggcgccactgggggggagcctgggcaacagaatgagacgnnnnnnnnnnnnnnnnnnnnnnnnnnnnnnnnnnnnnnnnnnnnnnnnnnnnnnnnnnnnnnnnnnnnnnnnnnnnnnnnnnnnnnnnnnnnnnnnnnnnnnnnnnnnnnnnnnnnnnnnnnnnnnnnnnnnnnnnnnnnnnnnnnnnnnnnnnnnnnnnnnnnnnnnnnnnnnnnnnnnnnnnnnnnnnnnnnnnnnnnnnnnnnnnnnnnnnnnnnnnnnnnnnnnnnnnnnnnnnnnnnnnnnnnnnnnnnnnnnnnnnnnnnnnnnnnnnnnnnnnnnnnnnnnnnnnnnnnnnnnnnnnnnnnnnnnnnnnnnnnnnnnnnnnnnnnnnnnnnnnnnnnnnnnnnnnnnnnnnnnnnnnnnnnnnnnnnnnnnnnnnnnnnnnnnnnnnnnnnnnnnnnnnnnnnnnnnnnnnnnnnnnnnnnnnnnnnnnnnnnnnnnnnnnnnnnnnnnnnnnnnnnnnnnnnnnnnnnnnnnnnnnnnnnnnnnnnnnnnnnnnnnnnnnnnnnnnnnnnnnnnnnnnnnnnnnnnnnnnnnnnnnnnnnnnnnnnnnnnnnnnnnnnnnnnnnnnnnnnnnnnnnnnnnnnnnnnnnnnnnnnnnnnnnnnnnnnnnnnnnnnnnnnnnnnnnnnnnnnnnnnnnnnnnnnnnnnnnnnnnnnnnnnnnnnnnnnnnnnnnnnnnnnnnnnnnnnnnnnnnnnnnnnnnnnnnnnnnnnnnnnnnnnnnnnnnnnnnnnnnnnnnnnnnnnnnnnnnnnnnnnnnnnnnnnnnnnnnnnnnnnnnnnnnnnnnnnnnnnnnnnnnnnnnnnnnnnnnnnnnnnnnnnnnnnnnnnnnnnnnnnnnnnnnnnnnnnnnnnnnnnnnnnnnnnnnnnnnnnnnnnnnnnnnnnnnnnnnnnnnnnnnnnnnnnnnaaaccccgtcttgactaaaaatacaaaaaattagctgggcattgtggcacgggcctgtagtcccagctactcaggaaggctgaggcaggagaatcgcttgaacccaggaggcggaggttgcagtaagcgaagatcacgccactgcactccagcctgggcaacagagcgagactctgtctcataaataaataaataaataaataaataaataaataaagtgctgggattacaggcatgagccaccgcgcccggctgaaagagttacgtctttgtttagttctggaaatgtctccatcttactccttccagcagtgcttctctgcttgtccattgtcgtctggaactcccactgggctgtggcctgcttccccccaagtgtgctctctgtgttgccgcagggtggtctcgtcgtcactgtctcccagtccccagtctctcttctgctgtgtctggccacttaaaagtttattccattcatttgagggattttttttccaatggctatatttttaacttgcaatatttggttttttgttttttttattttcctacaaagttgaccctggtaatagttttcatggagtgcaacatgtaactttatattagaaaatggaatgtcacatctttaccatgggacagagacacaggaagatgtcaaagtctgaaatagcaagtgaagctgaatgtagcttatgatagggagggagggctctgctggacagggacagtctctgagcaggtgaactgctgatctcacagaggtcagcaatcggcggattttcaccgtgtaagtagactgaagtcatccgtagaagcacagacgtactggactgtcacatctactagaaaataaagcatctgccacctggggggtggggagggtccagtttagcccaatgggggacaacccagcacatccacctttggaacccaccagttaaaggtattgtcagagtatcctgtttgggaagaattcccatttcaggcaccctcgatgaagagccaggccaggaacatgggatgagagagcraaatggtggaaaaaggggagataggctaattccagaggcacctgcccagccaacactcagccctggctgcgcgcactgagtcctgtgtctgctgcaggtatcgggctttccgggatgacgatggacattattcccagacctactggaatcttcttgccatccgcctggccttcgtcattgtgtttgaggtagccgaggcacctgctggttctcccatccatggcatgasgccccgaccctgtgctttgcctaattcgagcacgtggtgaggggtcggtgccgtcacttcctgctgtgtcatcttggtcaartcagagctcttctctgcacctgcgttttccctgcctggcctcatccctgggttgtggtgtggacattgtgggtgtctccacaggagccccagggccacgaaagctggggtggcctctgccccttctggggttccttttcctgcacagctgctttctgactccacccacagctgggagcaggtgccggagccccggcctgcctggccctgtgaaggccactctgggcgtttgggtgggcgtgagtgccttcctctgctcccagcatgtggttttctccgttggccgcctcctggacctcctggtgcctgacatcccagagtctgtggagatcaaagtgaagcgggagtactacctggctaagcaggcactggctgagaatgaggtgaactgtacagcccagtctcggccctccccccagccctctccctatccttgtcagtggctgctctacctccggacactgagtcacatccctcttcctcttgctgcccttttttggggacaggttctttttggaacgaacggaacaaaggatgagcagcccgagggctcagaggcaagtctgggagcagccaggcccctgccccgtgcactccctgaggtcacagggccctgcccagccgcccactgtgcctcgtggccatggcctgctcctggccctagtctgacttgtccctgcccccaaccctctccccagctcagctcccactggacacccttcacggttcccaaggccagccagctgcagcagtgacgcctggaaggacatctggtggtccttaggggagtggcccctcctgagccctgcgagcagcgtccttttcctcttccctcaggcagcggctgtgtgaaccgctggctgctgttgtgcctcatctctgggcacattgcctgcttccccccagcgccggcttctctcctcagagcgcctgtcactccatccccggcagggagggaccgtcagctcacaaggccctctttgtttcctgctcccagacataagcccaaggggcccctgcacccaagggaccctgtccctcggtggcctccccaggcccctggacacgacagttctcctcaggcaggtgggctttgtggtcctcgccgcccctggccacatcgccctctcctcttacacctggtgaccttcgaatgtttcagagcgcagggccgttctccctcgtgtcctctggacccacccgccccttcctgccctgtttgcgcagggacatcacccacatgccccagctctcggaccctgcagctctgtgtcccaggccacagcaaaggtctgttgaacccctccctccattcccagttatctgggtcctctggattcttctgtttcttgaatcaggctctgctttccccctagccactacaggcagcctctgacagtgccgctttacttgcattctgcagcaattacatgtgtccttttgatccttgcccaacttccctccctctcccagctcctggcccctggcccagggcccctcttgctgtttttacctctgttccttggggcctagtacccagcaagcacccaaatgggggaggttttgggatgagaggaggaaacgtgtatacctgtaacatctggtggctcttcccccagaagtttgtgttcatacataattgttttccacgctggatcataatgtgacgtgcagttctgccctgtgctggggagccacatgaagcttcccctggctaacttgctaccccgcagcaatcccagtgtggccgtctgcttgctaaaaaatggatctgtgctcatctgtattgatgtccttggagttctacaagtggaacttaagtgtcaaaaagaatatgtggtttttagctgagcgtggtggctcacacctgtaatcccaggactttgggaggctgaggcaggaggattacaaggtcaggagttcgggactagcctgtccaacatggtgaaaccctgtctttactaaaaatgcaaaaattattctgggtgtggtggcgggcatctgtaatcccagctatttgggaggctgaggcaggagaatcgtttgaacccgggaggcggaggttgtagtgagctgagatctcaacactgcactacagcctgggcgacagagcaagactccgtctcgggaacacacacacacaaaaagaatatgtggttttaatgtgctttgatgagtactgccaaacttactccacagaaaaggcctctttctgaacatcctcgcctgcgttctatttcacccaccgtgatgcctggcctgagggcggcgtgcttgcttgtagcatttcttgaggatttgctacttgttcacctgcctcttaggagcactgtgccctgcctccatggaagggctcttccggcagggatgcaggctcacagcgccctggggctggacaccaccggccggagcatggcggacagcacacacggcccggggcgggaaccttggaaactttacacagatggggagctcagccattccacgtgtgctttcgctcagcacaatgcttactacaaacccacgtgtacttccttccagctggttgctttttattgttgctgtcttaaactccaaagttttaaggtgaatttattgaaacgtacgaaaatgctcagttcatacaggcttccaggtgaacaaactgttgtaaccagcacgtgggtaaaaggcaagttccacatcacccgacgtggaagctccccgatgcccacgtgcgccctaccctgtgaccctctcccatccagggccctgatgcccacatgcgccctaccctgcctgtgaccctttcccatccagagtagccaccaccttagccaccaagcagagatggaactggggactttgcatttggcgtctgccgtgggacattgcgcgagctccatccatgccgagcatccatctcagcccctcctggctgctgggctgcttcgtgtttggcttagggtcattttgcagttgtgtgctttactgtgggttgcatatttagggcccaacagaactgctgggtcagggataaacatgttcggcatttttttttttttgagatggagtctcgctctgtcacccaggctggagtgcagtggtacgatctcggctcactgcaagctctgcctcccgggttcacgccattctcctgcctcagcctcccgagtagctgggactacaggcgcccgccaccacacccagctaattttttgcatttttaatagagacggggtttcaccgtgttagccaggatggtcttgatctcctgacctcgtgatccgcccacctcggcttcccaaagtgctgggattacaggcgtgagccaccgtacccggccaacatgtttggctttaagaggaactgccatacccgtcttcccaggtggggaccagcccagtcagcagcaggaacacctattccctcttgactcttcccgttatctcctgccactcaggtgactggggtggctcctcccactcaacgcccctccctcctcctcctccagccgaggcctccgcccgcaccccccaccacccaactcagctcgtcataactcacaggccgggtccagggtgccaggaatgccactgaggctggcagagtcctaaaagggagtggcaggtgctgctccacaaggacggttgtccaccctcaatgagggctgcagggcaactgctgactgtctggcagccagaggacagggacaggcagccaccctcttgccatgaccacacctgggtctccctcaatgtggctcccgaggggccgttgaacacagtgttgagaactgctgagaaaatcacaccaaagacgaactacccacagatgccagtcaccactccagggtgacgagaaagagaacacacaggcggcagcgtgacaaaatgagtcccagcatgctacatctggtttcgggttttattttagaatttataaaattccagtgtcatccatattcatgagcctttacacatgtttgcatataatctccaaattccaaagttaaggccaagggatggattgtagctatggaaacagatgatatggaagacatccaacaaggaggaaaagcacacgcacgcctcacccctgcctcatctctgcccagggctgtcctgacagcacagacgcttcagggagacaggcctggggacagtcatgtcatcacccttgcaacaaccacccaaaggaaaagagagcgctgaacagtttaggaaagggctcgcgtctaagacatcaagcgacatacagagatgtgcaaaacttggtgagaattaaaattgacctttgggagagggtaggggcaggatgttttatgacactgtagaaaagacaggaggaacccgctgcgatggagattggggggagctggaagcaagcagccaacaggacagagttccagaactcatgcagatggggaagaggtgacagcccttccccactggcctcccccgtggaggtggagtagacagatcccgggaaaggcaggaaaagggccttgctttctttccctgtttcctaagccgtggtcaccctagcctatgaagctggaagctatattccttccaatcccaatttaccattcctgtaaacaggcccattcagggctgcctgagcaaatggggacttgccgaggcagctgcaactagacttgggctaagccgtctgggtctactcaagaattcgagtctgaagatgaccaagcttgagttattcaactgagagtgaggtgtcaaggcggaagcgactgtccccagggaagggctgtgagatggatgggcgtgagtcagcttttccaaaactcaagtacctgggacaggacaactcgctagcagctcagtcacctccgtggcggacacagataaggatgttaagaccagaaaaccagagactagggccccgtcctcagccctcacagcatgacacagatgcctccctcggagagcagggtctctcggcatccagcggcgtggtctgcattctgctctacctcatgctctaggccccatgccatcgtctcggccctagaccgtgaaaactgccagtcacccgggacctgctcctaggggctggcctgcacagccggatggcctgtgggcggggtggaagtgcccactcccactccagatgggcctgctggccactgacccacctgtgctgagggagagcgccagcctccagcttaggtacacggcgcccacccccagctccacgggaaacccataaccaccagaaacatctcaatcaagagacgggtgtgtggggtggcactaactgcacagagaccactccacgccggctgaggtagaaagaaggcaactgaacacacagcagctagggcaggggcagggaggggctgcaggtggtgtgaagaagagcccagctgtcatctaaggcaaactgcccccactgaggacaagcgtaaggccctacctcccccaacctgtgcgcatctcaatcacagcagacactgtgacggccacaggggacccagatggtgcctaccaccttgcctccaggctccactcaccagacctcaggctgagggtctggcagtggaggtaggggcagggacccttggtgctttcagaccccacggcaggtaaaatcaggactgcctgagaacccgtcaccctctgcctctcaggtcaccccccagctccaggaacctgcctcctgctgtccattgccaggtcttccttgcaccctgacacctgtgctgaggcgctctggcagctggaggaggctgattgcactccacaaacaggactgtctggaccaagggaaactggcaggagggaggtgggaaaggaagagggcaaacgtttggcttttataaagtcaaggacgtttatttcctgaggtcatgacacaggaagtggaatcctagccacggctgcggagctctcgtgatgaaggccagagtgctgactgacatgccgggtggaccaggagctggagtctgttatcttagcacgaatgctcatgaccttggtttagtgttaaacagtggagcaggtcctgagcgggcacggccaggcctggaggagcggccgcacacacagccaggcgctaggctccctgcgggacctcgggaagggggaagagcgtcaacaatttacggagggtccagccgctgggtcagattgagacaaaccattgtgtggttgggtttgggtcagcaggctggagagggttctgttctttttgatcattatcgtttggggccccaagggagggtcttgggagccacctgagccccaaagctgggaaattcctcagagctgctcatgtcaggagcctgtgcagagagaggacacggcttcaggaggggatgctccccaactcgcaagcagcttccgacgcagttgccaccctcaggacaccaagcccgcctgcccgcccaccctccctgggacccaggagggcagaagcccgcatctgaccttctcactgctgctggcggtccagggtgcgtcccgcaccaca

SEQ ID NO: 5736 - DNA, 47941 bp, Homo sapiens
  misc_feature (1)...(47941): n = A,T,C or G, or insertion/deletion polymorphism (see Tables 1-2)
cagttctcctgcttcagcttcccgagtagctgggatttcaggtgcgtgccaccatacctggctaatttttgtattttagtaaagacggagtttcaccatgttggccaggctggtctcgaactcctgacctcaagtaatccacctgcctcggcctccaaaagtgctggaattacaggcatgagccaccatgtccagccagaatacattgtataagaaaattgatttcaattataatgtacctgtggtacttaactaccaaggattgggaaccgtttgaccataatttttccatctgttggataagagctgaatcagaatgtcattctaagctaatagtggctatcatccatgacctaaaacggactcttgttaggggactgaagattggcaaagggagaagctagaggccatatagaagaggaaagcatgaaggtagaaaccacaatcaggactgccttcaaatatgaacttccagggatacttcttggttctgggtagctcccccaccacactgttttcttttgctgtcctcaggaatcagcttgcttgtttcgtttcattgctatcatctgtagtttctaatgagtttttcactttctgtgatctctacagaacagattttacttttctctcttctcccctacatttgtgtctgtgaagtatgcatgctggtgtttttactacttttaaggaaagagaagtatttagaaacaaaaacgtatttcatctgtctttgccacaaggattttttcctccctagttacattttcacgggaaaaacaagttgtacataagtgcatcttacatttcagaggaaagtcagactggagttatagtggacttcttatcattagttaggtagaggtagaggcagcagcctggtcttaacaggactctgcctctgtagggagggatgaggaaactaaagactacaggagtcaactgcactggggtactgggttacaggaaggctagtgatcttgctaacctagaagactagaaagtagaggaaattcatatgcccttttcctgagtttgaaaaggctttgttctttcatctcacagggagacttcagcacaaatgatagaagaaaatttgaactgccttggccatttaagcactattattcatgaggcaaatgaggaacagggcaatagtatgatggtaagttttgtgtggatatgggtgcctgctttggctatgttgggtgcaaaaggtttaactttccatgctagccttatctggcatttgggatgcatatgggaaatagaagaactcaagaggaaagagcatttggggaatatcctcaaccttaaatccttatctgccgttactcagggatatactaggattatgtcatcaattatcttcaataatagcatttttggtcaaattaaatgagtggtaagcttcttcacaatgtgaccattgaaattgaatggtttgttctgtacctttttgcttcagcaatcaattttctccattaagatgggacttgtactttaattcagatatggtacctcccgaatagaaaataaattatgttaatatagttgtaataataagtgtgtgttaagatttggttactataaactactgatttgttaaaacttgaggaaattaccataaaatgtctactgaatcaatttttcctgcatttagtcttaatgtcaattctgtacatttcctctttcattaagaaaaatagcagtggccaggcatggtggctcacgcctgtaatcctagcactttgggaggccaaggcaggtggattgcttgagcccaggagtttgagactagcctggccaacatgggaaaccctgtctttataaaaaatataaaaattggccaggtgtggtggcacacacctgtggtcccagctacttgggaggctgaggcaggaagatcgcttgagttcaagagtttcaggctgcagtgagccgtaatcctgccattgcactccagcctgtgacagagtgagactttgtctcggggaaaaaaaaaaaaaaaaaggataatggtggccagccatatgacatgtacctgtagtccgagttactagggaggctgaggcagaaggattgcatgagcccaggagttcaaggctgcagtgcattatgattggacttgtgaatagccactgtactccagcttggcaacatagcaagatcctgctctcttaagaaaaaaaaaaaaaaagaaaagaaaaggaaagaataattgtttacttcaaatatttatgaaaaaaactctgaaatttttttaaatcaggaaataaggtaaatgaaatgatttttcaacttttgattatgaaatgtccaaacagaaaacttgcaaaaatgaacacccatatacttataacttatagtcaacatctaattgtaactttttcatgcctggttttagaatcttgattggagttggttaacagaatgagttgtcacttgttcactgtccccaaacctatggaagttgttgctatacatgttggaaatgtgtttttcccccatgaaaccattcttcagacatcagtcaatggaagaaatggctatgaacagaaactacatttctactatgatcagaagaacatgattttacaagtataacagttttgagtaattcaagcctctaaacagacaggaatttagaaaaagtcaatgtacttgtttgaatatttgttttaataccacagctatttagaagcatcatcacgacacatttgccttcagtcttggtaaaacattacttatttaactgattaaaaataccttctatgtattagtgtcaacttttaacttttgggcgtaagaccaaatgtagttttgtatacagagaagaaaacctcaagtaataggcattttaagtaaaagtctacctgtgtttttttctaaaaaggctgctcacaagttctatttcttgaagaataaattctacctccttgtgttgcactgaacaggttctcttcctggcatcataaggagttggtgtaatcattttaaattccactgaaaatttaacagtatccccttctcatcgaagggattgtgtatctgtgcttctaatattagttggctttcataaatcatgttgttgtgtgtatatgtatttaagatgtacatttaataatatcaaagagaagatgcctgttaatttataatgtatttgaaaattacatgttttttcatttgtaaaaatgagtcatttgtttaaacaatctttcatgtcttgtcatacaaatttataaaggtctgcactcctttatctgtaattgtaattccaaaatccaaaaagctctgaaaacaaggtttccataagcttggtgacaaaattcatttgcttgcaatctaatctgaactgaccttgaatctttttatcccatttagtgtgaatattcctttattttgctgcttgatgatgagagggagggctgctgccacagactgtggtgagggctggttaatgtagtatggtatatgcacaaaactacttttctaaaatctaaaatttcataattctgaaacaacttgccccaagggtttcagagaaaggactgtggacctctatcatctgctaagtaatttagaagatattatttgtcttaaaaaatgtgaaatgcttttatattctaatagtttttcactttgtgtattaaatggtttttaaattactttcttgatctctattcattataaaaatcagattataataaaacagttgaatatggcttaggaaaatatgaaggttccatgaagtggaattaagagcatagaataactgtactttccttaggaataataggacttatggtaaaggtagtattgggcaacttctttaagagtgttttcctctgaaatgtcctatcaccactatctacatctaaaaaacatgctcgattcttgccctataaactgatgtcacagccccaccatccccatttttgctagtggtatcattttcctagtcaaccaaattttttagtcatcacatatcactgttcgtcatctattataataggcagtctctctcttgtttccctggttttagaagattttagtaataaacatttattgggtacctgttacttggagggtattaagctagatggcaagatctgaaacaacataggcagtatagtaaaagtgcttatctgggagtctgaacattacaagccatccaagcattgcaattattgttaaggattattttcaatggtcatgcattttctaatattttaataattggttaaagatttgttatagcgtgggggccgctgctggtgtgtggctggggttatgtcagggcagcctgatctatataatttgggcagatggtgtgagtcagaacagactattatagtgggatccccaaacttgcttttgatgcatgagttggaccactattttttggtgggtaacaacttttcagaggggaatggcagttgtgaattgtatacatttcattctttaagcaatattatgaaaaacttcagagaatgtctacagaaaacagggtatggagcaagttattttccattctttttgctttttggaagttaaaatagctaagctctgcaaatatcatttatttggaacagataaggtcccagacattcctagataataaaaatcaaatgaatgatacaggtaagtgtatttattgaagggtgtgggtagagtggtctgggaagtcttgctttaatgaagacggattgattctatttacctcttcttacttccactactaagtaaccctgggcctgcagtttcctaaccacttgacttccttgccaacagtctgtctccactttcagccgttttatagattcattggccctaaagcactgctttcccatacttccctacccaagagggcaggggtccccaagccctgggccgcggaccggaaccagacagtggcctgttaggaaccaagccggatagcaggaggtgagcggcgggcgagtgagcattatcgccttgagctctgcctgctgtcagattagcgagtggcatcagattctcataggcacgcgaaccctattgtgaactgcacatgtgaggtttgccggctccctgtgagaatctaatgcctgatgatctgaagtggaacagtttcatccccaacccacacacacccccaccccgtccgctgggttagaggactttacaaccctagtccaccttgtccagttatagttccacctctagcctttcaaggcttaaaccattaatgtccttaatttctcttgtattcatctatctcccaactatacctttttccttcccttttttatttttggcaatatgtgcccatggttttttaatttaaaacgaacagaatatgtagtgacgcctaccatagcactccttcccatcacacaagccttcaaggaaactgaagtacttactttggtctccctggaggattccctccgcctcccgccccatgtgcttagcaattctgttcctgtagtctggatggccttcataaagccctcactggaccagcattctggcacataataggaacacttaaaaaacgagagaatgatgccgttatatctaatatcttcctcttctgaactttcacagcactttatttgcaacaagtttagttgctcctgaagggcaggatctctgccggaagcaagtgcgtgccacacagtggggctccgcatacactgcaaaaggacaaataaaccgaacagctaccgtttgagagtgagcgagtgggttctctgcacaagaacaaaccaaccagtcccttgtccgaaagggcgtctccttttctctgcttcgctgctcactccagactgcgggctgtcctcttccgaagcagttaaccagcagtgtacagaaagcgacttgcctccaaaggagcctgcgcggcccgcggctaggagaattttgtcccatgcgctccccgtctcactagccgcgggccggggctacgccgtgtgcgtccccgcgcagccgcagtgctgggcgagtgggcggggccggctgttggcggcggttggctcggcgcgggagtcggctgcacgtgcgggcgggggcgatgcgtcactgatcggtgaggcgcggccgaggggtcggctttcctcgcgagcctgcggctgggcttcttctcagttagtgccttccacccgggagcgacccttgggagagggagtttcaggaagctcaccgagcaggggcggcccactggcctccgggggcggaggagttggcaaggggtcagcgggctcagccagaagggaagaatgaggggacaggkgtactggactccccggctcagcctgcgagagagcgccaagtttccggagggagagggtagaaactggagggggtggacctgtcactcacgggactgagggtccttttctcccgctcccaggaggaacgagaatgaatatgactcaagcccgggttctggtggctgcagtggtggggttggtggctgtcctgctctacgcctccatccacaagattgaggagggccatctggctgtgtactacaggtgagcggcatgtgcagtcagttagggctctagagcagattaaaagggtactccagagtggagtctgggaagttgttccctctgcaacgttcgggggcgcatgtcccatctctagggagagcacgggggtcgaagcgggcttttgcggagcaccctccagatgttggacagttttagtgctatgttcgttttgttgcagagattaagtctccctacggttattcctatacacagcaaactcaattatttgtagaaaaatgaagaaggaagaaaggaagtagtcactctacctctaactgaagagatggataaattatagttcgttcaactgtacaggctttagtttgccgctgtagatgctgtatgtttatggttgtttcttagactttttcatttaaaagcttccagtgtctggttacgtcttgtaacaccatgatgactgtgatggtgcttatgtccctggacctccagggacataagcacaacactgatgggccatgctcctccctccttactgttgctgttcaagttggggacaggagtggtgtgggagctgttgctctcttgttgagctcgcttagcttttccttcagcctaattaccacaagttccttttgatacagactagtaagagaggccagtttgtggagaaattgggataatggtgtattcaaaaagagcgtcaactttttgcttgtttccactatccctcaaaactgatatttctactttcaaatccatcctgaatcctagaaaaagagcaattttaatggtatatcttagcagatggagctctacataagaaattacagattagtccagatttccttccagtttaaaagcattgtctttctgacagtaaaaccagagaaaggacatttcaargaatgactcaaagaattagtaatgaacctcaaacagttcatctttccttgttattatgacyttgcaaatgtgtttatattttcaagaccggtagctaagttctatgaatttacaaggtgcaaaataggactttgttttctttgctccccaaatgcctcctttttataatttccagggcttgctttcatagttttcacattccaggatttggttaacaagcccttatgctatttatttgtatagtcttgtcacccttcatcttttcatgctaattttttgtttttatatagaaattttatgttcccagtattttaattaccttgtagatagatcgaaagaattataagcctcagaaattttctctttacttcaaagtttgcattgtctttttttcaacctggtgattaaatgtattatatattttgatttggctcttgttatgtactattaatgtacctctactgaaagccattagaattttttaaacaaatatttctcagaaggttaaagaccgaggagaatcctttgaaccttagagcagtgctggagacccagaggtacggttggttgagcttatgaaacaaggtgtaacattggcagtttaatttgatctttttccctttttaggtgtggaggtattttaagcagttgttcattatgagcaattcatattagtgaggctttagtaggtcagcagcatgagcaagagtgagtatttattatagcattttagatttggaaagataatttttctttttataattttgtcaaattgaaacatctttttgcaggggaggagctttactaactagccccagtggaccaggctatcatatcatgttgcctttcattactacgttcagatctgtgcaggtgagtgattcctaggggaagcctccataccagatagacaggcatgacaggagttaccacacttgtgggtggagatagatttccttattgcttaagcagatggtggtatttacttaaatgcagaagttaacgttcagagtacagttgttacaacacaagttatgatgttaaaccacctcacttacttgaaatgaattaaaggtatgaaccaggaagcttggaaggactgacttctaccatctatatcgtggtatatagcaaattttctgttgctgctgtcacaataaaagtaagaattagaaacacaactagacatacaaaccagtgattatgtggtttagaacagtgtttagtttccatagaggcaggctcctgggctactgttaacatggaggatcaaaatttttatacacagcctttctgcctcatgtttttttgcctggtatattaagcacaattttatgtggaaccttagtgaatgttatattttgatggcatcccgggatatttgaaataagtgtctaatcctcgaaaagtgtcttggccatgggagacaataaaataagtatctttcaatgtaacaagatgacaaaaccaggattaggctgtgaccactttcgcaagcccagtgtgatcataaatctttggattcagaagtttgtctgccatctgctgctaatttttcaggactcaggaaaattctgtgttatttaatcttgtaatcttatgtctaggcttcctgctaagtgagagtttaattataaattcttaaatcccctaggttttcttcctgtccccttttasatggcttagggaaagaattgtgtctactgaagtgaaatgtattcttcccctaatcagactgatttccatatgttgttccatatttattttacccattctttccttagttcatgccatcacttctttatctgccatctcactctccattccttytctcctgtctaaatcttgccaggcttttaaaggctcatcccagattcttcctcttctgatctatagctcttaaagtctatattgtaaattttggccctttgtcttattttctttaatattgttgtcttgcattgtttgctaagtttttttatgtgttttctttccagaaaggctccagttttcttaaaggcaggagttgtaacacatttatatttctggctttctatttatggtggaagttgttaaattgagctgatttctcaggaagcaatgtggtgtaatgaacatggggacccagcgttaccgccagttggtggcatgactttggaaaaattgcttaactgtcatagacttcagttagtcttctgtgaaaggaggaattttaattacataacctcatcaacagccgaaacaatctataataatgttagcaatggcagcattagacccttaaaaatcaagactctaaggcccggcgcagtggctcatgcctgtaatccgagcactttgggaggctgaagcaggtggatcacttgagcctaggagtttgagaccagcctgggcaacatggggaaactccgtctcttaaaaaaaaaaaaaaaaaaaaatcaaggctctaacaaatagatcttgttcaaaaccaggtagatctgtctctgccttcatgcttagtatgttaagtcatactgatgcaaaaatataaataaaggagatatagataatagtaaacagattttggagtttaattgtgtatatatataacaaatatagtgtgtgtatatatttaataataaactatcataagagatgtaaatgaaattagtacagagacttcagtgtaaactaaaatacttcgcatctacaaaaaagttttacatgggctagagccagccagtgtgactaaataggaatgttctttatgtgtaaaacggtaacattctaggaaataattatattaataaaaccatatttaaaaagtgttcttggccgggcgtggcggctcacgcctgtaatcccagcactttgggaggccgaggcaggcagatcacttgaggtcaggagttcaagaccagcctggccaacctggtcaaacgctgtgtctacaaaaatacaaaaattagctgggcgtggttgtgcgtgcctgtaatcccagctatttgggaggctgaggcaggagaatcgcttgaacctgggagaccgaggttgcagtgagccgagatcgtacccttgcactccagcctgggcaacagaggaagactccgtctcaaaaaaaaaaaaaaaaaaagagtgttcttaagagagtaagacataaatttatttttaggaatttttggaacatattagaagacatagtccagataaacaaatggtttaacaaacttggcaattgaaaggaatgtatataaatgtgaaattccatatatgatgtaaaaagaaaaagcaatggagaaattatatgaaaaccttcagccttcataaagtaaccatagattcactttttaaataaattttctgtcatactgggaaagtaatttttaagaggacataaaagaaatataaaagtacataaagatagggtgttaaatggaagatttaacatttgaaccctttcctagttcttctgagtttgaaaattggctagagaatatccttttggtttaaataggaacgtgtatttaaagttggtgtggaatatggaaactgaattaatgttataaaggaaataaatataatttgtctcttcatcaatccccttaacctagaactgccaccaatgtttactgtcattctaatgtctcaacctaagagttattttttattctttcccctcctggaattttatatcaaccaagtatcagatacctcctctattatgtctggattgacagctttcatggcctttactgaattaatctaaataaattaattatttagcctcccagctggttttcttacctccctataagatggagaatgagaactacatcacatgtgagaaaaggaattaagtaaacatatttttgaatggttcgttttgtgactgtatataaggtgaactagagagatcccaaactccccagccagcattcagggccctctgtctagtattaccatggtctcttgtcagaatttcatctttcatccaaattgtcccttstgctccaggcaagcctatctactttcgttcgcctatacacatgttgtcttcaactgtgtgtatttcagtaggatatttattgagcttaagatgttcctctgcctcatctgttcttatttctcccactctagacctggcttataaatccttcacctcagagagcttttcaaactactatttttttcactttctgtaatttaccacttaacagttcagtttataatttgtgtttttggttttgttttgttttgttttgtacctgttgatggattgattgcattgtaacattttgtctcctgtgctggattgtgaactctttggaaacagggactgtgattcctttttcctttgctttgtgcttgataagatgcagtatgtctagaatgtactcattaggtgctgacctatttgaggccttagagtacagcaggaagtcattcattctggatctgaacaaaggtgtgacaagggcaaagcaattaagtaccagattgttggttcaccaggaggaagcagtactggtggtagcacttctattaaaaaggaaactgaataggacatgtgagagatcactaggtattaaactaaaatgttgaccacagctttagagaagaaaggttgctgttggattcaagggcagctttgagtcttagagtacttgtatgcataaaatctcttttatcttcaacataaatagtaatattagcagtggaatcaaagttcagagtgcaagttgtagccagagtatctatgtgagcaagctgtgttgtttacaacccctggccagctccaggcaggtaagggactctggaagagttttctacttattagcagactgaacattgaacctttcccagtgaatcttaattcaaacattcgctgtaggccaggcacagtggctcacgcctgtaatcccagcactttgggaggccaaggtgggtggatcacttgaggccaggagttcaagaccagcctggccaacatggtgaaacctcatctttactaaaaatacaaaaattagctgagcgtagtggtgcatacctgtaatcccagctacttgggaggctggggcacaagaaccgcctgaacccaggaggcagaggttgcagtgagccaagattgcaccactgcattccagcctgggtgacaaagcaagactctgtctccaaaaaaaaaaaaaaattgctgtaaaatattttctgtctcaagtctttcatttctactagaatacaaaaagaaatgactgttctgagagctaatctttgggaactgaaattgtgatggatctctgctgtacttactgtcagcagctttccagagatttgcctctggtaccagtagttttttgacaatgtgtgtcttgagtgttgatgagatatcttttcctccctagacaacactacaaactgatgaagttaaaaatgtgccttgtggaacaaggtaagctttctctttgcctacgagcctccctttagctcagacagagtttctgttcctacagctatgatcacttagacatatctcarataggcatgatagttaacccaaggggacttctgatctgagcattgtttgagcaaaggcctatctccaaataggagcttttccatcttaagaaccattattgttcttatggtattattggaaaaaactggagttttagagcaagtagacctaactgtgyattagcactgctgcatctgctttattgactattttttaaagactttattttttacagcagttttaggttcatagtgaaattsascaaaaagtacagacagtttttatatacctctttccccaacacattcctttattgacactttaaagcttagtttcctcctttataaaggcagtaaaatctaccttgcagagttgttgtaaggattagaattactgtatatgaagtgcctaaccagaacttggcccagaataggtgcttaataaaacatagtttaaaattaatcatcccaccgtcttctcatctgtagtgttaaatgccatctaatttagagtttctgattcaataggtctggggtgaggcccgagaatttgcatttctaacaaaagttcctgggtgatgctgatactgctggtctgaagacctcactttgagaattgctgtcctaaagaggtttagggaaagaaaggcaagcagggcccaaattatttctagggtataatcactgcattgaattgtatcaaaagaagaatgtgaagttcaaggtattttttaaattacttattttaaatgactattwcaagtgtaaaaaagacattgacatctatagagggacagaaatgctatgaaaaaggaagcgaactctttctgtgttttaagtgaatattagtatgtttcattatcagcttctcyccaggtctatctataactgtgttttatggattgcctttagtagttcacactytttttctttgtttttagtggtggggtcatgatctatattgaccgaatagaagtggttaatatgttggctccttatgcaggtatgttacccatctacctgtggtttttatagttatagccagaggatttatagctgagagattctttgaggaatagaagggtactttgaaagttttatgacttcattgatcactgattaataaatttctggggaatagaggcaaaaataggtcagaagttctggacagagttgactttctgcaactgtatgagttactcttctctgagcttagtgtttctaagagcaaaatggtcattggttatttctagaataggaaagtagtattttatccagtcaggatgagagataatttccttgggtgttagaaatctgtaactgatcaattccttggcccacactgatttgccatcaaagagaagtattttctagttgagatttgctataatttgcaaagcagtctgaaagccttcaacgtggggaaagcattttcttgataaaagatgaaaacctacaggtatggggtgggtaggtactgttgtaatcaaaaacttaattagaagccctgaagaaagatataccgtcttatatgcatgcttgttaataaaactggcatgtctagtatgtacagaatattgtgtttggcaagaataatttgaaaagatgaaattacagcctttgccttcaggggttttaattttacttgagaagacataatacagagctaaaaaaggatatattgggatgtaaggtcataataaatttcacataaccggtacaggcacaaatagtgaaaagatttcagagtagagagcaggcgtattactgtcaagggcatttggattatatttttcagagagtaagcattttccttgtctttttttcctctcctttccttgattacaaatcactggaatggattatgattgaaaaagggaagggactgatgattctttaaccagagattaaataggaaactatttagatataattcatttgggaaatgatcaagcaaatgatttagtcattaagtatttattaatggcctgtccattaattttttttcttttttgagatggagtcttgttctgtcacccaggctggagtgcagtggcatgatctcagctcagtgcaacctctgccttttgggttcatgcaattctcctgcctcascctccctagtagctgggactacaggtgtatgcctccacaccaggctaatttttgtatttttagtagagacagtgtttcaccatgttggccaggctggtcttgaactcctgactcaaatgatccacccacctcagcctcccaaagtgctgggattacaggcatgagccaccgcgcccagtcggatttgaaatccagttgcatctaatatcccacatgggaaggccagtggagcaaattcttggatctgaagacagaagtagaaagcagcatgtttttgtagataaagaacaggttctgacgtggtctagtatgtaccttttgggcatttctaaaattctctgtttcttagtttcctaatatgcaaatttaggagaattcagtgctaatttatgtaaattacctgatataaagcccagctcagttaatgttttaacaactttaaaaaattgcctttttaaaaacggtcttttgcaactgctttcttcttttatttctactgttcctcagtttgcctagtctctctttacctcttagctaaacttttgcagtaattgccttatgctttccctgcctctgatctttatgcttctcagttcatcttcacactgctggccaaagcgtaaatctgactgtcatgcccttgcttgaaacctttgatagttccttattacctccaaaataatggatactttagtgtggactttaaagttagcccctgtttgatgggctaaccagcaggtgtttggcattagtattacaaatgcaagggtatttggaaaattgagcacaagcaacacatcaagatttgttagttgtggtttttggtttcactattttgttggcacttttcctcatgtgtaatatatcaccctgacttttaccctggctgaatttgaaggtacctgtgtcattgttgggtaaaacaaacatgggttgtacctctccttcagtgtttgatatcgtgaggaactatactgcagattatgacaagaccttaatcttcaataaaatccaccatgagctgaaccagttctgcagtgcccacacacttcaggaagtttacattgaattgtttggtaagtgtcttaattcttatgtatgtaaatagccaattggaaatctttgttcagcttacttattgaggttatattggtaaaccttagtgctatttaagcatttcttctgaatttatcatagagcaattgtctttaaaatattttttatcttaagtttaaaattttttatataacttgttagagattggaaaaactactcagactgtattctgtttttactgtaataacttagtgaaaattagctttgttgatgttttaatagataatttgaaaaatttagaaacctgtgtcttgaggctcccatttttgatgatttggtaggagactgacaggactcagcacatagttgtgttcacagctaagatttattacagccaaagggtacaaagcaaaatcagcgagaggcaaaggcacaccagcaaaatgcagaggaaagcaggtgcaggcttccaagagtcaaacatgtgcctaattcccacagcaacaagctgtgacaacacatgtgaaatgttgtctactagggaagctcattggagactcattgcccagggttttcactgggggctgattatgtaggcaccctctgcctaccacataaaaattccagactcctggaaggaatgcaggtgtttggcataagccacattgtataaacagttcacagcaagtcaattgtattagctctggggatagtgggacccttctacaaatccaagttcctaggtgccaaccaaggacgagtttacaaaaggcctttctaaggattgcagtatcagccctgctttcttaactcacttctgtacaacttacttttcatttatgatagtggaagttctgaccagggaatgagttgttgctgttggtagctcacttttccctcctgaaatttttagtgaatttctaagatgaaggaataagcaagagtaatcaatttaaaatctaccaattgagtcctctttggtgattgtcaaccactgaagtggcatgtgaggaaactgatgggtcctgctttgtctcaccaccagtcatttaaatagcgaaagtaccattgaggtgaatagaaagtgcatagttacaagcccaagtgttcatgctgtgtatatttcaaatacttttctatgagcttctctctctgtctctctctctctctctctttaaatccaaaataacagtgaggctgagatccatggaaatgaagtttagttatttgggaatttgagtaaagatttactgaacatagaaatttgtttttctttgagaatgaggatacatattgagtaagagccctgaattaagatactagagatccagattctccatttattagatcaacatattttacccagtagttgtttatccagtaaataagtctaataagttacccagtaaaaaagcttatccatagttaagtaatacatttagtgggtaaacttattggataaacagactatctgcttgtcatcttcrttccttaatttctttattagataattccttgcaatttttttcccacacaaaagggaagaaaaggcagtttaagctctgtaaaagaatagtactgtggaaactttaggtctaataatgattagttttgtttcattatgaatacaatgtaaaaaaaattgactatcatgagatctgttgttcttggcttaaaaaacagatcaaatagatgaaaacctgaagcaagctctgcagaaagacttaaacctcatggccccaggtctcactatacaggtaagttcttttcctagggaagttctctggggattttgagagctttgagtttgttcctcctttcattggattgttttattcagcaattatttgagatgctatggtgatttatagaatacctttctcaatttgactttagatctctgccaaaataaaatactcttgtagcttrctatgggtgacatttgtgaactcctagagggaactgataagctgaggctcttacaaggaagtaaaattcatatttctgccatgtatgaagcattaagatacagtaatggttataaatcagtgtaagcataatccctgccctcagtaagattatgaaaagggagttcaagtgtaaaatttgaacaatcctggacaaaatagttatcacaaagtattaattgacagatgaatctattgaatgattattgctgtaagagtaagagaacattggaagacagtgtgtctaggagagggctgtgattgagttgagattttaagtaggtttggaaaaattaattggatttaaatgggggaagaatgagaaaggtatttcaagtgggagggacagccctagtaaaaacaaggtagcaggtgaatttagtggtagtggtgatggtgacgttgggaaatagaatggtgagaggttttacccctgcttttttttgggtcactgtgttttccagattgtgggttgtaaaatcaactttagtgagtcatgaacagcattttaaataaaatggaatagaataggaaaagaaatggyatgtaataagtttaaatattctgtgacacttgtgtttcacagtgtggcggggtaggtgtttatattggacgtcagtgcaaaatgtgtttcttactgtgtccactgtcagtaacattcgaaagccactgctctggatccagatgacctaagaagttatattgaggcttctctagtgtcctttctcaggagctctaggagaccagttgattgttgattgttgtgatgaacattactgcaactaaagcttatcacatgtctctcaattctttacactcagcaccactgctactgagagtgtgcgctcactgtgattgtatgtgttcgtgcttctcaaaaacaagactgaaagataggtggggttttcctcatggcctcattcatgcaatgtcattatctcaggcgcttgagggtgagccaccagagttaaggggtcgtttgaaatgtccagaggtaactttgtaaaatcctctgagttgttcaagtcagttgtagctggagtagctttttagttttaaagatagtgaatgtgaaggtcagctcttagattctgcccagggtgttactcagagatctagctcattcaactgttgtttagaattccttgccttatattacttagccatttttctgttcccagttttttgctattaaacaatagtgtaatgaacattcatgacacatgttcttgtatgtacaaattatctttcaaactgactgtacaaatgtacattcttaacagcaatatgtgcaaataattgtgacccatgaactcaccaacattggaagcaatcagacatactgattgttaccatatggatgggtgggcaattatatctccctttgatttgcattcctttggttgttaatgaggttgaacatcttttgatacatttattggtcatttatactgtcttctgctgattgcctattcatatcttttgcccatttttctgttggattgttttctttcttactgatttgttctgtataaatttggaatttttatacacacacgttatttatgttgtagaaaaaagttagatactaggaaaatgatgaagaataaaatgaaattcaccagtaatcttattatgcagggataacatcatttgttatatctttctcgactattcttaatgtatatgaacaaatgtttgtagatataaatgcatacatgctcaactaaagcagaatcataccatacttgcttttttcactaacattgtctatgaacatctttccaaaacaaaaatataggtttggtaaatcattacttttaatggttatatttagtgaatctctatggtttcaaattttttactactgtatgcatgttggaatgaccaagcttatatattctgtacatctttttaaatccctctcttacaataaattcttgaagtgggattgatgatcaaagtgtatgccctgtttgggggcttattgatacatactaccgaatcaccttttagaaaaattttagcagctccccccctcattagcagtgttggtaagctgtagttcttacacatttgattgcatgattgtacccaaataattagcagatgcaagctttccctttctctcttaatccttttggagaaaattagtctgttattttgtgttaattattgaagttgaataccctaggttattagctgtttttatttcatttataaattgttggttttgctcatttttgtagttaatggtttttctaactgattttaataagctatttttggctgggcatagcggctcacatctgtaatcccaccactttaggaggctgaggtggaaagctcccttgagcccaggagtttgaggtcagcttggacaacatagtgagaccccttctccacaaaaaatttttttaaaaaattaggtaggtgtggtggcatgtgcctgtagtcccagctacttgggaggctgaggtgggaggatgacttgaacacagcaggttgaggctgcagtgaactgtgttcatgctgtactcttgtctgggcaacagagcaaaacccwgtctataaataaataaataaatagcatttgtatatagagaacttgtttttgaaccttaccctttgagaggggtagaattcgtttttaaaaataaactttttcatatgttagttattgtagctcttttttatatttataggaaacattttcttcaaattttttctttgtcatttaactttgttttttccttgctgataactttgaagtgttcatgttttacatagtaatttcagtgattttgtctttatrgtgtgttgctgagctggcatgttttaagagcttttcaccaccttaaaagtatagcaattaaaattagaaattataaaaattgtatctgcttttacagttgtattcttagatttaaatcttttaattcatctgcaacccattttgatctcagttgcaaggtaggccttcagctccatcccctcaaccccaaattgggtaacagcggtaattactgaatagtttatttttccatcttcccccttctttgaaatagtttttatgttacatactgcattccattatatactagagtctttttctgaacttagttctgttccattgatcttcccattcctactctttcattagttattgagtccttggtcttttctcatcaaatcgaattttctcctgtgtttttcatcttgtcagttaatggtaactctttcccctcaagccaatctagaagtgtaggaggcatctttgacaatcgcctcaccctcagcatctaatcagtccctatgtcctgcagattccaccaccaaaatccaygtattaataaaactgaccacacctccatcttcactgtcatctcaagccaagctaccaactctaaccttgacatgtgcagtagcagtagccgcctgtcttctttccccactttcacttttacctttgtctacttcattttctgcacaacagccagaaggatcttttgaatttacttatatttatttgctgtttttataaaaagttattgattgaaaaaatgtagttttgttatacgttcttaaagtggtagagatctccattgttttagggtttaaaaaaattttaaaataatttttatattttgcaataacttaagcataccctgagaagagaagagctcctttgctttggttgcttttgtcttgttataaaattttttttacaatagttggaatgcattttaagaatttcaaggctgtttttgagctttgttatttttaacacattaccatatggttgtgataattcaactttttattttaaaatctggcaagagacatcatcttttaaaaaataatggcctttgctgtttctgccagcttaatcttccagatgagttttcattatcgatattttcaagctatatcaggcacctaagtggtcatatacatgttgttttgttttgttttgttttgagacagggtctccctctgttgcccaggctggagtgcagtggcatgatcataggtcactgcagccttgaactcctgggctcaagtgattctcctgccttagcctcccaagtagctaggagtacaggtacacacccccacatctggctaatttttttattttttgtagagatgggcctttgccgtgttgcccaggctggtctcaaactcctggcctcatgcaatcctccaatataagttaaaaatagaaacatagtttatggctttactttatcatatcagcctttttggtttttagaatttctgatttaggggagaaactcatatcctaagttaaattaataccaatggatttaatgaattttaatgctgttcaatatgtagtcttttttttttttaatcattgaggaatgtgattgattcttggtagatttatcttatatctacaacttgaattcactgccttctagtaatttttgggttactatttttacagtcactattatatttttttcctttccatatatttatataccatttttcttcttgaaaaactactctggcaaattagaatgatgaaaatggtcatctttgattttttttttcctatgttatttaagggagtgactatattatagactggcttttgatatataatatatgcttaaaacccaggggtcagtttcaatacatatattcctttcattagccatttttttcctccattcactctatgtatgtgagtgggatgggggcattattttattatttgaggttaagagcagaggtttaataggcaaaagaaacagaaaggagaatagctctctctcctgtgagggagaggggtgcctgagtgggacttcccacttttacttttaaaatctcttttgatgcaacttactcatggtatctgtacagtaagtgtttatgttttcacatatttgaaaatctgtgagatttcccaagattggcaagcacaatgtagtatgttcttcagcctcattcagcaaaataggagtcttcaaaagacagtcctggccgagtgtggtggctcacgcctgtaatcccagcactttgggaggccgaggtggttggatcacctgagttcaggagttcgagaccagcttgaccaacacagtgaaaccctgtctctactaaaaaacaatacaaaaattagtcgggcttggtggcgcatgcctgtaatcccagcaactaaggaggctgaggcagaagaatcgcttgaacctgggaggcggaggttgcagtgaactgagattgcaccaccgcactccagcctgggtaacaagagcaaaactccatctcaaaaaaaaaaaaaaaagtcctactttacgcttcttttaataaggctaaaaagatatgtggccagtctcttaattaaatgcagtatgacagtgcttccttgaatcatattaatccatattggaagtaatcttatgtctgctagtcacatggtgaaatctgacatctcacaaaatctggtcctgaatttttatttgtcttctgcatgtctccactgagttgtgaggcctcacatgtgtcactgccagtgtgttgtgagttttttccacacagccttcagctgcttattccattccactgtaatccttatatttagttatgattgtcctcaaaattacctacaaatttgactcatctatttcatataggaaatgctatatcgcttaaaagttttaaaagcctttaaagaagactaagtgcttaaaggctttgttattcttaaaaggttagccagttttcagaaggaaaacttcttcagaccagcaaagtgttttttgtgtgtgtttgcagtataggtggggcggcggggtatcgtatgtttagtaaaatcaaaagcttttgagagatcaagtccttgatgtagaaaagtcagccttcaaaaaacagtactgtccaggtagataatcttaattgtgtcaaagaacactatgattagggaaacaaagtgtctggtaaacagcctctacaaagacagactttgttctaagtgagagttaaggaagaaagaatataagcttttaattgatatttgttttccttcagccagtgggctgtttacttacagcaaataccaagtgattgcaggggttggaagtgatagattaatttactcactactcactgtattaaattgtatacaccaacctgggtttttttgtttgtttttgtatttgactaattgtttctgactttacaatttcagtcttggaactttgccttcccggcttctttggtttacagggttgaaaaagaaagcaaaagtatctaacgacctttgtaaaacatcttttaagtgagaacctttttcataaggcagttgtttcctcagtgggtagatggtttttcctgtaatctggcattgtgtaaggaaataagaagcagcttgtctttgattcttggtgtgatggcatgaaaagtaaatgttctggtgggatccccaaacgtgttagtaggccgctatattatagctgttgtttattagattagtatcatttgaggggcttttctgtagaagatttaatttgaagatttatctttcaaatatactttggctttttcacttttattttttaggctgtgcgtgttacaaaacccaaaatcccagaagccataagaagaaattttgagttaatgtgagtaatatgcatgggatcccaatatttctgtttagggctgtctgcatattaataytccagtctagaggaaacatgtgagacaatacactctggggtggagtatgtgtcttatcttctttactcttactctagtaatattgcctattcttgtgtcttaattcccactagactcttactagtgttctctttatgtatggacatttcaggagcagtttcagtggctaaagatgcagtttgctgtaaaactattgctggaagcttaagsagctataattttatatgaatagtaccttgaattaaatatttaatagaggaaagagtcctgaagccgttagggttgaagagagtgctcatattttgtttctgtgttgtaatggtaggaatagataccttgttggtataaagtttggttttccattgtatgtgattgtatatctaaaattagacctggttctttataatgtgcctctagggaagccttgcttctgttgactcctggtagtcttctcttttatgtatccagggctgactgggaatgagaagacatgaaattagtttctgacaggatcccttttaggggaatacttactgtgtttgaaatggcaatattgttttcgtatgactggtactgaaaagaagaaataaaagtctttaggaaatttggctgatgtgttaaaagggaaagtataagacgctggaaaaataaatttgcacaagtcaaggataccacagatgtataaatactggaagtccaaggagcagtaatactactttatgaggttgtttacttctgagtcctttttgttaccatgcagatttttattgtttttttcttcttttatattttccttttccctcataccttctctgagctcatacagagttttatttctctttttcttaatttttttttttttgagacaaggtcttgctctgttgcccagactgcagtgcagtggcacaatcacggctcactgcagtctcaacctcccaggctcaagtgattaagcgatcctcccacctcagcctcctgagtagttgggactaccagtgcatgccaccacacctagctaaattttgtatttttcatagagacggagttttgccctgttgcccagcctggtctcaaactcctgggctcaagcagtcctcctgccttggcctcccaaagtactgggattacaggcttgagtcaccacacccagcctgttttctctttttcattgtagacaaagaactcttcttttaaaagtataaaatgtagactgccaggctgggtagattatggatgtgatccacttattgaaaaaatatttataggcgggctgtggtggcttatgcctataatcatagcacttcaggaggctgaggccggcggatcacctgagttcaagagtttgagaccagcctggccaacatggtgaaaccctgtctccagtaaaaatagaaaaattagctggacatggtggcaggcacctataatcccagctactggggaggctgaggtaggagagtcgcttcaaccggggaggtagaggttgcagtgagccgagaccacgccattgcactccaacctgggcaaaagaacgaaactctgtctcaaaaagaaaattttattaaactgtcagcatgtcttaggctttaaatatgattgcttaggctgggtgcggtggctcatgcctgtaatcccagcacttttgggaggccaaggtgggcggatcacgaggtcaggagatcgagaccatcctagctaacacaatgaaaccccgtctctactaaaaatacaaaaaattagccaggcatggtggtgggcgcctgtagtcccagctactcgggaggctgaggcaggagaatggcgtgaactcaggaggcraagcttgcagtgagtcgagatagtgccactgcactccagcctgggtgacagagtgagactccatctcaaaaaaaaaaaaaaaaaaagattgcttctggtgacggaaaaatgaatattgtgtgttttctgctctcaaataaatcatagtattcagactgtcatttgatgtctttatcaatgttatcagaggaaaggggaaactttgaggggaagtgttttggggaaactattggagttacttttcagatgattctggatctttcttaattttatggactattggaattccagaattaaaagctaccttgggatgatccagtataaccttgcacctgatagtagtgttttcttataccatttctgccacgtggttacccagtagctacttgtacatgcttagtaatatgccagccatttccattacaggtttagtaccccttatccgaaatgcttgggaccagaagtattttaaattttggatttgtaaagattctggaatatttgcatagacataatgagatatctcagggatgggacccaggtctaaatataaaatttatttatgttcttccttgttggtatagtggttagttttttttttttaaggtattttatttatgtcccatatacacctatagcctgaaggtaactttataaaatattttaaataattttgtgcatgaaacaaagtttaccttaagtgcttatgtgtggaattttccacttgtgtcataatgtgggctctcaaaaagtttcagattttggagcattttggatttcaaattttcagatcagaaatgctcaacctgtrttagacactggaagccttagaaaattctccttactgtaagccccagtttactacctaataactaccacctagttatatcttctgtgcaacaaatayggtcactgcrcatgggtgcccacctgaggagggcaggggctgaaacccagcttcattctgcatgtcaaaccatgcacctgcaggactgtagaaacggctggtgccgttttctaattggcacagagctgctgtatggactagctggaggtctaacagcaaaggaagtattgatatattcccttccaaatcacaggctttacacaatacaactaggagaagaaagccaaactaaaattcaaatgtactaartttttttcctatctctgggtgactttgggcaaatcattgaatctttcaacctcagatttattataagtaaaataaagtaacacctctcttaacctaccttaatgggtccaaaagctcatgttgacaaaacggttctctgactcactgtagggtcagaattactggctgtgactgcacataggagaatcatttctaatttttataacattttgcttcacagggaggctgagaagacaaaactccttatagctgcacagaaacaaaaggttgtggaaaaagaagctgagacagagaggaaaaaggcagttataggtacttggatttctctgaaatgattgtctctaagtacatttgtttgtcctgttctttgtcagtctcattttgggtatcatgggactcagtaagattgcatcataggtagtggggaattctggaatctccactgtacattcagatgttctaaagcctttaaaagtaggtgagaccagtacttaatgatgtgctgtggctgtccatcatgttgttagatgctactgttgtctctttcaagaacagggagaatggatagggtttataggcagcttgagtctgtggatagcattttcatttgtacagattaagaatagggaagttttttgaccaaagtttcagrttgtagtatgcatccttgttgttgacatgcacttagttttacctggataggtagtgccgtttatgaaagcatggcaggattgtttacagttcatttcagattacagtggcttcccttatactccaggtcactgtgtattagattgccctctttggccctcggttgatgctgaaagtttaatacrtctttaattaaataattcaattatagaggaatgtacagagaacaatataatgaaagcttaagattttgccttattcccttcagatcttttttttttttttttaagaaaaaaattaaatatctgtttgaagcctcctttgtatgttcactggtcctactctttgacttttcttctcagattaacttctattctgaagttgatgtatatcctttctgtccatatttttatacttttactgtaagtgtgtaagagtttataaaattgttttacctgtttgaaactacaaaaatgttaccaaactcttattttacaacttgccttattttcactaacattgagttttattcatattgatacatgtagatctagggattttttctttttttggcattttatccttattctctgtgagatggtagatcgtttatgtttagctgctacatttttcgttctatgagcgggcctagttttattgtaatgaattaccaatgaggagttaggtagtttctagtttttccttattacaaacactgccacaataacattcttatccagtgcctcctggatacagtgtacatgtgcaggtttccatagagtagcattactcagtgtatggtgtgggccagtgccctatcaccagctttttgtttctgagcctcaatgagatgagtatagaaattgagaatgagtgtttagaagtttttatagcattttaatacagcagttttatgtctgttgaatcaaaaataaaaaatcagagcttatatatttatgtttttgttttttaatttcttttttctagtactgtaatttgtttttgttatagtttacaatttattggttcctcataaattgaaatacacacacaaaaaggtaaggtayttttccacaggtrgtttgagaagcactgctctagaatagctatctcaaagtagaattgatgggtcatagggtagcatgtcttcacattcaacatattgacaaattgctctctcaagtacttctttgattttaccatctcttcaacaatatttgatatccagtttctatgctgccatatttgaattcccatttccacacatccttcttggtccttggagttatcagacttaaaactttatgtctgtttaatggaagacatggtatcacataatttcaatttgaatttccctgattgttagtaaagttgaatattgcttattggtcattcaagtttccttttttgttgttgttatatgaattgcctgttaatgtccttagcccattatttgattgcttttttgagttgatttgtaagagtcctttctgtctcctggatactgatcctttttcagatttatgcatttccaacatctttcaatttgtggcttgtctttgaactttacaatgtcttcgatatacatatatgtgtagtttttgtgtagacaaattcattagtcttttcctttatgttttgtgcttttcctatcttaagaattctttccctagtccaaagtaagacttttattctaaaagttttaaagttttgcttttcatatttaagtctttagcccatctagaatttattttggtgttgagtatgacatagggattcagtttaattttttcaagtggcaagccaattgtctcagactgtttattgaatagtttattatttcctctacttatttctaatgccatatccatcatataataagatactatacataatttattctgatgccataatctattattttccaattttttggtctctccttcctcaatattaatttgttttaattattgtagcttttatgttaagtcttgcgatgtggagagtgagttgtgtaactatttctcttacctgttaactattcctaactatatttaaaattatcctggactattctaggccctttattcatccacatgaattttagaaccagctccttaagttttgtgaaatattgtgttgggattttgattggaattgcattgaatgtatgcatcaatttggagaaaattatgatattgagtcttataaatctgtttctccatttaggagagttgtcttttaaaaagtgtcataattttcttctaaagttcttgcacatttattaaagatttgttcttatatacctttatttttttattgacttttttaaaggcacattttctaatgggttttgtataagtatgctgttgatttttttatttagcaatattgctgaagatgctcttatttctaatagtcgcttagatttcccatgaacaatcatatggtcttcagacaataggtccttatcttcacataaggacaattttatttttcttctaagtcacatactttttatttcttcctgtcttactgctttaggctatgacttctaagtacagtgtagaaaagaaagtgacaagtattcttgtccttaactttaaatagtcccagtgacatttgctgtacttaacactggttaataaagtttcaatctgtactttgcttgctgagagctttcattttgaatggctgttaaaactttcagaatttttttgagacagggtctcgctttgccacccaggctggagtacagtggtgtaatcacagttcactgcagcctcagcctcctaggcttaagttattttcccacctcagcctctcgagtagctgagactacaagtgcacgccaccacacccaggtaatttttgtattttctgtagagacagggtttcaccatgttgcccaggctggtcttgaattcctgagttcaagtgatccacctgcctcagtcttccaaagtgctaggattacaggtgtgagccactgtgcccagtctgaaaattttttctacatatattgagatgtttttaaagctgttaatatggtaaattatattaacagatttatctttgtgtttctgggacaaacaatccacttggtcattatataggtcattatatacatttttatatagtttgctgataatttctttagaatttttacctttattttcataaatgagatcagcttataattttcttatacttttagtgttaggtttttttgtatcatggttatactatccccaagatgagttgaagagcatggcttccttttctgtgttctattgtatatcacatcattatgtatcagatctgtataatttcatctttgtaggtctggtggaactcgtaaaagccatcttagtcttgtgaggtttctgctttttttcatttgctttttgtggtaacagttaatctattgatttaattcctgtattgagtataggtatattcagatacatgttttctttttaagccagttttggtaattatattttcatagaaaattgttcatttcatctgatatttcaaattttggggcataaatttgttcgtagaattctctcatgatttttaaaacctctaccaaatctgtgtgccccttttcattgctaatactgttttcttgtgccttttcttttgctgtatcaattttgccagaggtctgttttattttatttatcttttcagagaattggcttttgttttggttttgttgattgttactttgtttaaattatattatttacactttttaaaaaatatttccttccatcttttttttttttttagttcatttgttcttttttaacttcttgagttggatagttaagtttaagtcttttctagtggaaacatggaagattataaattttcttctaaggattgctttagctatgtttcacaggttttgaaatgtactttgtatattggtgttcagttttaattctwaaccttttccttctaatttcttctttggctcatgaattattaaaagtatatgcttcaatttctggtttagtgggttttgaggggctacctttttattgttgatttccagtgttactacattgtagtcagaaaataagacctgttatatggattcttaaatatttattgaaaattgctttgtggcctacctgtacacggtccttttttgtaaatgtctgtgtgcttgaaaagattgaatctgtgttctctggttgttggatgcaggtttctttatatactcatttggtcaggcttatgaattgtgttgttcacatcttctgtattcttctaatttttgccttcttgacctatcaattactgagaaggatgtgttaaaatttcccactatgaccatgggtttgttgacttgtaatttttttctttatatattttgggactatatcattaagaacattcaggttcaggattgttatatctccctggagaattgcttctgttttgtaataatctttatccctagatatgtttttaacttaagagctattttgcctgataatatagctataccagatttttcttggttagttattttcttggtgtaccttttcccattcttttactttcaacttttctatgtcattatgttttaggtgtgtctcttgtaaacagcatatagctggattttgtaatcttatccaatgtgagaatctgtcttttaactggtgagtttagtctttttatatttattgtggttactgctatatttggatgtgtttgtatcatttgattatgtgctatttaccatgcatttttctctgcttctttttcccttttctgattggtattgaattgattgaattttcttttcttttcttccttttacttgattggaagttttacattccattgctggaatgtataactagttgttaatcattctatcctcttcttgaacagtaccttagaatgctttaactcttatcactgtcctccagtcttacattttattattgcgtagtattttagtttcatgttgtctttatcctcccatcaattatgatcattatgattaatccttacagtaaacacttattttgattgacatgtgttgagtaatgttttttcctctccattgtttctggtgattttttttttctagtaatttttttttcagtgaagactaaggagtgaaagttatcttcggtcctccttggtctgaaaatgcttttattttatccttgaatggtaatttagcctacaattctaaaccaagctaatttttccttatcaatatggcagtattatttcaattttgtttggctgcttgcacctatttacaagtatgttgttagtccagttgttccttttgagtaatcagcctttcttctctttttgcttttaacatgtttctgtctgtatttgggtgttcttcagtttcactgtgatgtggctaggtagagaagaggttacttcttaactgggctggttggtagagtgttttagttcccctttcattagagttgcagccctctagaggtctcagttttatgcaagggtcttagtcctaatatcacaaggcctcatctcctggtcttgcatgggtaaaaacccaggtcccactcccttcttgtctaataaccaccccagggacaccaccatacaggctctcggctcccccttggcttaagttacttgaggatctctcattctttcttacaactcagccatgcattaaaaaacaaatttgctatatttcatctagcattttaagaggttgttagctaaagggttttctctctggccttttggccttttgcaccatttttctagaagtctggtcgtgctttttattgatttattcccacatgacagagctttgttgaatgagattaccacaacagtccccctatgttgaggtaacatcctttgggttctagctgcaggcttcagatccctcaccttttattcatgttttatcttgagtttctgcttacagttcaatttctagccccattgaacatagtagtttagtttttggatggtgtaatatagattgattttacattggtggagaaagagggaattatctcctggagyagttcgtaaagcatactgttttatggaaagaaaaaaatcacttggaagttttctttccattatgtactttttctaggggtcagagataagatgtcctaaaatacccatcttctttgactgaaaaggagaattgagaatgttctttaagaatagcagtgattgaatgtaaagtgtaattcaagtctttcttccttgtcctgggtcatttgggtaggccagaggtttattaagggtgttgagtttcctctgcatgtacttgcttgccacaccaacatgttcactcccaatgcttgttttcaccttctcaaatgaatcaccctgctttctgctttatttccctacagcagttggaatactcctcttctgataccattttcatcctgtcatttccctaatggtaacttaacagtagatcctgagtatagtaaaactaagctccttagcctgtcactcaagacagaggtctcctagccctctttctcttcttattttwtgttgtcttcgcttgttggctggttccatatcacctctccattgtgacttgttcatttgtgccttcttgtctttcttttttttgtttttgtttttgtttttgaggcagggcctcactctgtcacgctggctggagtgcagtggcatgatcatggctcactgtagccttgacctcccaggctcaagagatcctcttgcctcagcctcctgtgtagctgggactataggcacgcaccatcatgcttggctaattttataaattttttctagagatggaggtctcactgtgttgcttaagctggtcttgaactcttgggcttaagagatcctcctgcctcagcctcccaaagtgctggggttacaggcgtgaatcaccatgactggcccttcttgtctttctctgtgcttcctggcatgtcttcttaggtcatatccattatttcctttaagattacttccagaaggtcttccttggtttaacttatgtcactcattctttctttctcctgccacattaattgtcctgtgttgccatgcatttatgttgctctgtttttgttctgtggtactttcataaagtatctttttttcccattagcttgtggaccgttgctacagagttgcatgaaggactggcactttaacctttttttactccttcttcccacaaaactagcactgtcaaaatagaacagtaaattaggaaataaattcccttttttcctttgagtagtttacagtctgactagataaaacttagtgaaacaattagcacataaaactttctgtaattaaatgttagactgtgtgctgctggttcgaagtgcctcaggtactgtagaaatggttttgaatgtgtcttcttatgttgtatgattatagaagcagagaagattgcacaagtggcaaaaattcggtttcagcagaaagtgatggaaaaagaaactgaaaagcgcatttctgaaatcgaaggtacattgtggggagaggatgaagctctgcctgtcccgaactgcctcctctctgctccagggttcaggcctttgattgtggtgggtgagaaggccatagacagaataatctggtctggaggaaatagctggcctgatagtctaaataaatttttttaaattgctatcacatttccagcttttgggtttgtttgtgactgtgggtagctcagctttccttttcttccttaaattggggcttattagctaccactttattttcaggcagacaagrtatgaaaattacccataatcaatagtaaagaatatacaagataataaaccccatctctggccgggcgccgtggctcacgcctgtaatcccagcactttgggaggccgaggcgggcggatcacaaggtcaggagatcgagaccatcccggctaaaacggtgaaaccccgtctctactaaaaatacaaaaaattagccgggcgtggtggcgggcgcctgtagtcccagctacttgggaggctgaggcaggagaatggcgtgaaccygggaggcggagcttgcagtgagccgagatcccgccactgcactccagcctgggcgacagagcgagactccgtctcaaaaaataaaaaaaaaattaaaaawaaataaaccccatcacgaccagtttcttttccacctgtccaaaaaaaaaacaaaattaattggggggaaaaacagttttcatggagggcctcacactacttgatttcacatagtgagatgttgatgttcttagctcggtcttgaagtcacttgttatatattgctgcttcctgtctgtctctgttgactgattctggatgaaatttgkgggggggctggagacaatgcagtaaatagagcttttatgtctggacttattttacttgaagcttagtacctgggtggaatgtaaggctctgggtgataggaggtgggagagtgggtggaggagagaaggaacaacttagagtagaaaacaagtaggctcagatgagctgagagttatttgrcagtgaaaagagtattcctcgtagagaagttgctstttggggactgggacttgaaaactgctaataggtttttaaaactttcaatgtgaaataagcagtcacaatattaagcagtggggaaagggactcttaactagctgagggaatggattgacacctttcctttgtttatttgctagatgctgcattcctggcccgagagaaagcgaaagcagatgctgaatattatgctgcacacaaatatgccacctcaaacaaggtgactggctccctggccactttcctaatgatgcatttcggggttttgctttctcttttcaggagctctgatatgatagaagtgattttatccattgtcaagaaagtgtagtgaccaagacatcctccagaattagtcagttagcaagaaatatttcacattgattgggtagggacacaggccaaatgccgtaattccattcatttgtactgctatataaggctgaataattaattaagttgaaggtcttctgaaataagagtgacagaagagtaaagtctatttagaattgctttccaaataaggtagtttttttggtagatacttagcttgattagagcagtatttctcatcaaaggcattcctggcatttggggttgagatactttttcattgttgaagaccatctcatgcattgtaggatattttgtatccctggcccttgtctactgaatgtcagtagtggtcaccagttgttttaactgccacacacacatgcatgtatttccatatgccccttgttgagtactccttgtttattggatttaaaaaactattccagtcatgaggaatttcatgtgggataacttgagaaggcaggttgggtgatatataggtgataatttggtgtaaggactggggtaagctggctagacggtacagggctagtgagcaggggctatttaagaggcagctagaactccgatagtattctgagaagggaagggtatgtccaagatttataaggttatcgtggagcagattggaacagataaagggttgagaaagagattactaaagtggatgatgcagtttgaaggattagagtcaagttttaagatatagacagggcttttaatttagaaaggaacaacataatccgtatttagaagaaatgataagatgatagaatgagagttgtcagtactttgaaaaccaatataaattttaaaatgaacataacattgaaagacacagttctatagacacagaatggaatttggccaaaagaaaggcatgacaggaaactccagttgaggaaactaggagtccaaatctaatgggagaagctcgtcaggcacaagtttcaagaccttgccattgaggtctaccttattcagaaaggggcagtagttttatgccattttgaaaaatgtgactcagatactaacctatattaaaaaggcttgaggaagaaatgtggttgtgcactatgaccagatttgattggagtgtttcgacagaggatatgaatcacctggagaagatagagatccaaagagtgaaagatgtcaaagtgtagaaaataaatgctgtaggactgtgaaggacaagatggacttttgcctgggggacaggccaggactcaagataaggagaggatcacagagcagggtctgaggggctttgaaaggcatatgttacagggaacagtggaaatgggttttaatcaaatccagatagattctggttagatacatcttggcatcctgatttagacaaaacaaaacagtgtgacagagggagatctggtggtcgacgagttttaatcaaacccagataggttctggttagatacatcttggcatcctgatttaaacaaaacactgtcacatagatctggtggtcgacaaacatctgtctgtcacaagcagcttaaacatccagcttctggggaaaggcagaaggccagatcaggtgacaacttgagattttattctagttctagaatttgttcaagaaaagcagaatcacagctaatgataagataatgagcaccagcccttcctttgaagttctgctctcatccactgacctgtgtatctctctcaagagaatcaacagagaaccaggcatgatggctcattcctgtagcctccctggaggctaagatgagagtatctcttgagcccagaagtttgaggctgcagcagcgagctataattgaaccactgtattccagcctgggcaacagagtgagatctcatctccagaaaaaaaaaaggctgggtgcagtggctcacatctttgattccgacactttgggaggccaaggtaggaggattgcttgaggccaggagtttgagaccagcctggcaacatagaccccatctctacaaaaataaaaataatttttttagaaaagagaatcaacagaaactccagaccaattccaggttgaattcaactagatgaaatgaaagtcactttagaaatattagttattatcattagttatcacaaattgttttccaactcccccatccttttattaaaaagtgaacagcttctcttgcattaagtcaggagcttaatgaaggaattttaagtcaggaacgcagctgttaatgtgatagccactctccaaagtgagagagggtcattggcagttattcagacttgactcatgatactcaggagancaataggtgaaatgtatatagggagagagaagactgttgcaccagagtattctgatgcctttgctcttgtttgctcccacacagcacaagttgaccccggaatatctggagctcaaaaagtaccaggccrttgcttctaacagtaagatctattttggcagcaacatccctaacatgttcgtggactcctcatgtgctttgaaatattcagatattaggactggaagagaaagctcactcccctctaaggaggctcttgaaccctctggagagaacgtcatccaaaacaaagagagcacaggttgatgcaagaggtggaaatgttctccatatcaagatgtggcccaaggggttaagtgggaacaatcattatacggactcttcagatttacagagaacttacacttcatctgttccacctctcctgcgatagtcctgggtgctccactgattggaggatagagccagctgtctgacacacaaatggtcttttcagccacagtcttatcaagtatcctrtatgtattcctttctaaactgctactcatgaatgaggaaagtctgatgctaagatactgcctgcactggaatgttaaacactaaatatataacaagctgtgttttcctaagctgagatctgttgaataatgtttacattcgtcccccggggaaatgtmtgctcagccaccattcaagagatgactgagaaggagatggtaagttcaagaagactgattgcacctgggacccaggccctttctttgggatccagtcccagccttcatccatgtgattaagatccaggccgctgaagttccccaggaaatgatcttccacttgagcaaccttttacttgatacgatttgcacctttctgttttcctgcagtcagggtggtggcctgcagggacctgagctttgctacccaaccagattcctcatagagattcctaatcactagtttcttgtattcataaactcagagatacagagggcttggtttgaagttggggtgagatgaaacctttgctctgagccaaagctctggggccytgcattccctgcattgggttgatgactgtcagcatcactgccgcaggccatgcttgactaaggtacctggttttagccacagccacctccttgtatgttacctttcagctctggccaagagtgggacagggttttaaccacaaataggagcagcatgcaattcctagtgacttgctgcacagtattgtatcataattacaggaagtttttatttttaaaactggatctggggtatattcatttgccccatcacctctgtctaaaggcccaagtcctagggctgccatggtcacaagcacactgatgctccttaagattgtttatctggagcccacatagtgtggaacaaaaagtcacctagaaagcatccttggtcatcattgtctccttcccacctggcccagagatgcttaaatccaagttgtttctccagctgtcacctcccccaggagatcaggattccactgacgtcctgggcagccagtgaatttaattttccatgagaaacaacagagttaacctgtggcattaggagacctacttcatgtggaccctttttttccttcagtttaacttttctggagcagtgtgctgcgtagttcggcctgagtttgtgcagcttgttaagacaactcttgtgtacgctatgttgaagctcaacaaaaaagtcatgggaccacttctagaaatctttcagctgtcaggcctgtcagtctcatgacagtttgttggttgtgccaaacactttatttgggaaaggaaagcccagatttgaatgggtctttcccctgggccttatcctatagaggcatttgtaatatggagaaaataatttttcatttttgctcatttaattctataaattctctttataaatgaattttgtgttctttagttctccttaaaagaacttttgaattataaaaataaaatctttacctgtcgaattgttgctgcagatgattgttgtggaaaatctggatcattgacctctgtgctttcattcctagagatgttttatagttacatgagcaaaagctgttgccccaaagtgatggccctggaggcggggctgaggaacagggaaatgccgctgtgaagtcttaaagcacttctgcttaaactccatgtgtgaggagtgtgcctccctgtgccctctcagctctgaggctggccgtctttcggggtgttccttttggcaaatatacactgtaatcttgagtctaaatttatatgttgaaatgctaccttttttaaaataagaaactaaataaaattattttactatcagtgatttgtgtttttttttcccacgtcttcatttttctgtcatcttaacatgctcctaaggctgtcttgcacatttcaactagggagccagtttatttgcgggtttaacttaactgtagaggcttttgttatactcttgccagaatactgcctacctggtataagaatgtttaaaacaaggtgtccactctttgctgactcctggaatttaacaaggggtgttcttctaatcctttgtgggacagggcctgtggcagaggggcaaggagggaggatggagcatcaggccactgggatccgtccctgagagcaaaagtacttctgcactgaggaggggaggagacagaccaagccagagaaggacaatttgtgtaaattataactggtaatgtaatggcacaatataaccaacttgactattaagatgttagcggcccaagagccagagttggacctgctcttcccaaacgttctgtatttcctcctgggatcaatttcctggtgatcttgggccagcagggagtggtaatgggagttgtggggaaagcagctctttcctcctgttcttatgggatcaaccccatagtatcctaggtcagttgctgtggacctgagaataatttgaactgaccatcctataggttattggtaggtattaaaatgaagtgatttctgcctcttctgtggcaaaagaatttgtgaattagaagccgtggcttctaatcgctttaggattaagtctcaaatgtgtacacacgaagttcgtgatctggcccctgctgtcctctccagccacccttctctaaggtccctgaatgcaccttctgtctgtcccttctcatacgttgttccatctgcctggttcactttccttccctcgtagtgctgactttcctcagccaactcctgagtcttcatcacttcttcagatgtaaaagcttcagttcactttgaactgcttggcctgggttagcatcctgtatttcccccccgtcacacatcatgcacacttcatgtctcattatgtgctcaatgtctgttttcacaaatgctaatctctctgagggcgggggcgggggctgtggctgtgctgttccctggggattgtttctgttgctaatgcctaagatggcatctggcccatatgagatggctttgttgcatgaaagaacaaaaagttgaatatgacatgcaggtaaatcaggcaagtgagtcatggaaaaaacttagaagtgagcctacagtgtccatgtcaggactttatgtgtaaccatgggaagttacctaacatctctgaacctgattactcatccttgcagggtgactcttcagtggattcaggaggatatgttgttgcatctagtgtagagattcgcacgtggtaattgctgggatgcattagttcaccttgtctacaggagtcagttgtctacaggagtcaatatatgtgtctgtctctgagtagctataagttcccatagtggagagagtgagcacagtgcctgctacctgcaattgcataatagaacacgtagattaatgtcttcaccagctatgagctaagctagctggatgttaaaccccaaccacagccctccaggagcatcccaacaagctgggccagcttctcatctttctcctggtctctgccctggtatgagcacttaaaatgaatttactgggccgggtgcagtggttcatgcctgtaatcccagcactttgggaggctgaggcggtcagatcatgaggtcaggagctcaagaccagcctgatcaacatggtgaaacctcatctctactaaaaatacaaaaattagctgggtgtggtggcacgtgcctataatccccagctactcaggaggctgaggcaggagaatcacttgaacctgggaggtggaggttgtagtgagctgagatcgagccactgcactccaggctgggcgacagagcaagactctgtctcaaaacaaacaaacaaaaaaaaacaaaaaatttactgttaattcattgctcactcctagtgtctattttgacatagactgtaatgcagaatgacgttttacttgtttcccttaccatatttcttctgaattagtacctgtctttccaatttttcttatttctttcaatcaatttttctactttttttttttttaattttaaaaaatgtcttcttccagtggggctcggtggctcacacctgtaatcccagcattttggaaggctaaggcgggcagatcaactgaggtcaggagtttgagaccagcctggctaacatggtgaaactctgtttctactaaaaatacacacaaaaaatagtctcctttctttcttcctataaatatttattgagtatctactgtaggctagttgctgaggcaacaaaaagccatatagccttgtgtgtgtgtgtaggatggggcaatacagcaagtaagtaggcaagtgtgatagtgtggtaagtaagcagggtgttcactgggtgctgtggggcaccagtaaagatcagcccagccttttggtttctaggaagcaatgtctgatctgagccaaatttttaaggatggacaggaggcagacagccagctgaagagagcagtggtgatggtggagtgtgttccaggcagtgggagaagcacttgctattgcatttcaaaatgcagtgccaggaggcatgagaggctgtccactgcaaaccttatgaggctctactattacttcatttcatagctgagatctagagagattacattactcaagatcccatgaatatgagtggcaaagtaaggatttgaacctgtcatattccagatccaagtttaccacagccctttatatttgcctttgaagccattaggtttagggtgatgaaagctctaaattgaggggagattttagaggatgtttatagagatttgtaagccctgcagtcgaggtcaggaaaagggataatgagatggttcatgtgtgaagtggtgacttatgggtgacttctctgccctctgcaggacttggcagaggtgctcttagtaagctgagcggtatgacagctgattccagaaagatcagccctttggagcctgggggagcagctccccttatttgggttacaaagcaagtggaggtgaacagtgcagggctgatggcacaacacccagatcctgtttgcagatgttaatcactcattctcctggttgctgggagtgttcatggtgacagcttttagcagagtcgctctgcagaaattttcctcggctaaagacccctgccccgggccaagatcacatccccttcctggggacagcacattccataagtggttgatgcaggggtagaaaggcaatttgttcaaaacaaaattgcattggttttctccatatgcaagtctgtcagggtgtgcatcctaataggcacaataactgtaactggatttcagacacctaaggcaggttctgacaaactgggtgtgtctgatgcctctggcgccctatcgcaattccactccaccccacctctaactccagctgtggccatggtagacagttccatgaggcatcaattcactttcctctgactgcatctcacctcacacatgagctgcacttactgcttttcaccctagggatcctccaacgctatggaggctgcagtcagtccaaacatatgctcaactcgagcacaagaattaatagcctctgggacaacccccaactggtaggagacaggaccacaaatggttagagaggaggtgacccaaaaaaaccttttcaatggagacagcaaccctcctgacacaagagaaactgtgaaaatcacattaaatacaattcgacagatgtttgttgagtacctgatatgtgccaggaaacctaaaatgtataaagtaatgggccagtaatgaacaacagtgagtcagacagacatagtctctgctctcttagaatcaacagtcttgggctgggcgtggtggctcacgcctgtaatcccagcactttcggaggcagaggcaggcggatcacaaggtcaggagttcgagaccagcctggccaatatggtgaaaccccatctctactaaaaatacaaaaattagccgggtgtggtggcatgtgcctgtagtcccagctacttggtaggctgaggcaggagaatcacttgaagccaggaggcagaggttgcagtgagctgagatcacgccactgcactccagcctgggggacagagtgagactccgtctcaaaaaaaaaaagaacagtctggtgggaaagtagaccgtaaccaaagcacttgagagacttatcaaagtgggaggaatgcagtgctaggagggtctcaaaaaagagggagaagataaagaatgaaaaagagcatccgccagttaaagatcggggaataacaactcaataaaaagacaacccaattttaaaatgggcaaaggatctcaacagacatttcttcagacaaggtatacaaatggccaataaaaacatgaaaaagggccgggcgcagtggctcaagcctgtaatcccagcactttgggaggccgaggctggcggatcacgaggtcagaagatcgaggccatcctggctaacacggtgaaaccccgtctctactaaaaatacaaaaaattagcccggcgtggtggcgggcacctgtagtcccagctacttgggaggctgaggcaggagaatggcgtgaacccaggaggcggagcttgcagtgagccgagatcgcgccaccgcactccagcctgggcgacagagcaagactccgtctcaaaaaaaaaaaaaaaaatgagaaagatggtcgacatctttagtcattagaggaatgcaacaagatagccacttcacacccactaggatggctataataagaaaggcagtaactagtgtgggcaaggaagtgaagcaattggaatctgcataatttgctggtaggaatgtaaaatgagggcactgccttagaaaacattttacagtttctcaaaatgttaaacagagttaacatacgatccagcaatctcacttctgggtatctacccaaaagaatgggaacatgtccacacgaagacttgcgctctatagcagcattatgcatagtagccagaaggtggacacaaccccagagtgtccatcacctgatgaatggataaatcagatgtggtctatccatgcaatggaatattctataaaaaaggaatgaagtactgatgcatgctacaacacgaataagccttgaaaacattaggctaagaggaagaagccaggttctagttacattaaatgttcatcatagacacatccctatggacgaaaagactggtggttgcctgaggctgggaggagagggaattgagtagctgctaatgggcacggcgtttcttcttggggtaatgaagagattttaaaatttgattttggtggtagttgcataattctgcatatactaaaaactattgaggctgggcacggtggctcacgcctgttatcccagcactttgggaggccgaggtgggcagatcatttgaggtcaggagtttgagactagcccagccaacatggtgaaatcctgtctctactaaaaatacaaaaaaaagtagctgggcctggtggcctccgcctgtaatcccagctactggaggaggctgaggcaggagaatcacttgaacccaggagacggaggttgcagtgagccaagatcgcacgtgccactgcactccagcctgggtgagagagcaagactccatctcaaaaaataaaaatttaaaaaataaaaaataaaaactactgaactgtatactttaaattataaattacatggcatatgaattatatctcaagctgtttttttttaaaggattgagtaatagtgtgaagacctcagttcaagaaccttccagaaatggtaaaaaaatattcaatataggtgcaacattattagtgagaatgagagcaccaaaacaggaggctgaagaggtgggtgtgagaagaggggaagggc

SEQ ID NO: 5737 - DNA, 47622 bp, Homo sapiens
aatcagtcttaccccttcttccaacccttttccttttccgtgcatgtattgatctattttttttttttttttgagatgaagtcttgctctgtcgcctgggctggagtgcagtggtgcgatcttagctcactgcaacctctgtttcctgggttcaagcgattctcctgcctcagcctcccgagtagttgagatttacaggtgcccaccaccatgccaggctaatttttgtatttttagtagagacggggtttcaccatgttggccaggctggtctcgaactcctgaccccaaatgatccacccacctcggcctcccaaagtgctgggattacaggtgtgagccaccgcacccagccatgttgatctatttttaaaaagtttttatttcctgttacactgtgttcagctatcttcagccaccttaaattcccatggatgagttttcataaactttttgaaaatagatttagatttacgggaaagttgcaaagataatacagaatttaatggatgagtttttttattgatgtgtaatagatgtatgtattttcagagtacaagtgataatttaatacatgtatataatgtgtaaatattaaatcaagagttattgggatgtccttcaccttaatatttatcttgtctttatgctaggaacattatttgaattattctcttttacctattttgaaatgtacaatagattaacattagctatagttactctactgatctatcataggtcttatttcttctgtatttgtgtccactaatcaaactcttcatcctcacgtccccaccacctttcctggcctctggtaaccaccaatctacctccatctccatgagatccacttttttagctcccacatgtgagtgagaacatgtaatatttgtcttttctgtgcttggcttagttcagttaacacaatcacctccagtttcatccatgttgctgagaatgacagaatttcattccttttatggctgaacaatattccattgtgtatatataccacattttctttacccattcatccattgatggacacttaggttgattccatattttagctattgtgaatagtgctgcaataaacatgagagtgcatatatctctttgatatattgatttcctttcttttggatacatacccagtagtggaatttgctggatcatattgtagttctatttttagtttttggaggaaactatacaattttccatagtggctgtactaatttacattcccaccaactgtgtacaagagttcctctttctctgcatccttgccagcatctgttaattcctgtcgtcttgataggaaattttaagtgggatgaggtgatatcttgttgtggctttgatttgcatttctctgatgattggtgatgttgagcattttttcttatagctgttggccatttgtatgtcttgagaaatgtctattttgatcttttgctccccccgctttgtttttttaagagatgagttctcattatgttgcccatgctggaatcaaactgggctcaaacagtcctcctgggactgggcatagtggctgaggcctgtaatcccagcactttgggaggctgagtaggtggaccatctgaggtcaggagttcaaggccagcctggccaacatagtgaaaccctatctctactaaaactacaaaaaattagccaggcatggtggtgagcacctgtaatcccagctacttgggaggctgaggcaggagaatcacctggaccccagaggtggaagttgcagtgagctgagactgtgccactgcactccaacctgggtgacagagtgagactccatctccccaccccctccccctcccccaaaaaaaccctcctgcttcagcctcctgagtagctgggactacaggcaagcaccaccacatatggctttgcccatttttagacaggattttttgtgggtttttttcgctattgagttgtttgagctccttgttatatttattctggttattaatctcttgtcagatggatagtttgcaaatattttcttccattctgtgggttgcctcttcactttgttgattgtttcctttgctgtgcagagctttttagtttgatataatcctattagtctatttttgcttttgttgcctgtgcttttgaagtcttatacaaaaaatttttgcccagatcaatatcttggaacatttctccagtattttcttctggtagcttcatagtttcatgtgttaggtttaagtctttatccattttgatgcgatttttgtatatggtgagagatagagttgagtttcattcttcagtatagggctatccagttctccaagaatcatttattgaagagactgtcctttcctcattgaatgttcttggcacctttgtacttttggtattgacataaaatgagttggctgtaaatgcatggatttatatatgttccattggtctatgtgtctatttttatgtcagtaccatactgattgggttaccatagctttgtagtagattttgaggttgggcagtatgatgccttcagctttgtgctttttgctcaggattgctttggctctttggggtcttttgtggttccatatagattttaggattgttttttctatttctatttctgtagagcagcagtccctaatctttttggcaccagggaccgcttttatggaagacaatttttccgtggacgcggggggatttttttttttaatggtatgaaccatatttattgaaaacattatttctggcctttctcaaattgaagactgcaaaaaataaaagcagtgctttattgagttgtcattaaccttgagagcagtggcgctgcctctccacgctctggggacggtggaaaccgtggctggtgcgtgccacatctatcacacctcggtctacaaaacagtcctgacgtcaaataaaactattgtggccgggcgcggtggctcacgtctgtaatcccagcactttgggatgccgaggcgggcggatcacgaggtcaaggaaatcgagaccatcctggctaacacggtgaaaactcgtctctactaaaaatacaaaaacaaaattagccaggcatggtggcgggtgcctgtagtcccagctactctggaggctgaggcaggagaatggcgtgaacccgggaggcggagcttgcagtgagcgtagatcgcgccactgcactgcagcctgggcgacagagcgagactcagtctcaaacaaaaacaaaaacaaaacaaaacaaaacaaaaaaaacaaacgctcgtacatgacatttacattagaaaaagagagctgaaagtagggatggggggatggtttggggatgaaactgttccacctcagatcatcaggcatcagattcttgtaaggtacgcagcgccgtagaaccctcgcatgtgcagttcacaatagggttccagcctctgtaagaatctgatgccaccactaatctgataggaagtgagctcaggcggttattctcacttgcccaccgctcgcctcctgctgtgcgtcctggtttctgatgggtactggtccatagcccgggggttggggatccttgctctatctagagaatgccatttgtattttgatggggattggactgaatctgtaaattgctttaggtagtgttgtcttttttctttctttcttttttttttttttgagacggagtctcgctctgttgcccaggctagaggctggagtgcagtggctggatctccgctcactgcaagctctgcctcgcgggttcatgccattctgctgcctcagccttccgagtacctgggactacaggcgcccgctaccacgcctggctaatttttttgtatttttaggagagacggggtttcaccgtgttagccaggaaggtctcgatctcctgacctcgtgatctgcccgcctaattcttctaatccataagcgtggaatatctttcctttttgtgtgtgtgtcctctttcatcagtattgtatagttttccttgtatagatctttcatttctttagttaaattgattcctacgtagtttatattctttgtagctgttgtaaatgagattgcttttttgatttctttttcagattgtttactgttggtgcatataaatgctactgatttttgtatgttgatttggtatcctgaaacttttactgaattcgtttattatttctaacagtctttttcgtggagtcttttgatttttcaatacgatgagtttttatgtcttacttttgtatcctcttctgggaattattacctgctcatgtttggcaaacttctactcttcttcaagattcagtcttgagtgctactcctgggcagtgctgtattatccaaagagtaggaaaaaatgcatgcttatgtgccagcaaagcagagccaccagttatgaggcaagaaacaaacaaaaaagaaggcttgtaggctgtgggaaaagccagaactttgtagttttgtttggttattgagacagggcttgctgtgtcacccaggctggagtgcagtggcaaggtaatagctcgctgaagcctccatctcctgggctcaagtgatctccccacctcagcctctggagtacctgggagtacaggcatacggccaccatgcccagctaacttttttttttttctttttaaatttgtagtagagacgaggtctggctatgttgcccaggttggccttgaactcctgttctcaagtgaacctcccgcctcagcctcccaaagtgctgggattacaggcatgagccactgtgcctggcctgtagttcttctttaatcttatgttttattaattttgaattatttagatgcccttgatgagtcttcctttccccgcagtcgtcaggaactctctcttgtttccatttccttacacacttgtttcctaccacttggcctgaacccttcaaaaaagtcaatattacaaaaactaaaaccaaataggtaggagggcttttgtagattaaaatagagacagaaccaaatgcaagtgtgaaacttgattgcatctgaatcaaaacaagccccaaatataaaatcagtttgtagggaaatatggagaactttaaatatggatgtatattaggtaatattattgaataattaatgttaattttcttagctgtgttaatagtattacggttatgtaggaggatatcctaatcttaggagataaatggagatgtattcctgttgtccgcactttattttattttattttttgacacggagtctcgctctgtcgcccaggctggagtgaagtggcgcgatctcggctcactgcaacttcctcctcctgggttcaagcgattcccctgcctcagcctcccgagtaactgggactgcaggtgcgtgccaccacgcccggctaattttttgtatttttagtagagagggggtttcaccgtgttagccaggatggtctggatctcccaaagtgctgggattacaggcgtgagccactgcgcccggcctgtactttactttcaaatgattgagtgagaatggaagggcttgggcactttgagagaaagagaacacaagcaaatttgccaacatgctgagacttactgaatcaaggtaatagccattattcttttaacttttttttttttaatttgagacggagtttcgctcttgttgtccaggctggagtgcaatggcgcgatcttgactcactgcaacccccgcctccctggttgaagcaattctccaccatgcccggctaatttttgtatttttagaagagacggggtttcaccatgttgcccaggctggtcttgaacgcccgacctcaagtgatccgcccgcctcagccttccaaagtgctgggattataggcgtgagcgtccacgcccggcctcttaactttttgataggttaaaaacttacaaaaaacgtggatagagggggtctgtcttgcccactagaccgatatggtgttggttaggttaggttaggttaggttaggttaggttagaacccgacattgtgctctgtacttcctagccattcattcgcttcaagtgctctgaaatttaatttaaaaaatcatagttggaatcctttcggtcactttctctttctcccttcgttcctccctttccctcttgattcttccttgaggcgcaaacacctgagagaggcttctgtccctcggcggtctccgtaagtaagtgaaccgttattggctggagggcgctgacgtctgattgttgcgcggtcgcatttttccggggaacgcggattcgcattcccaattttaggtggcagtcgcaacccrtactattcggacagatggcacagaaaccgctgcgcctgtgagtgaccgtgaatggaagcctctctccctgtgtctctttcgtgtgtgtaggtgacgacacgggcgggagtctttcccatgacgggaagggagaaggaaaaggcggagagacacggggctgctggggagcttaggtgatgtctttgcctggccggggctgacctcttttcctggcccttttcgcttctgagggggtttctcttggcgacgctcgttcggagaggcggaagctcccagagttaggcctcctccatcttagggggcagtcctggcctctgacacatcctttccccttcgtttctcctgaccccatttatttactcgccaaatagccattgggcccactgatgggccctgggcagtggtggacagagtagatagggacccttccctggggcattttttttttttttttttttttgcgaggaggaggggtgggggtggtggtgaagagagggcttcatgcagcaagtatttattgaagaactgcagtgtgccggacgctgtgctaggtgttgcaacagatggagttcctgctttaatggagcgtagagtctagaggaacaggtactaaagaatccagataatgggccgggcgcggtggctgaggcaggagaatcgcttgaacccgggaggcggaggttgctgtgagccgagatcgcgccactgcactccagcctgggcgacagaacgagactctcaaaacaaaacaaaacaaaacaaaacaaacaaaaaacaatacaaataatggccgggcgcggtggctsacgcctgtaatcctagcactttgggaggctgaggcgggcggatcacttgcggtcaggagttcgagaccagcctggccaacgtggtgacaccccgtctctactaatacaaaaaaaaaaaattagccaggcgtggtggcgcgtgcctgtaatcccagctacttgggaggctgaggcaggagaatcgcttgaacccggaggcggaggttgcacagtgagccgacactgcacctctgcactccagcctaggtaacagagtgagactccgtctaaaaaaaaaggaattcagataaatgtaaagttaccatagtgatagggccaggcgcagtggctcacgcctataatcccagcgactccggaggccaaggcaagagaatcacttgagtccaggaattcaagaccagcctgggcaatatagcaaggccccgtttctacaaaaaatacagaaaaaaaaaaaaattagccgggcgtggtggtcccagctaattgggaggctgaagcaggtggaccacctgagcctggggaggtcgatgctgcagtgagctgtgatcgtgctgctgatctccaggctgggtgacagattgaaaccctgtctcaaaaaaaaaaaaaaaaaattgcaatagtggtaacttttgggaagaaaatattcgtgaatctgggagagtgcataagaggggtatttggcttaatgataggagtcaagaaggcttcccgagaatgttaggattgagccttgggaaataagagtaatccattgcttaacagcagggttatgttctgagaaatgagttggtaggcgatttcgtcattgtgcgaacatctttgagtgtacttccagagacctagatggtatggcttcctgtacacytaggctaaatggtatagctgtacgtcaagttactgtactgaatactgtaggcaattgtaacacaatggtaagcatttttgtatttaaatatagaaagggtacagtgaaaacacctggcygggtgtggtggcttatgcctgtaatcccaacactttgggaggccgaggtgggtggatcacctgaggtcagaagttcaagaccagcctggccaacatggtgaaaccctgtgtctactaaacatacaaaaattagccgggtgtggtagcgggcgcctgtaatcccagctactcaagaggttgaggcaggagaatggcttgagcctgggaggcagaggttgcagtgagccgagatcgcaccactgcactccagcctgggcgacagagcgagactgtctcaaaaaaaaaaaaaaagaaaaagaaaaaaagaaaatactgtatacaggaaaaaaaaaaagggcacaacctgtgtaggacacttatcatgaatggagtttgcagaactgaaagtttctctgagtgagttagtaagaggtgagtgaatgtattactttacagtattgtagactttatgaatactgtacacttcacctatattaaatttattaaaatattattttcaacagtaaaccttagtttactgtaacttttactttataaactttaagtttttttacactttttgactcttgttataacacagctaagacataaaacacattgtacagctgtacaaaaatattttctttatatccttattctacaagcttttttctattactttttttttctttttaccttttaaactttttttttttttggagacagggtctcactgtcgcccaggctggagtgcaattgtgcaatcacggctcactgcaacctcaacctcctgggctcaagtgattctcccacttcagcctcctgagtagctgggactacaggcggaagctaccacacctggctaatttctgtattttttgtagagagggggttttgctatgttacccaggctggtcttgaactcctgggctcaagttaccctcctgcctcagcctcccaaagtgctgggattacagacgtgagccactgtgcctggctttaaacttgttttgttgcaaactaagacacacacacgagtctaggcctacacagggtcaggatcatcagtatcactgctgttcacctccatatcttgtcccactggaagggcttcagtagtaataacatgcatgaagctgtcatctcctatgataacagtgccctctggaatacttcctgaaggacctgcctgaggcttttttacagtcaactttttttttttttttttgaatacgtaggagtrtactctaaacagtaaagagcataccatactgaatatatttttttttttttgagatggagtcttgctctgttgcccaggctggagtgcagtgccrcgatctcagctcactgcaagctctgcctcgtgggttcatgctattctcccgcctcagcctcctgagtagctgggactacaggcgcccgccaccacgcccggctaattttttgtatttttagtagagatgaggtttcactgtgttaaccaggatggtctcgagctcctgaccttgtgatccgctcgccttggcctcccaaagtgctgggattacaggygtaagccaccgcacctggccatagcatgctaaatattatacataaaccagtaacatagttgtttattatcattatcaaatattgtatactgtacataactgtatgtgctacactttttataaccaccagcccagtaggtttataccagcattaccacaaacaaatgagtaatatattgcactatgatgttacaaatggctagacatcactaggcgataggaattttttagttccattataatcttatgggaccaccattacatatgtggtcccttgttgaccgaaacattgttatgtggcacrtaactgtattcttgtctttaacctaaaaaggttattgaaatgcttaagaacgctttggcatgatcaaattttcattttggaaagcagttctgtctgcaatgtggagaacaaatcagagccaaagtagagaacagctgggattaggtagagtgatgacagaggaatagtttagggattcagggtttattaaggaagtaaaatcaacaaggcttgtgatggtttaattgtgagtgaaaaggagctggccttgttgggtcatagatttctatctttattcagtgggatagagaacagtggaaaagggcccagatgaggagatgaggcacctggtgatgtataaactggacagtggatctcccagagacaatggtaattccgtgtgacaactgctgtgatggaagaaatgcaggctcctatgggaacactagaaattggtaactgataggtactagaaggcttcctagaggaggtggtgctcaaaatataaataaaagtcatattagtttatgacaaagctttctctgaaatgctgtaatgtggttttctgagtttttgagaaggtaatgacttctgagccagccaggaaggcttcagaaatgtgctaaaccttgaaggatgggaaaaacttggatttaggatgggtagggtggaactaccctagggaatgacagaggcagagagtaatcaaattgccagttcagttaagaaaacttggagaaagtactagaaagatgacaggtcagggcctgtggaaagctgtggttctataggcagtggggaacctcttaatgttttgaggaaagaacattaaactgactactttctgtaggatggacaggaggaagagaaggcattagaggaaacataaatgtattctctactttgaatctaacactagatgcattgtatttttgtctgattcttcctctgccataggaagggggtgaggtggggtggagtggagtggaggttgcagtgagccaaggtcgtgccactgcactttagcctgggtgacagagtgagaccctgtctcagaaaaagaaaaaaaaaaagtttggcgaggtgtacaataaaagcacgccagaaagagacactcacaaaacaataaaattttaatatttcaagatgagttaaaagacattaaggaaatgatataagccgtggaaaaaccacataaatcagaattagaaaatctcagaaatgagatgatagtaaaagtcacttcacaacgtagggccagtttaccttaccaatgtcagctcttgccattttctacttcctgccccataacacttcacacatacctctgttgtagcccttttcttataaatttataatgattagagtgtcttcctttccctgattataaactctttgaggcttaaactgagtcttcctccaccttgtactgctaacatgtttttagcatagtatacttggcatattgtacttagcgtatggtaggtgtccagtacctgtttatcaaatgaatgactgaagccctgtactaagataggaggagtcgtactaagataggaggagtcaaaataagaaggatagaatgaatgtgaaagatgtttggaaaaagggattgatgggacttggtgactggatgggggatttttgacttttgttgaccatgtcagccatagacatgtccacaaaacttaggaatgaggagaagaagctggctcaattgtggagtaaatgataagctaaattttagatacggcgagtgggaggtgttggtgagaccctcagtggatctgcccagtggtttacgtgcactgaaccttgcaaggtaactgcagagagactagatcatgtatctatctaatccaaaagaccartatataccaaacccggcaggcccatttgtttcctgaattgctataatgtttatctctttgtttgcagcttggcttgtggagatgttgaaggaaagtttgatattttattcaatagagttcaagcaattcagaagaaaagtggaaactttgatgtaagatgtttgtttttactgaatttaattttacctttgtagtcayacataaaaataaagtttgcactcctttaagtcttgattgaacacataccatttttgttaaattgarttcccttcatgagcataggaacttagtagctgctgagtggctgggggagggagacctatttactgtttactattgatctttatattttttgaatttgaatattgttactttatcactgtacaaaaaactgaaaacagactagcaacacttccctaagtgattctgacctctgggtttgggaagcacagatctatttcatgaatgtgatgaggattaagtcaggtaacatacataccaacccatcacaagcttaaaagctctatatgaatgttgtgtatggttgccaactagactgtaaactcctaagagtacagaagagagtattccaggtatgaggataatttgttcattgggttaaaggttgggtaaagacaacaggcaggaaatgtgttttttataccttgtatttctcagattctaatattttaagtttttttgtttcacacggggattctttaaagatctatttctatgtgactgtatattccagggaaggatatgtggagagagccatgaatggcagagtgggactgggaatttgaggagcacttgaattctaacttactttaaaagtttagttccttgactctctcttacccatctctaacttgaatttgacagccaaagagccaaaacttaataattcatagaatcagtaactgttaacagttgctgctaaagaattgtatattgaaatctgcaaattgattaagaattaaaaactgatttgaaactattaaataactagttgaatattactatcaattatgtactgtwtgatattttaaaatctcatatatctgtttaaaaaactcattttagctgctgttgtgtgtaggaaatttctttggctccacccaagatgctgaatgggaggagtataagactggcatcaagaaaggtatagaaattatttttatttaacatatgatttctaataaaatttcaagggccagagttcttgcagagttgtttttcattatttaagaatttaagagttattttcagtatttaagaatttaagttgcttttcattattaagactatccggcgcagtggctcacacctgtaatccccgcactttgggaggccgaggcatgtggatcacctgaggtcaggggttcaagaccagcctggccaacatggtgaaaccgtgtgtctactaaaaatataaaaattagcagggcatggtggygcatgcctgtaatcccagctcctcgggagactgaggcaggagaattgcttgaacctgggaggcggagattgcagtgagccgagatygcaccactgcacttcaccctgggcgacagagcaaggctctgtctcaaaaaaaaaaaaataaaataaataaaatagccaagctacaaggttgggtgtagtatatccttagtggatagctgttccacatttaggattgctaaatatggggaatgtgaatgcatggactatttacttttaatataagtattttttctatagagaggcatatcttaagttctaaagcagatctggtaactatatggtgtcatgtctgtttccctcactagctcctattcagacatatgtgcttggtgctaataaccaggaaacagtaaaatatttccaggatgctgatggatgtgaattagctgaaaacattacttatctgggtaagctgatacttgttgtattttttttttgttttttgttttttgtttttgagacggagtcttgctctgtcacccaggctggagtgcagtggcgcaatcttggctcactgtaacctccacctcccgggttcaagtgattctcctgcctcagcctcctgagtagcttggattacaggcgtgtgtgaccatacccggctaattttttttatatttttagyagagacagggtttcaccgtgttagtcaggatcatctcgatctccttacctcgtgatccgcccacctcggcctcccagagtgctgggattacaggcgtgagccaccgcgcctggccgatatttgttgtatttgtaatgaacataatatagtgttctcaggaattagtctcccaggaaatttttggctagatttttcagtgattgcagcctgagataatggggtttggagggttttttcccagagtctgtatatgtgctgctgtgcccttaggacaatgcctttaggacagtggcattttttctttattatttctaccacttagccccaatatcgttgcgttcccacaacccggtacacacttgtttagccaactggagggataaactccttgtctatagtatatgggatacttaaggtataaattatgttcacacaaaggaaatttcatgtatgtggctttaccatacaatcttgctaggtatatacagcttacttgttaatgagcctcccaactatttatagctctaggtttcactctaaggttttggcaactcaggtttttagtgctgttctttgggggctttttactctttttttactctcctttttctggttctaggtacactcttcagttccagcttaaagttgtttcctccacagccctctgtattgcttttagtggctctttcaatgtctggctgttttcaaaagcactgtcaaattttgcttttgttttccccccacctgctggcagtctgctgcctcttagatcattcaactcttttttttttttttttttaagacagtgtcttgctctgttgctcaggctggagtgcagtggcatgatctcggcttactgcaacatccgactccctggttcaagtgattctcctgcctcagccttccgagtagctgggattacaggcacgcactaccatacccagctaatttttgtatttttagtagagacgggatttcaccatgttggccaggatggtctcgatctcctgacctggtgacccgcctgcctcagcctcccaaagtgctgggattacaggtgtgagccactgtgctcggctttttttttttttttttagttgaatttactattcttcacatttcctccttgttggtcttatttctctagaaaacttcttcatttcctttgctgtaaatgtcctctctctccttccccatcatagttcatcttggcctttagtctttatttggctatggccctcccgttaccagtcttattttgcactaatcctgtgggacttctttaagcaaaaattgaaggaaggactttatttgttttgttgttttaatatggaactcttcatgaatttgcatgtcatccttgtgcaggtgccgtgctaatattctctttatctttccagttttagtatatgtgctgctgaagtgagcactgtttagttttaactacacatatcagatacgcattttgaaattctgttgtagattttaacatgagcctgacttatgcagttcttggtatagtttgtagatttggattaagggcattactgtagatatttggcagccattttactatatgaatttagtgccaggaaaggaaagagcagctaaggtacttgggttatttctgtgaaatagattttttggatccagtaggaggatcaagcartgaacttggtagtgaacatgtgatagtgagcttgaaatactggtaggacatccaacatatagttggaagtgagagttattattattattttttgagatggactttcgctcttgttgcccagactgaattgcaatggcatagtcttggctcactgcaacctctgcctcccggattcaagcgattcttctgcctcagcctcctgagtagctggggttacgggtgtgtgccaccatgcccrgctaattttgtattttttagtagagacagggtttcaccatgttggtcaggctggtctcgaaatcctgacctgaggtgatccagctgcctcagcctcccaaagttctgggattacaggcattagccactgtgctggtccgagagttctttctagagtatcagtgttgaagagtataggctttggagagttggtcccataatgatgaaaaatagagctgagaagaggatcaaattattaaggaagaaatacaatcagaagggaagcaggttgatgatagtaccttggtgggtggggatggtatatcttcatctagggggtaggaacaaagacataaaagtgcttagaggactgtttgagaggtaaagatattgtcaacttcatggaatctactgaagataacatagtttcaggagaacattggcaaatatagggtgacctttaagagagtgatgggagagggaaactgattgcagggggttaaggaactaataaagtaggctgggcgtggtggctcacacctgtaatcctagcaccttgggaggtcgaggtgggcagttcacgaggtcaagaggttgagaccatcctggccaacatgatgaaaccccatctctactaaaaatagaaaaattaactgggcatggtggcggtcacctgtagtcccagctacttgggaggctgaggcaggagaatcacttgaacccgggaggcggaggtggaggttgcaatgagccaagattgcgccactgcactccagcctggcaacagagcgagactccatctcaaaaaaaaaaaaaaaaaaaaaaaaaggtaaagcacttagcatggatgactcttcagaaattcaaaactgaagaggaggaagtttcttagtatgtgtgttcattttggatggcgatgattgagcatatttttttctgaacaaaaagcgccagctgagtagactcagtagatgaaagggaagtgaaaattgatggagcaaggtcttgaaggcaacaggagggaatggaaacaaggccacaagccaggaataaccatagaagagagtggcgtcttaaatttttcctaaacacttgttctttccaaatgttttccttcacttggaagttgctgcctgcctccaagtagctgggactacaggcacacgctgccatgcctggctaattttttgtattttagtagggatggggtttcactatgtgcatcttttctagactgtagcttccttagaactgtatttttcttcgcattgccttttcctgtstccagatgtctgcatttaagtccatgtagaatcttctctagaacgcagaaagccttttccctaatcttctcttcccaactttttccagtaatatttgtaaggcacctggcataaacatactggcccgtgggctccagcagcctccacgtagggctgttcatatttactgagcaggaatactgttgtagccattcaccattgatgcctagcagccagaagggagctgctggagagtttacacttcagacatgtaaaatggcagggacataggagagtcatgggagattcatccccctattgatggcttttcattctgcaattytgactaaaatttgttcatttttctttgaacccaggtcgtaaaggtatcttcactggaagctcggggctgcagattgtgtacctcagtgggacagaatccttaaatgagccagtaccaggttatagttttagtcccaaggatgtgtcttctctgagaatgatgctgtgtacaacctcccagtttaagggtgttgatatcttgctcacatccccatggcccaagtrtgtggggaactttgggaattcttctgtgagtagtgtttgtttagttggaatttctaaaagcaaattgcactggcttgagttgggacttttttcttttcctgtttatattgagtattttagctcttgggtaccttttattagaagtcttctgtgaaaattttcaggattctaaaagttctgtcaactgatcaaagcaaaagttaatttcatgaaagtgtgattcatagatgagactgctgaaatcttaattataaaggaatggttttttatattctctgcttcaagtgccctttcctaagcctcttaatgttttgaggcttcactgatttttttgttttttgttttttgtttttttttgagatggagtctcactctgtcgcccaggttggagtgcagtggtgcgatcttggctcactgcaacctcctcctcccgggttcaaatgattctcctgcctcagcctcctgagtagctaagattataggcatgcgccaccacgcctggctaattttttttttttttttttgagatggagttttgctgtgtcacccaggctggagggcagtggcgccatctctgctcaccacaacctctgcctcctgggttcaagcaattcacctgcctcagcctcccaagtagctgggactataggcgcacactgccatgcctggctaattttttgtattttattagagatggggtttcagcatgttgcccaggctagtcatgaactcctgagctcagacaatctgcctgcctcggcctcccaaagtgctgggattacaggcggatttttttgtatttttagtagagatgggatttcaccatgttggccaggctggtctcaaactcctgacctcaagtaatttgcccacctcagcctcccaaaatgctgggattacaggcatgagccaccgtgcccagcctaatttttgtatttttagtagagacagggttgcccaggctggtcttgaactcctgcgctctagtgatccacccgccttggcctcccaaagtgctgggattacaggcgtgagccaccatacctggccagattttaatattttatgagtaatcttgaaaaggatggtacaccaggagtgacaactatcatggggagtgaaacrctacactggtggaagtaagcctaaggaagattttgaaaaggttatgtgtgagggcagaaaacactgggtgagcttcattgaagggaaatgtaagaatgcatttsggaacaaatctccatggttggattcaggattatcagtgatgatccagaagtggagcctgtataccaccccttgccagtttcagcaccatgtgtccatgaccaaaaaggccaacaggataccaggcattatcaaggaggatgctctcttcctttttgacaaacccatgattactctttacgtagaatacaaggcatagagctggttggagcacaaggatatagcaaagctagggaagatcgagagaagggctgctaaagtgatgaaggaagagagaaagacacatatgatgctctgtaaggaaggatgakaaaatgaggcccctttgttttgcggggagctaaaaattgattttgatcaaggcttataaataaccatacagtatatttatggaggagaaaagtatagttcaccagtccctaagatgctaggactgacctcaaagctaattccctgcccttcagcagaaacctgaaggaaacaagcataagacaaaaggaaattcctgctttacgtagtggaaaacaaactttgttagcttatttccaagtaataccttctcttagaatagagttcataaataatgctgtgggtgagagatcacttaattggttgttaacagaatctggggatgttctgggagcaagaataactttgagcaaacttcatattacttaagaagggtgtggttatgcccttcctcaaactgccacttccttgactgaagcaaaataaaggattatatgctggtgatgaagtccttgaatactctataccagatattctgtggatcctaggagccctgaagcctagcttttcgctttgattttctgaattgactatgactgtctggacccgtgaactacagatgcactacgtaacaaactagaggctgggcgcagtggctcacgcgtgcactttgggaggctgaggcgggcggatcacgagatcaggagtttgagaccagcctggccaacatggtgaaaccccgtctctactaaaaatacaaaaattagccaggtgtggtggcacgtgcctgtaatcccagctactagggaggctgaggcaggagaatcacttcttgaacccaggatgcagaggttgcagtgagccgagattgtgccactgtactctagcagcctgggtgacaaagcaagactccatctcaaaaaaaaaaaacaaaccaaaactagaagcccagtctgtgggctccagagggagagcttactttccaaaaaaggttttaataatttgtgttttgggtattgatatggaggagttaccttttaatctctggcttccaacagttgttcctatttctacattcatagtagttcagctcccttatttgttaagattttttctctgattgccatacttatgaaattcaatgtgcagttccttctgtccacatctgtattcatgtataaatttcaaagacatttcaaaatgtcttattatttatttgcatttcttgataacttttggtctgtatggatgactaagtttttgtttactagggagaagtggataccaaaaaatgtggttctgctttggtttccagtcttgccacgggcttgaaaccaagataccattttgctgctttggaaaagacctattatgagaggcttccatatcggtgagtagcatttcattcttcttggctttttgaagaatttgccatggatcttctgtataaacttctcttgttcgtttttaaccatataacatcttggttccatttggttactcagacactgaagtaagtgactctcaagtcattcatcttctctgagtttgttccctaatttgaaatcactttggaaatccttcagtttcagaatcaagaacttgtatcagttttttccttttcagggccaggcatgatggtgtgtgtctgtggttccagctacttggaaggctgaggcaggaggctcgctcgagcccaggagttcaagactatagtgtgcaatgactacgcctgtgaatagccactgcactctagcctgggcaacatagggagccccatttctttaaaaaattttttaccacaaataaatatgagataatgtatatgttaattagcttgatttagccatcccacagtatatacacatttcaaaacagcatgttgtatacmataaaaaatacaaattttagttatcaattaaaaataaatgagagggaaaatttaaaaaatttttttttgtcttttttttttttttgagacggagtctcgctctgtcacctggctggagtgcagtggcatgatctcggctcactgcaacctccgcctcctgggttcaagtgattctcctgcctcagcctcctgagtagctaggattacaggtgcgtgccaccacgtccggctaagtttttttgtatttttaatagagacggggtttcaccatgtcagtcaggctggtcttgaactcttgatctcatgatctgcccacctcagcctcccaaagtgctgggattacaggcgtgagccaccatgcccagccaagaaaatatttttttttattttttttcttttgcactcagaggtggagtttttatttttttaatttttgggggtacatagtagcatagtaggtatatagaggtcaagttcttttttttgagacagagtcttgctctgtcgcccaggctggagtgcaatggcatgatctcggctcactgcaacctccgtctcccaggttcatgccattctcctgcctcagcctcctgagtagytgggactacaggcgaccgccaccacacctggctaattctttrtatttttagtagagacagggtttcaccgtgttagccaggatggtctcgatctcctgatatagaggtcaagttcttaaagaatatactgccaagaaaaccagtgttttacaagtgagagagttaagtaaaagctcagaattatcttcactgataaagggcatggattatccctaaaataacttctttcccttcttttttacaaaagtaatatttacgtgttgctagttaaaaaaatttaagtgagcaagaagagaataccccccttaccataatcccacagcctaatgcagaatcataggtaatacaggtttttctgttaaatctccatatactyattctagaagaatgtcttgttctctaaaaatatactgcgaaaacagaagttttgggaacaagccactcaaaacttacacagttcttaagaatcggaatacagtttttcatagaacatataaaaatggccaatagggctgggtgtggtggctcacgcctgtaatcccagcactttgggaggccgaggcaggcagatcatgaggtcaggagatcgagaccatcctggccaacacggtgaaaccctgtctctactaaaaatacaaaaaattagctgggcatggtggcgggcgcctgtagtcccagctacttggaaggctaaggcaggagaatggcatgaacccgggaggtggagcttgcagtgagcagagatcgcgccactgcactccagcctgggcaacagagtgagactccgtctcaaaaaaaaaaaaaaaaaaaaaaaaggccaatagacatataaaaagatgctcttatcattagccattatggtaatgyaaatcaaaagcacaatgatacaccacttcatacccactaggatggcagtagtcaaaaaggcaaatacataataacaagtgttgacaaggatgtggaggaattggaatcctcacacattgctggtgagagtgtaaaatggtgcagccgctttggaaaactgtttagcagttcttgaaaggttaartgtaagagtcagcagcatggtaacggcaattttattcctgtcccaagataagggaaaacatatgtccacacaaaaacttgtacacagatgatcataatagcattattcataatagctcaaaatgcaaacaacccaaatgtccatcacctggtgaatgggtaaattaaaagtggtaaatatatgatgaaatgttatttggcaaggaaaagcaatgaagtactgacatgtgctacaacatggttgaaccgtgaaaactttatgttaagtgaatgaagccagacacaaaggactacattttttttttttttaattttttttttttgagacaagatctcattctgtcttccaggctggagtgctgaggtactatcaaggctcactgcagcctcaacctcgtgggctcaagtgattctcctaccttagcctcctgagtagctgggactgtaggtatgcaccaccatgcccagttaattaaaaaattttttttgtagagacagagtctcactgtgttgcccagggtgttctcaaactcctgggctcaagcagtcctcctgtctcagcctcccaaagtgcctggcctattttagctttttattacacaaaagaagaggcaatagtaaagtgaaacctcatgtgtccatcacttagcttgaactattgtcaacattttgccaattttacaactcttttaaagccaaaagttggagttttgatggtttctgaagacataatctcatctcttcctaaaacagccttgtgaggtagggattgttgccctattagacggatagatagtaacttatctgaaatcatttgactggcgatgatgaactgaggacctctgctctttttatggccccatagagtccacatattttgtcattgcaaatcaaaagtaaaattgtttgcaattttttgtctctcaaatatgttgtagaaaccatatcattctacaggaaaatgcacagcatgccacccggtttatagctctggcaaatgttggaaatccagaaaagaaaaaggtaaagatttacctatttggtggarggttgatattcatggtctgcctgataaatgtatctcttgtccagtttagcattcagatcttctcttctccctgactgcaaggtctcagcagtttcggagactcctttgtaaaggtatggtaatgaaaggtcaagtctctttgggtctttttgtaggagagtttaaagaagggtttgggaaaataggcccagaggaataaaggcaaaatatcaaatgaacagtgttcctttacttccacatctatgtggttgtctctatgggtatttgtgaatttgccctcagatgcttgcttacttctttagcaacttcatttagctgaaataagaaaaccccaaagagctgggcatggtggcccacgcctgtaatcccagcactttgagaggctgaggtgggcggatcacttgaggccaggagtttgagaccagcctggccaacatggtgaaaccccatctctataaaaaataaaaaaaattagccaggtgtggtggggggcacctgtaatcccagctactcaggaagctgaggcaggagaattgcttgaatgtgggaggtggagactgcagtgagctgagatcgggccactgcactccagcctgggtgacaaagtgagactctgtctcgggaaacaaaaaaaaagaaacccagaggacttacctaagctctccttagggctaagatttcctgagggaaatcttagtgatacctggaatctatctttgtattggaaaacagtgcagttgatgaaaagaatataccagaaaaataggttgtttttctcacttctctgagagtatttctgatttcccagggccaaaactaacctattgtggattgagacagctaaaataagaacagttagtgaagtgggaaaataggcagataaagagtctgaagattattccactatcacatgccatagacaatgcatacaaaagataagcaaatcgatattttgtttttttcataatatttcaagctttttttgggggagggggcggatctgaagtgattttgcctttatttccttcactttaagccaatcatgaaatttcatagtgatttctagggttggggcagaaggaagacagtgttaagaatcatcagggctgtggcccagttggcctgcggaggtgcaggcagggtggcccctcaggggcagctggaggagcatggactgccccgctggcagggagctgatgttcccagagtataagagctggaatgtgatgtcctccacagcttccagcttgcgcagctctatcaggctgttccctgcggtggccagtgagttggcgatcagctctgctgccttggaatcgccctcagcagagatgatggctgcctttttctgctgctcagccttttctgccacaaatctggtgctctctgcttcccgctgagccacctgtttggcttccactgcttctgtgaactccttcccgaaggtcagatgtgtcaaggacacgtcatccaggatgagcccaaaggtggctgctygctctrtaaggtcgttgctcatctgcctggagaccagctctctttaggtgattagttctccagcatcaaagtgagccaccactgacttgaggatctcagtagtgatggacagcagcacacgcttatcataatcctcttcaatgctggtcaagatgcgaggaagctggctagcgacaggcccccatgtgcaccgtgatgttgacattctgtaaatctttgctatcagtgatgactggcacattacatggtcaagaacagcagtcaaagataataggtttgtgtacccatggaatgagaaagtgagtcccttcccctaccacagtgttctgtactccatggaatcggtcaaagatgacagctctttgctcagcatccacattatatagggcagagttcaccacgtctcctgcaacagctaaggccaggccaaacttgccaacggactcaaaacactttggcagccatgttttcttctgctggaccctttcatacctgcttccactctgacctccacataaattccccagcctattttcagcttttttgcccaattcttagcaaatgtagatttgtaatttttcttttaattgccctttcaaactgaataacacttagtattttcagtctgttttattctcagggacatgttagcctcagccataagcaacttatactttcgtcaaaaggtgtgcacattataaaatttggcaagcattgttaaattcatctaaaaactttgttccaatttatacccctaccccagcagtgkttttttttttccccctccatatttctcactggatcaagtcaaagtttttgtttgtttgtttaagatggagtctctgtctattgcccaggctggagtgtagtggcacgatctcggcttactgcaacctccacctcccatgttcaagcgattctcctgcctcagcctcctgagtagctggaactataggtgtgtgccaccatgcctggctaatcttttgtatttttagtagagatgggatttctccatgttggtcgggctggtctctatctcctgacctcaggtgattcgcccgcctcagcctcccaaagtgctgggattgcaggcatgagccgccacccccrgcccacgtcaaagttttattaaagtttttgccaatgtgataaatgatatataattgttacttagttgcatttccctaatcagtagtaagtttaaacatctatttatatcttatctaaagttttcgatatctgtggcattagtgcaagattccaaatatttatatgaatatttattgctttactgctagtctcctaagaaaattttattagcatatatagcagaatttgtataatatcagagagagaaacactaagttcgtttgtaattttcattaggaaaaataaatggcagtgccacaattctgtggacagagtacacaaagataagggactcagagacagaagcagtttgtcttcaagggttatacagcaagtccctctgggccttgtagtgacagttgtcactattccattatccgagtgagaactcctggtttgtgagggtgggggctttgatttcttgttcatttctttgtcaacccttggtgagcccctgcagaggccactgaattggcatttgatttactgtttactctctgagctatggatgggctggttgctgttcttttaattttactgagtttcacatgttttctgtgaaatcttcacagtaaaataggttgattacagttgggtaaatagtatttcccctaatgtcattatgttctttttctctaaagtatctttacgcrttcagtattgttcccatgaagctaatggatgcagcagaactggtaaaacagcctcyggatgtcactgaaaacccttacagaaaatctgggcaggaagcatccataggaaagcaaattcttgcccctgtggtatgttctgattgagggttggcatttttatatgtgttcttttcctagttatagtttagtacataagacaagtttaatcgttagaatctaaatcttttttttccccttgggaaatcatgatgrtgtttagaaaatcttagtagatttcarctaagcttagtgttttttattgtagtttggggttaacagtttgatacattaggtctttctttgtccaaactggattcagacgtttggggttacagttttatttgtaaagtctttgtctaaagtgattatctgttcttagctctttaggcaaggctctagcagcttcatagcaatgtaatttgtgattttatgatgattgctagtaggaaaataagattcactctgaagaaattttcttaatagcagagttttctcaaattaattttttccccactaaagcaaggaatgtcaagttcccttactagcatgcacggtctgctttctcagacttttctttctttccaagcagccttctcatctcttaaggctgaattaggcttgtttgacctgtgaaattgtatgactacactatgtccctgttgagagaaaaaagaaaagagaatttaggtgggttcatgttctgctttaggcaagaattactttataacttgcattttaactcgtttttccaaagagatgaatttggcagtagtttggataagtgttgatgtatgactgagacttcaggcatcagaactgggaagatattttgcttccctagagtgtgcagaaaggactgagaagaaagataggtatggcatggcaggaatgttcccttgtatgtgagtggtcggctacttatctaaaggttagttgaataacatttaatcttctgcttttggccattccaggaagaatcagcctgtcagtttttctttgatttaaatgaaaagcagggaagraagcgttcatccacaggtagagatagcaaatcttctcctcatccaaagcagcctcgcaaacctcgtaagtacctttattccagaggtttcttctatgaacagtaactgttattttggcttttctttggaaagcagcattgctaagagagcctcttctggcaggggagaattgtgcaatgagtcattaggaccaacagtaaaaataaaatataaacatggccttggccaggtgtggtgactgcaccatcttatattcccactggcaatgtatgaaggtttctgcttttccacatccctgtcaacatttgttatagcaatagccagttttacaagatagctccctcttttcctgtctcataaataggtatggttctctaggggtgatgcttttatatacttcttggactctgtatttttagcccatctacttgagagtgatgagttccttttgctaattaccatttaaagcaattttctttgtcctaaaaaggcagtcttctgttgcttatatacccatattgggataaaagcgttgatattcttggccaggtgtgggggctcatgcctgtaatcctgtactttgggaggctgagccaggcggatcacaagttcagaattttgagaccagtctggccaacatagtgaaaccccttctctactaaaaatacaaaaattagccaggtgtggtggcacggtcctgtagtcccagccactcaggaggctgaggtggaagaattgcttgaacccaggaggcagaggttgcagtgagccgagatgatgccattgcactccagcctgggtgacagagtgagactccatctcaaaaaaaaaaaaaaagttgatattctttttatagcttcagattcagaaactagagctttatgaatttttatctagaattatgtaatgctggaaactgattcacactaactgtaatcccagcactttgggtggccgaagcgggtggatcacttaaggccaggagttggagaccagcctggccaacatggtgaaaccctgtctctactaaaaatacaaaaaattagcaaggcatggtggcacccacctgtagtcccagctcctcaggaggctgaggcatgagaatcgcttgaacccaggaggcggagattgcagtgagccaagattgcaccactgcactccaacctgggtgacagagcaaggccctgtctcaaaaaaataaaataacgggccaggcgcggtggctcacgcctataatcccagcactttgggaggccgaggtgggcggatcatgaggtcaggagatcgagaccatcctggctaacacggtgaaaccccgtctgtactaaaaatagaaaaaattaaccaggcgtggtggcagacgcccgtagtcccagctacttaggaggctgaggcaggagaatggcatgaacctgggaggcggagcttgcagtgagccgagatcrcgccactgtactccaccctrggcgacagagcgagactccgtctcaaaaaaaataaaataagaatggcctgacttcgaggctgttctgaggcgcttcctgtactatggaaaaagcacctttcctttgtgtctgtaaaacataatgaggtgaagagcctccaaaaccaatatgggttcataaaataatagaatgatcaaactcgaaggaaggactttaagagtgtttcattgagattctctttcttcatctttttgtttcacacaagaagstgaccttgggagggtaaattttccagggtcatggctaatggcatagctggggctttaattggggctcctgacacccagttcagtgttcttttgttgtagcctattgccagttatgtgctactttagtcagtgtgtgattttgcacttgtgggttacctacctgtggattggttacaaattctaatggaagtttaatttcattgaaaatgttcatagggggtcgtagtgaggagcacaggctcagcccattgtggcagtgttgtataccagtcttttcaggatataaaaatcagacaaagctgagttctgtggggtgattatatgctstagtgcttggaccatagtaacacctggctttcttttacatgaagctcagcctccaggaccctgctggttttgccttgctagccctgaagtggaaaaacatttggtggtcaacatcggcacacatgtgagttacttccttggactttatagagaaggagatgcctatttgttttttattaactttattgaggcataatctacatataacatttacccatgtttaagtgtatgattcggtgattttcgtaaggttactgagttatgccaccatcacgtggtatagttttagaacatttttatcattgcagtaagatctcttatgcccatttacagttaatccctgttcccaactttagcctcaggcagcaactagtctacttactatctccatagtttgccatttttggacatttcttataaatggaatcatacaacatgtggtcttttgtgtctagcttcttttacttagcataatattcttgaggttcatccatgttgcagcatgtatcagtatttcattcctttttattgccaaatcatattccagtgtatagatgtaccacatttcgtctatatctgttcatcagctgatggacgtttgggttgtttctactttatggctattagaaataatgctcccataaaatatctgcatgcaagtctttgtgtggatatagacctaggaatggtctatatkttggatagacctaggaatggatttgctaggttatatagtaaatttatgtttaacttttaagaaactgctaaactgttttccaaaatgactgcaccatcttatattcccaccagcagtgtatgaaggtttctgcttttccacatccctgtcaacatttgttatagcaatagccagttttacaagatagctctcttttcctctctyataaataggtatggttctctaggggtgatgcttttatatacttcttggactctctgtattttttagcccgtctaattgagagtgatgagttccttttgctaattaccatttaaagtgattttctttgtcctaaaaaggcagtcttctgttgcttatatacctgtattgggttaaaaatgttgatattctttttatagcttcagattcagaaactagagccttatgaaatttttttttttttttttttgagatggagtctcgctctgttgcccaggttggagtgcaatggcrtgatctcagttcactgcaacctctgcctcccgggttcaagtgattctcctgcctaagcttcccaagtagctgggattacaggcacctgccatcacatctggctaatttttatatttttagtagagacagggtttcaccctgctggccaggctggtctcaaactcccgacctcaggtgatctgcccgcctcagcctcccaaagtgctgggattacaggcgtgagccaccacccccggcctatgaatttttatctggaattatgtaatgctggaagctgaktcacactaactgatcacatcaaagataaaatttcagttttgcttagtagtggagggtgtagcttactaatgacaggaatacccatattcacactcctggtgtgagtatctaggaacccaagatgatgatgatatggttgtttggtaagcattgaatcagactatgagaacgggatggtcttgagtatgattttattcaggtggtggaaagcttgaatgtgtgtgtctcatgggaaagtcattctatttcacatttccccagatacttttgcttgggtagggctggattagacattaaataataccagtgtttgastctgatttccctgggttttctgtagaccattgttctttttcattcatttagaatgaagaaaacttaatttttaacactatagtcaccagtgactagaattggatgttccccaagattcctgaggaaaatatttataagtcatttttgttttgtgacagttttgggaggtggggcctaataagaggtgatttggtcataaggactctgccttcatgaatggattaatgttatcacagtagtgggttatcatgagagtggctttgttaaagtgagttcaggtccccttttgcttctttactctcaccctcacttgcccttctgccatgggatgatgcagcacgaaggccattgccaggtgccagtgctatgcacttcgacttcccagtctacagaaccacaagccaaatagatttctattcaaataaattatagtctgtggtattctattatagcaacacaagatggactaagacaattccttaagtgtgtagtgcttctgaagacaggtgccttcatccatttctcattgatttgttctacttttggtttctggggttgatcstttcaacttatcctaacaatctgaggaccgttttttgtgtcttccttcctgtagactgactagagtctcaatttcatcttacactttaaggagttacacttctgcctgtgttgtttccacctgaagagtctcagtcttttacattttaaaaaatgtcttggccgggtgcagtggctcacgcctgctcacggctgtaatcccagcactttgggaagctgaggcaggtggatcacgaggtcaggagttcaagaccagcctggccaagaaggtgaaaccctgtctctactgaaaatacaaaaattagctgggcgtggtggcgggcgcctgcaatcccagctactcaggaggctgaggcagagaattgcttgaacctgggaggtggaggttgcaggccaagatcgcgccactgcactccagcctgggggacagagcaagactctgtcacaaaaaaaaaaaaaaaaaaaaaaaaaaaaggcttaattagtggcacactcctgtctctagggggagcactaatgaagtcaaggccggtgacacaactgagccatagaacctgtggatgaagtcttcagtggaataagagcaaacttgagaagctctagcttttatagcagtgccctttttggatgatctcttttgcatcttttttcgtctttggattagtttatgctatttttctctcccacacaatttgtatagtaagttaggctttgaattgccttctgtttgggaagcttcaataggttcaagatcacaygcaggagataagagatttggaatgtgtgacatagctcagtgctgctctaggcctcagtgagaagtgacttttcttttccattcatctttctattgtccaggttactctaactcagggtgtgggcctgggcaacaatcaaggaaacctgttttcttctcatctaggcctgaaactagaggggaaaaaggtcttgtttgtggcccaacccaacatcccaagtaggccacatgagtatttcagcctagagtctacaytgtccttaggtagaaacctcttacaaacctgtaatgacctttgggtgtctgtggaagagtttgggatctcctccctgcaattattctttttgattgcctttttttgttttttaaattttttccctggctttctctttgtcgtgccttcctcaaaggtagtacatagaattgtgctgatggtccatagccacagattagtaaaaagggggaagggctgctgagagtgtaaaataattattgcaaaatcaatgcattttacttacggggagaaccatttatccaggtcctatttacacatggttagagataattctagtatagaacagattagaaggtgagagtttgaaagagagaggagattaggcaagcgtgaaactattcacaaaaattgcaagtacaggattagagatggtgcagaggagctctttagtttagacatcattacctaaagaatgcacatcataatagagaagytgatgtttatggcagtgaccttctgacaaaaatagctagacgactcaggcttctagagtaaccttttaaacaaatacaatataaagtggttattatacaaataaaaaaaagtttttagtgcctgtgaggttttcatcaactttagtcatctggaaaattaactttgtcaatatgctcagtcctctctgccaaacaaatcaaggacaatcatgctttagtatctttccaatacatatcctgtcattctgttggactttcttattatagatgagaagtgattccttccttcagccttaactttgagcccaccacactaagagcatagttggaataattttttattttttttccygagacagtcttgttctgtcgcccaggctggagtgcagtggcacgatctcggctcactgtaacctccgccttccaggttcaagcaattcacctgcttcagtctcccaagtagctgggattataggcacgtgccaccatgcccagctaatttttgtatttttagtagagacggggtttcaccttgttggccaggctggtcttgaactcctgacctcgcgatccatttgccttggcctcccaaagtgctgggattacagtcatgagccaacgcacccggtctggataattgttttctaamgtatctatatttgcctgtactggtactcattgggcccttctgtgctcactcatggcatcttcccatcagagaatatctgagtggtagaccattcttgcatgttttggtttttacagaaatatttttagttgccattaaaggctgacatccattgttggaaatcattcttttctgcctctttggatgcatctgagtttgaggttttactttccttctaccccattaggttgtatgtttgcttttgttttgtagaatttagtcagcagsttaaggcttaggaacattagatgctaatcatgccatcttagctttttttgtgagcccaaggagtatattcgggggtgggggtgggaatgaaagttactggggaggcagaaaggggtcattttttttttttttttttttttggagacggagtctcgctctgtcacccaggctggagtgtagtggcgcgatctcggctcactgcaacctctgcctcccgggttcaagcaattctcctgtctcagcctcccgagtagctgggactacaggcacatgccatcacaggcctggctaatttttgtatttttagtagaaatgaggtttcaccatattggtcagcctagtctggaacttctgacctcaggcggtccacctgcctcggcctctcaaagttttgggattacaagcgtgagccactrtcccagccgaaagtggtcattttgaaatcagaagttgtatctttttgtggttgagggtgataaaaactgaaaaactgttttcaagtttggagcatgggagggaaaacccagcgatttgttctggtctccctcagctcagtgtgtttgaagccaaaagcctgcttgtgtgcctctcccaattcatttgctcctagttcatttgctacttgcatagaaattttcatgccgaatctcactcttcagcggatacctgagaacattgttgctacaatctctaaaatcagattttttcaagaaagaatttttattaataacctcaagtacttttcgcctacaccctcaggctcactttttgtataggyttttctccctggagaatcctacatgctgtattgatgtctcaattctgtgtgctgcttcttcagtgctaccttgccctggccaaaggaggcttatctgatgaccatgtcctcatcctgcctattggacactaccagtcagtggtggagctttcagcagaggtggtagaagaggtggagaagtataaggccactctgagacggttctttaagagtcgagggaaatggtgtgttgtatttgagagaaattataagagccatcacctccagctacaggtaggtggtctgttcatagaaacttggaagggcgctatggggactttgatattggtaaataagtatttaaataggctgggcgaggtggctcacgcctgtaatcctagcactttgggaggccgaagcggttggattgcctgagctcaggagttcaagaccagcctgggcaacacggtgaaaccctgtctctactaaaagtacaaaaaaattagctgggcgtggtggtgcatgcctgtaatcccagctactcgggaggctgagacaggagaatagcttgaacctgggaggcagaggttgcagtgagccgagattgtgccactgcactccagcctgggcaacagagcgagactccatctttaaaaaaaaaattatataaagtttagctttaatatgtaaaatatttaatatttttatattaatatttaaataacattcatttaaaaagtttttaaagagtatctggtggtaaccccagagacttcacagggaagtgtgtggtcagtacatgtaaacagcatagatagtaagttccttgtttagaaaaggaatgggtagttgaggaagttccaaggaagatgtggggcttgctggataagaatttggaagaaagtgagtattttgtgtggaggcccagcatgagggaaagcttagtggtaggaaatagtctcaaagcctgcatggggctagcagctcagaaaatcagattgtaaatcatttgtagttgtggtggttttctttttggcacatttgttaagttttcaaatgggcctaactctgccacatatataatatcggagatggcaaaggcttgtgacggagatatctctcttaagcctttcctgcatcagagaatggctcccacatgtgtcaggctatctcataagtttaagtccttacagacaggctgacacaggcttgtctggcctgaggatattctgtgctgaggggtgtttctccacccctgtgatggatttgctacttctcagagactrtgcaggcacaacttctctgggacctgcacaaggaatttctcctgtctccccaacccccaggtcattcctgtcccaatcagctgctctactactgatgacattaaagatgccttcattacccaggcacaggagcagcagatagagctgttggaaatcccagagcactctgacatcaagcaggtgaaacaggggatggtgatattcagggaagagtaaatatctgttttttttgttgttgtttgttstttgtttgtttgtttgagacagagtcttgctctgttgcctaggttggagtgcagtggcatgatcttggctcactgcaacctccgccttccgggttcaagtgattctcctgcctcagcctccccagtagctgggactacaggcatgcgccaccatacctggctactttttgtatttttagtcragacggggtttcaccatattggccaggctggtctcgaactcctgaccttgtgatctgcctgcctyggcctcccraaggtattacagkcatgagycacccacgcctggcaagatctggtttttgacatgttgagcctaaggtttttgacatgttgagctatcaaggcattccaaaaatgttattaaataggcaatgggttgggcatggtagctcacacctgtaatccaacactttgggaggctgaggcgggaggagcacttgaagccaggagtttgataccagcctgggcaacaaagtgagacaccttgtctctacaaaaaataaaaaaataagcttggcatggtggcatgtgcctgtagtcttagctactcaggaggctgagagtcaggaggatcacttaagcctaggagtttgaggatgcagtgaggtatgattgcaccactgtacttcagcctgggcarcatygcaagaccctgtctctaaaaaaaaaaaaaaaaaaaagaggcagtggacaatttggaactagagcactgggtattgactagactggagatgaacagggcattactccaaagtttagtgctttcctgggaagagcaagaaattagaatttcctaaggtaggaacttagaaggatagacgccactgggaggatattgttagtatcttccagttagactttttaagccctagttccactaagtggcttgggatctatagcaacatacatatctttttttcttgtgcatttagactgaattatttgcctagagatgaactcagattatagatttttaaagcattattggacatcctcatacaactctgtttactttagattgcacagccaggagcagcatatttttatgttgaacttgacacaggagaaaagcttttccacagaattaaaaagaattttcctttgcagtttggaaggtatgtttttcttcttttcaatgtattttcactagacctgctatgaacagagtggtgggctacatgggacaattgataaaaagctaaattgtaaacagtccttgccccagaggacccatggtcttagggcagatgtttwcatatatgacagtaatgtaatgtagaatgtgaagagtaccatgacagagttttggagaacaatgtgctgtagaaattcagaaaagggacagctcatttctagttggtgaaagccttcatgaaagtggcaaagttgaacctgagaggcatatttagagggcaaagattgaggtgagggcattctagccagaagtgctagggaactttaattgagcacatactctgtgccaagaactgtaccaagaactttacacatacatgactcatttaatcttcataactctgtaaggtaggtactgtcatcccgatttaccagtgtggaaaatgaggctctagagcagtgcccggtagacttttcacaacgatggaaatgctcaaatatctgcactgtccaatacagttgtgactagccacttgtggccmctgagtgctgaaatgtggctaatgtgactgaggaactaaatttttgattttatttaattaattagaatttaaatttaaatagccatacctggctaatggttaccccactrgatagcaggctgtagagagcttaggtagcttgtcctagtcacacagtggtaggttcaaacccaggcctgttggacctcaaaacttgaggtcttaacctcagtgttctacagtatggtaaaggcctagaggaggcttcagttctgttcctcgtatcaggcaaaacatgactgcaaaaccatagagggagtaacataacttaagcaaagattgaagatgggaagttgctggcaagaagatacagtttgaaggggagtggaaaatgtgtagaacrgagtatctgatgctggtgtctgtgatttgcagctgttttttctcccctagttaaaaatgggctttgagtgagccttgaacctgtcttggactaattcagaaagcctccaagagattgcccccttagataagtccagtaaatgtagttgtctacatttttcaaaaagataaatgggaacaagtgtgctacgagattcagacatctgacgtgatgttttcgttgttgcctcagcaacagatgcggttatgaacattgacaacataagcacacgattgcagatacacataggcgtataaagcacacaaaaagaagattctctgaatggttttgtgcttatgatgtattttcaatattgagtaattatcaagatactaatttatagttatatagcattttatagttaacaaaatatttgaaatggcatatttttttcagctgtacaagaaaggtagttctattttccttttatatttgaaataggctcaaagtttgcccagggagcttaggttctttgacttatagagaattcatgatttgtttctaactcttctatttactgtaacttcaaagtggaaaatgaaccatataaatgtgtaatagaattatttctaatatatcaaaataagtaaaaataaaaatataaagcaatggcgattagaaggcagcttgtgtgtgagtgtgtctgtatgtagttattctttagtcctaagagccaagatagttgttttgttgacattgggcttgtgctgctgttacgtgggcctgagtyccctagaaggagaggcagaggaattttaaatcagagtgggtatgactaggctcctgactctgcaaactcatgtctagttgaggtgacaaaactacagtttaaggcaggttgtaatcacagctaatatggcactttgactgtgttatctctgtacctcacaaaaaccctgtatggtgggtgttcttatttgcatttcataggtgaggaaatcaagactcagagatgaaatcatctgtctagatcatagatagcaagtggcaaagctggaaatgggatccagtctctgatctttctcacaccagggcctgccctttttctatgtggtgttgcttctctaagtaccaataatatagttccaagttttttaagagagggagaagcaagtggggtttgaaggatcaggaaatatatagtacctgagctggtcatttaaaacgggtatgattttgatcaatagtatggcagagatggcactcagggcaggagagcaaagtcagagaaatttgcatacctcctttgggtgatgttgaggagagctcaggctgatagtttccattttgacttctttgtgctatttctgcagggaggtcctggccagtgaagccatccttaatgttcctgataagtctgactggaggcagtgtcagatcagcaaggaagacgaggagaccctggctcrccgcttccrgaaagactttgagccctatgactttactctggatgactaaaacaaagggaagaactttttatgaactccacaggaagtagtaargcttttttttttttttaattaaaagaattttttttgagacaaagtctcgctctgtcacccaagcaggattgcagtggcataactgtggctcactgtagcctcaacctcctgggctctagagttcctcccacctcrgcctcatgagtagctgggaccacaggcgcawgctaccatgcctggcaaacttttttgattttttatagagacaggagggtctccctgtgttgcccaggctggtctgtaatgcctaggctcaagggatcctctgccttggcttcttaacctgctgggattacaagcatgagacaccattcctggcctagaagcctatttttaaagaaactacaatctcccatggggactgtttccctgcctcttttgtgcagtcccatggaacttgcctacagcaagaggcctaagattgaatctttttggggaaaagtcattctaggatgaaaatcctatgttaaggccgggcgcagtggctcacgcctgtaatcccagtactttgggaagccgaggcaggtggatcacctgaggtgaggagtttgagaccagcctggccaacatggtgaaaccccgtctttactaaagctacaaaaattagctgggcgtggtgccaggcrcttgtartcccrgctrctcaggaggctgaggcrggagaattgcttgagcctgggaggtggaggttgcagtgagccaagatcgctccattgcactccagcctgggtgacagtgaaactccrtctcaaaaataaaagaataaaagtatgtctgtcatccagctcctatgtctgttatccagctccaagtacagcttgtgtatatcaacattttcaaaaacctttaaactaccaaatgaaatccagatgtttttccatggttgagaagtgtcttgtgttcatgttgcctgtgaccgttgaaatgaagtagtatgtgtaatagcaggggctagagctttaggcccagctgttactccaaaatcacacagggcagtttctccctgaacaacccaaagtggaaaagggatccaaggcttttgctatttttctcttaaagcattcatcttattcatagataagagcccatttagtccttcggatatttaactcctatgtgccaggcatttttctaagctccaggaccatagtcatgtcccaatatggtccctgttgtcccagagattacagtttaatggggaatagaagggacagatttaagaaaaaaaagataattctcctttggatattgttttaggtgcttgatatatctaatatgtgtctgttgtgctgctgggcagttctaaactcatcagtacctgggttggttacagggctttggggatcatcagggtataggccataggtgaaattaagatagggtaaatacagtcctgagctgaagatgattacctgagaaatatcagtatttaaggagtgcttgaaaatagtgatctaacatttacatagagaaggagcaaagagaatgctacatattaggcgcaaaaagaaaaatatttttacctttatattgggcacttatggtccagacactgtttcatttaatcttcacaaaatctctgtgaggtaggtattacctctattttactcatgaaaaaaaaactgagactcggaaaattgaagattgtggagcctggggtcaacaggcttaggctttttaaaaaacaggccaggtggctcatgcctgtgattgcagcactttgggaggctgaggcaggcagatgacctgagatcaggagtttgagaccagcctagccaacacggtgaaaccccgtctctactaaaaatgcaaaaaattagctgggcgtggttgcatgcgcctgtaatgccagctactcgggaggctgaggcagtagaattgcttgaaccctggaggtggaggttgcagtgagctgagatcacaccattgcactccagcctgggtgacaagagtgaaactccatctcaaacaataacaacaacaacaacaaaaaacaactcaaattactcatggccctgggaatgggggcatttaaaaagttaaccaagggaaccaacctggtttccacaaagatggccacttctgggtcagcccaatcatcagtatccctgggtcctcagcatcccttcctacctcttttgactgggaattacgagattacagccccacctacggaaattgagcacattagcactggccatgctgtacatacagcaaatgagagggcttcatactgttacaacaatctgtaccacaattctctgtgcggtctgcccagctctaaatgacatgtcctcagaggcatcatcatctccaagtccatggaaaccatgcacttacagaaaccagaacctcccataccacatgttactaatgacctacaacatcgacttcgtctgtatcatgcagtgctcaacattctggttgcagcatcacatttatcaataatttgattccatgctgattcctttacttggagtattgagatcccccaggtacagtgaaggtatgaccctcttaaatggaagaccaggagttgtttcccctatgctatggcaatccgccacccggaagcacttgctgcaccaacagcattcccaaagcttgcctctgcagccctgtagcacccattagaaacacttctcacaatgaactactgtgctggcaaacccataactggactgccggacagcaagctctgtgaggcatctaggaaaaaagctcgcgaaatcccgagaaacactcttcactccggaatagcgtcacattcttgagtcatttgggatgacaggggatatcctggagcaggtgtattgggaagtcagtgaacaagaaggctaattcattagtgggcctgctagcgtagtattttaacgatttcgcagcctttaaatcattggtggtctttagcgtgccggatcagctggtggtggagttggaggatagatggcagggatctgaagaaaggtgaagtgtagataggagtagagacaatatgaagtttagaaaagactaattgctggacgcggtggctcatgtctataatcccagcactctgggatgccaaggtgggaggactacttgagaccaggagttcgggaccagcctgggcaacgtagcaagaccatgtctctacaaaaaataaaaaattagccaagcgaggtggtgcgcgcctgcaatcccagctactcgggaggtgagaagatcgcttaattccgggaggtcgaggctgcagtgagccgtgatcgtgccattgcactccagcctgggcaacggagcgagaccccatcttaattaaaaagaaaaaaatacaggagagactgggctgctttgaaaagtggatttgacgggaatgtggggtttggagagatcttatgttttccaagactagaaaaacattgtggttccgttcagccctcccggaaaatacgtaggggacttaaagagcggaccgagtacctgtttgtttccccatcccttagccggcagggctctggcagcgccctgggagaacttagggaagggccttctcgcagcggttaccggaagtgacgcattcattctcgcgagaacaaagacgcgcgagcatcggcggcccggaaccggccttggaacaactgtggaacctgaggccgcttgccctcccgccccatggagcggcccccggggctgcggccgggcgcgggcgggccctgggagatgcgggagcggctgggcaccggcggcttcgggaacgtctgtctgtaccagcatcgggtgaggcggggcgtgagagggagcggcggtgggttggagcggcggtgggtttgagcgtctgtggaacacagggctgacagtgtgggatagatggttggtgggaccttgggcagtatttgggggccagtgggcttgtgtgtgtgtattagagagaaagatactatgcctgtgtgtccaaagttgtatttgaggtactgggcatagatagagctgttgcggggaacttgggtatgactgtcaggctgtgaccaggtgtttagtgagtgtgacagtgcgtgtgtgtctctgtgaatgtggagtgtcagggtgtgtgaggcagatgcacgtcacagtgtgtatgtaggagcacgaatgtgtgagaagagggctgaaggggactgcctttgggaatgtgtgcgtccgtgtgtgtgtgtgtgtgtgtgtgtgtgtgtgtgcgcgcgcgcgcgcgcgcttggaggccatatgatatcagtggggactggagtagacaaggaaggcttcatgatgggtccagagttaagcctttggaagcatggatgggctttggaattggggatgtattccaggtcgggacagtatgagggtgagttggtgcagagcatggcttcaaacgaaaggctatattagtagatggagatggggggcgctctagtaggtggaggacagttaacatcagactcaagaattttactttgatttaatagagaatgtttaaccattgtagtagcagttaaaaaatcatatttgggtcttgtttgtttgtttttgtttttgagacggagtctcactctgtcgcccaggctggaatgcagggcgcgatctcggctcactgcagcctcctcctcccgagttcaagcgattctcctgccacagcctcctgagtagctgggattacaggcgcccgccaccgtgcctggctaatttttttgtatttttagtagagacggggtttcaccatgttggccaggctggtctcgaactcctgacctcaggcgatccacctgtctcaggctcccaaagtgcagagattataggcgtgagccacggcaccaggcctgggacatgtattttttgatataccgataaaagctgtgaaccctttccccagaaaaatgcacagatgcacattcacacaaccatgcattgccatttgagaggttcgtgccttcctaaaggacattttaggtaaatagaccctggactaataattcctgtaatataggctttgttttgttgcctgtaaagtaagtatagtataataattacatgcatcatggatttgagagttaaataaaatagtaatgtgtgtaaagctaaatacggtacctgacccatgaaagccctcaactgttagcacctgctgctactttgttgttgttgctgctatgatcataatgctcctcattaattggccttaaggaaatgtcaagataaaaagtgttgttctaggaaaatggttttgtaaaggataaatttgagtggaacaacatatgggacaagatgaacaggtaagatcttactaaaatgcctgggcttggcttgtgaatagagaagttaattcaagaggaaaagtaataatttgttatctaaaggaacatgggtgtagtgagaaagctcgtaatttggggtgggagaaaggggagataggagtctaccttgggaaaataggcatatttagggtaattagaatgacaactgaaactgttagaactgaggaagttttgtgaaccaggtttctagatagggcataggagaaaatcttggagaaagagaatggaaggtgaaggactaaggcattaagtcctgtgatagcaggataagtagtaaatttaataattctcaccatcagagggaacataacacactaaaaaaaaaaaaaagtgggagccaagtgcttccagtggcatgttgcctgtgttacctaagcctgcctatccgcctggtcataaggaaaaaggatgcatgctggcagcttttgtgacttcttttcttggtccctgggtggggatggatgaattaatcactttttgttttattatggtaaagtatacataacacaacatttatcactttatttttaagtgtacagttaggtggcattaagtacattgacgttgttgtacagccataaccctatctccagaatattccgacttttttgttgttgttgtacatctataaacttcccatagaatattctttgtgaaaaggtagaatttcacagagttgatgaaatataaattaaggagttgaaggatcttacaaagtgggatttttgaaatagataacttattgctccattaacatgagcattcagggctcagtgttgttcatggttgtgcctgattctcatttccatggtggtaaaggcctgcatgggacatagatataactggtcacctgctcataacaaaaggaagattgaagggagtgagaactgtgggtaggctagcatgcagtctatcctagtttccttcttctctatgcaccaggtatcatcttatctctagcttcttttttcctctcaccctccaattcacactaccctatccaagctatgtcttgcttccccacctataatatattttttctgtcctggcccctgggctcttctctctgtattcatacacagcctttattacaactctggtttgtgtcagagattacatatgttggaaattcttttgaactctccttgtgatatcagaaacatagtgtagcctgtttagccctgactgctatttctgagctgcattattaatgttgccagaatatgatggggtctggctatttcctgtaatatgcatcagaatgggtttaatttcagtcagaattggctaaattactagtcacaggcaagagatgttaggttcattatgtagctatggaagcagaagtacactcattggtaggattttttttcttcatgtcatttgaaatgcatacattaggattggagttttttgctttaggcttggttatattaaaactttctcttgctgtttggagtccaggaagccctgaattaccttcttcattttagttatgctagaagctggggcacatattagttgtcttgattaagctctgaaaggggtttgctgaggagacaggatctttttttttctaacatta

SEQ ID NO: 5738 - DNA, 126872 bp, Homo sapiens
  misc_feature (1)...(126872): n = A,T,C or G, or insertion/deletion polymorphism (see Tables 1-2)
tatggagggtggtggaggagcaggaggccttggcaagatttgatggaggacagataggggtgtccgggaggggtctggcatcttcgggggcctaaaaagactgcttacatacaccaccttggatctttcagattgctaagagttttggggggtgtgtcggaagagggggtggtaaaagatgcgatgggatataggaagataacttctggattttagggggtcatattttgatttgcaaaaggagttttggcccttggattttgctttctgaggggtgtttttaaaaaatcaagtcctggacaggagaaaagggctgagggaaggcctggagttgggggtggggagaggcatgtttgtctcagcttaaacgtggctctctggggtgggcccgcctgccctggcctggtggatgggctgatggaggttgctgtgggggccggctygggtcctcaggggccctggggagtgggaacagcactgggggttgaatacctggccccccaggtccagatggccctcttcctgggctctgctgctccccttccccctggtctccatttcctgcctttggcctccatcttgtggcaggcccagggcccagggcgacttccggcccccctctcccaaccatgttccggccccaccacctctggactgccaactcccaaccctgctggccttggccctctgtctctccttgcttttctcttgggttctgacccagggagaggaaggacggacacaggaagccttgggtccctgcccttgctgagacaggaggcagtgtgttggcccctccagtcattccctatttcttctgcctctgaccccaccctagggatcccctgagctgagttcctacagagggaagatggtccaatcttactacactgtgagctcatccccatggtccgtcgccttccagttgcctgctcagcccgtccctggttcctcccaaacgtttttgggggccatgtttgccttttaaggcttctctatccccccgctcctggaggtggtgctggggtcttcccagcactgctatgtgctctcttcctttcaacccaccccggtcctgctcccgccccagcagcacactgtggtttgtacggcactgtggccacgtccaaaccacactgtggtgttagagcgagggtgggggaggcaccgccgaggcttggccctgggaggccatcctggagaagtgacacaaaaaacatctggggccttgtgacaaacttcttgccaggtgggcaaggagagggtggggtatgtaagcacccctctaaaatctccagggcagtttcaagaatactgatggccagagaccctgggagtaagttctgcctcaagagaacaaagtggagtctttgttgcccacacccagcttccctggctctagcagcacagaaatattggcacagggaagcgagtctgccaatattggctgtgctgctccaggcagggtggtgaaaactaccgaggaggggctgagcccccatgggccgaggagagaagagggaacaggcctctcctgctaataatgttaagcagacagcacgaagctgagagggaaatctttattgttttctgtataaaaatgtccatcagatgaaggtcaaaggggttgggggcagatgcttatgcgggaatagcgaggtggcagccccagcagcctttcagccctctctcgtgcaggccttgctcggagtcccaggagatccacaggtccggcatgaacagtgagaggtcagaggtggaaggctcagcaggagaggagaggaggatcagcagaggtcatgagaaggccagaatccagggtcaggctgtctggaacaggaagtaaaatgggccgagatggagcgagcccccagtgtgcttccaaggccactcccacctccctgaaacaccctgctacgtactgatccaatgccctgcgctgtgtatgagagcaccttctcttctgaaacccctatacaagggaggggcccctgcggagaccgtgccctgccatccaggtgagccctttctccccaaccccgtcagctgtgtgggaggaggaggactcctaccctggtcgaagttgagtttcttagctggaggagtttctcctagcccttcaatatccaccacgtcactgttggcatcrgagtcgttcagagcactgagtgtcacatctgggaagggggcataagctaggttctaggttcccctgacagcctctcccccagccccaagcttcccaaagctttgtgcctcctctcccctcccctctgcccctctctgggaacctccacagggacaggaagagagactgacccttctttgacccaggcccaattctctcactaaacctcagatgggacctttaacccctaggcagcaactccacagccctcaccagccttctgtttctttatggggggacccccggcctcagggacactggagctgctgggaggaggggcagctggaggaggtgacaagacaccagatgccaccttcttgggccctttcttgggtgactcagctggaagggggatgccagaatcttcatataccttgcgtttcacagtggcctttatctgggccctgaagaaaagagagaagaggttaggaaaggagtcatcagagagactaacagaagaggggacgggaggggaaggggttctgggagtcccttcataagaatccaggtcggggccccaacccattggtagggttctcactttctcgaagttttacactcactcaggatggatggagtgtggagagtggagtccctgaactgagtagtgggaaaggcccatctcctaattctcttctgggagagacatcaggtagagcttggtgatttacaggtggattgagatttactgatcaactagttcagggtcaccatatccctggaaacactgcagtggggtcctcaaacatttatataaataaccaggggacttccatcatcaaatacaataacagcatctcaggcaacctaaattcacattcttggaaggattaccacagcattttaggaacttctgaccaactgtgacaattctattctttcagtcctcaaggggattctaaaaaactagtgacaaagtagggaagcagctgagctggaaaggagttctgaggacgatggaaccttgggtaaggaggaagaaggctgcccacccgcccttttctggcagccaccctccctcacactgtccgttccttgatgacacagctgatgtgattaagatcgtccccaaatcgcttcacagcagccctcagcatctctatttccgtctccgtccacttcgcgctgtcagaaggggagaggggggatagcaaaaatgggagggggggtgtggagcccgcccacaggctatgcatcccacagccaaccagccgcctccttccgatttctgggaccccttccacggatgcataaagaggtcctccgtaaggggaggcggaaagctcttgaggccctgcgggaaccgggaggaccccaatcacaagaaatcacaaccacctccaccttagacacccctttccaccatcaacgttaaacggctgctgtacacagcacactgaaaccaactcgccaggaagggcttttcaaaacagacccaccaacacagcctgcagccgtctgggggaattccatgaactggggtggttgggagtggcggtggtttgtggtcgacccgttcgcagcagggagaactgtgaaacaggagtctgggctatgggcctgtctgtatttttatctgtcattcattccctcacccaacgatcatttattaacaccgactctgtgctgtgccacgcacaaagggaaactaatgtctgtccctgtgctagagagggtccgtgtctgtgaccgagtccaagcgcccgctctcagcgtccacgtcccagtccgggctcacgtaccccgcaggagaagagtcggccacgggatgcagctgcatcgtcagctccccgagcttcgtgaaggcggcgccggccgccgagaagatctctccgacctgggggcggggcagcgtcacggggggccggcgcccgccctccccgtcccgcccggagcccctagccccaccccaggctcggctcccgcccgccccccgcccggggcggaagagccgcgagccaagtggggggcccgccctcccgtggccgccagggagcgctgtccgcgagggaggtcgaacctttgtggacgctgacgtcatggccccgcgcgcctcctcacggagacgccgccgccgccgctacacgcgagccgggaccacggagagcagggagactgagcggctcgggcccccgcgcaggaagtcccgccctccccgcagcggataggctcaacccggcggctccccgccccatcagacgcagtcgcttagaccgctcggcgcgcccagtcgatggggaaagccttcgcctcacttccgcgccacacttcgctccacttccgctcagagatcgggactttccaggcagaggccgacctctagtctcagccccgtgctcgcccccactcaagcacagacacagggctgaagagagcagattctctttattgagatacgggacacagcgaagggtggagagacggaacagccccccagcctcagccctctccacgggggccggatgccagagatgggagaagggattcagtctctcgcccgggaaacccagtcccacagagggcgccggcaagggtgggacgcgacctgggtgacacggtgcagggagtctttaaatagaggaggggctggagcggggaaacgcgccggggccctagcgcaccatgtattccttgcgcttattgagccgaacttggcagaaagagaagcctccgaggaggaggtaaaggcctgcagcgatgaaacagttgtagctgacttgctcgtaaaggttgtatatgttctgggggccattcctgggggtgggaatgaagcaaaggggtcaaactttaataggagccaacattttctgagcactatgtgcccgacacctgtttaggcgctgttacgtgtattactttattcaatcttcttgaccatcctatggggtgagatctgtcatagccattttgcagaggtggactgagaagcacagaaaagtaaaatacctaaagaggtcacacctaaggtggtgggtttgggatggccgctgaggtctgactccctggctcctaaccacattctcaagaaagccgctctcctctccaagtcctctaacctaggggccctaagcaccgggcctcccagacgtaattctgaccctaggcctcgccacctcccacctgctcccagcccgcctcccccacccgaatacttactcaaaatctttctccgtgaagggaacgtcctcaatcaacacagcggaatggacattgaaaaatattccgagcattatctggaaaaggggaatgggtagactgttgaattcaggcacctgacctcatgttcacttcgtaaacccctcccatttccaatgttgctacaacacccgagcctgagattaaccaaaacgaggtggtggttactggattcggactcagccacctggaacagggcgtgaggtggtgacattgagacaagtggtcgaggcaagggtgggaatagtgaccaagccatctctcccaggaacccagattatcgtcctctctggaggcgtcatcatcacgggacagtgcggaagaggggagggagaaccggcacttcttcatatcatttcttcttgaagtggcggtgggtggattactgggaaaacaaggcccagctacacatttctggaacaagcactctcttttcctcccatgtcctccattcaactcaagcacctctcaggaaccccgctcttgtttctcctaccttgaggggtctccacctttaccagccctggctcctcccactccagggccctccgctccagttcccttttttctttttctttggggacggagtctcgctctgtcacccaggctggagtgcagtggcgcgatctcggctcactgcaccctccgcctcccggattcaagcgattctcctgcctcagcctcctgagtagctgggattacaggcgggcgccaccacgcccggctaatttttgtatttttattggagacggggtttcaccatgttggtcaggctggtctcgaacagttcccatttttcaatttcagtctgtctccttctccggggcctgtagatccccggcccctccggcctgcctgcggcccagagtttcctcgcctcccagccctcccagcccggagcccctcaggccctctccgatccttgccggggagtcccctcaccaacatgatcactccccaggcgctgaggacgatgccgcaggcggccagcttcggcccacagcacaggagcgacgccataaagaagggagtcggggatcgccgaggtgcaagcgggctcggaaagcggtgggagaaagcccaggatgccctcgcaggggggcagagggggcgtggccccggcctcaaccatcccatccgggggcggcaggcggaaaaggctgggctcctctcaggactttcgcgggagacggcgccgtctgaaaccaaaactgctcctggggaaaccttccttgacctctgtagctagggcgtgagtattggaagagcgagggcctccggtttgttggtccccctccccccgcacacgggaatggaaggagctggtatgtcacgtgaccaagcctgtcacgtcacgtgacgaggaactagccttagcgaggccatgggggaaaaagtctaactggcggaactcctgggaactggggcgatgggctcttagtatcggaggattggagccatctgatttttacctgaaattccttagtctctcctgtgttggggaaatggtaagtaagacagattttcaccaacagagagcgtttctatctcttctctactcctcccttttaaaattgagattctgacagygtaaaggagttaggacccccttttggggatcsggcatggttttgtggctttaaaatgctttaaaattgctgaagtttcttggtattggaactgtttctcctaagtaacattttatcatcgcacgtgaaatactgtaactctcggtgccaaatccaggaaaaatgggcggttaggagaagtccagggaaagccgactgagcaggttgtgaaggtaagcagtcctgttaaatgtacacaaaaatgtcactttgcttctctaaactaggaaaactgataggacttttgaataaggtaggatataagatttaaaaatataaataggtcatcccctccaaaaaagccgtttgtatgtttaactggtgagtgacagatctgtaataattayttagaaataggaatgtcgaggcgggcggatcacctgaggtcgggagttcgagaccagccaggtcaacatggcgaaaccctgtctctactaaaaattacaaaaattagctggatgtggtggcatgagcttgtgatcccagccactcgggatggtgaggcgggataatcccttgaacccgggaggcgaaggttgcagtgagctgagatggcgccactgcattcccgcctgggcgatagagactacttctaaaaaaaaaaaaaaaaagaaaagaaaagaagtagggatgtttgaagaacacagttttgcagtgagcaagttgtacccactctagtgaggacagtgacctcagaataattgagagggatcatttgaccttgagaccccaggacctaacaaataaacactatcattggctagaataactttgtagttcttgtccatttattttgtgcatgttgttcttaaaaggcttgtgaaagataacttggaatgtgggaaacacatagatcccagartattaaaggggctggaaaagtagccttaagacatgaattatgtgcctttcatctgggactgtttggagaaagaagccattttggggcagtggtttgtattctgccccaaaaacatgattcttattcagggacttttggggtacatgggtgaataggagaaatatgggtggaaggaatttgccaaagaactgagtcaggaatttgtacattggccaccaggcatgaaggttagttcctgggaatggagagttagctgaggtaagctgatttttctaagaaatccccctgctccatgatcttggatgttttggaagtagggtcagggcctcaggctagtgcagggttcaagggccaaatccagtctgtagcctggctgtgcatgtctcaaacaaagcacatttgtttgtggattttttttgcattttaaatggttgaataaaccaaaagaagactactttgtgatgtaacattcatatctcagtgtccataaagttttattggaacatagtcacactcatttccatgttgtctgtggctgccttcatgctgcagcaggagagctgagtagttgagacagtgactatgcggtctgcaaagcgtaaaaaaggatctagtctttgcagagaaagtttactgctcccctgggctagtgggatactaatgtagggggtttaactgggggaggaaatagagccttagcagcagagactttaggaaagcatgaaattcaagatagaaatgtcagtcctaaagctgatgtgaaatcttgcaggtagagtcactctagggctcagatggtgacactgttctctatrcagctgggcttcagatattcatagggccagtcaagttgctcattccgggctgtaatctccttttcyagcttttccaaatctgttcggaattggtttagcacagctttgggcttggggcctgagaaatatttttctttgtggtgccccagaggcacctgagacagaacaaaggatcagtcagtttctaaagacaaacgcacctagagcccagcccctcactctgatgtttcctttccaactgtcatttccctctcccgagagtcccctctcaccatgtctggctggcggcgactcaratgccatgagatggccatttgaagacaggcctgccggacatcaggtagtgaccccatcactgtggccatcgtcacatcttccttggtggtgggtgggggcatccgcattgtgcatggagcattagggacccaggcataccagtccagctggaggaagaaactgtaaccctagaaccctggtacttagggtttgaactcccatctctccctcaggtcaccttgccttcagggacctgggctttcagctgtccatacctggccctggttgatggcggcatgctgggcagtgcacgtgaagacgcacatggtgaggaaatggcagagttgactctgggactggaaggagacagggaaacctgggcaggaaaggaatagcagttagaagctacagcataagaggagaggaacaaaggctgttgttttgggatgcccatattttagaattgatgaatttgtttattttatttagacgtatttgcatcagacatgcgtttaagtcctggctcagtcacttacacttagttaccataggccagcttaacctatttgaacctcagtttttttcacctgtaaaatatggacgatacctacattataaatgagatgatgtatcaaaatcacctggtctgtaataaatgctcaataagtaagtaataattattgttatggaaggattgggggctgaaaagttctgagtgaccaaatatcccttgcctcaaaaagtggttaagaattgagggatgcggccgggcgcggtggctcacgcctgtagtcccagcacttggggaggccaagatgggcggatcacgaggtcaggagatcgagaccatcctggctaacacggtgaaaccccstctctactaaaaatacgaaaagttagccaggtgtggtggcgggcacctgtagtcccaggtactcgggaggctgaggcaggagaatggcgtgaacccgggaggcagagcttgcagcgagctgagatcccgccactgcactccagcctgggcgacacaacgagagtctgtctcaaaaaaaaaaaaaaaccaattgagggatgcgtggtcggtgactcatgcctgtaatcccagcactttgggaggccaaggcaggaggattgctggtagtcaggtgacagagcaagagcctgtctctatttaaaaattaaaaaataaataaataatttaggaatgcgtaatcctattcccrgacagaattacaagtgtctgcgttataatgtggggaataagtcatggatttccagtgtcacagctgagaggggctcccacaaaggttatctcagtccactcattttgcagtggatatgggggctcagagacccgataatcttttttttttttttgagacggagtcttgctctgttgcccaggctggagtgcagtggcacaatctcggctcactgtaacctccgcctctcaggttcaagtgattctcctgcctcagcctcccaagtagctgggattacaggctcccaccaccatgcccagctaatttttgtatttttagtagagatggagtttcaccgtgttggctaggctggtctggaactcctggcctcaggtgatctgcccaccttggcctcctaaagtgctgggagacccaataatcttatcagttaagtggaataaatataattactctcattttataggtaagaaaatcaaagcccatagagaataaactgtcaggactgcatagttgggaaaaggcagaggctgatcttgaactcaggttcctgactgctaatcccatggcatttttaattttagcctctaaaatgtctgctgggaaaactagacaaaagtgagctatgagaactgaaagagaacaggggggagggtggttagtggaggttaaagttaacatgtgtcatgaactgaatgtctttggctccgaaaaatttttatattgaaatctaatcctattgtgatggtatttggaggtggagccccacatgataattagggtgtgagggtgcagccctcctgaatgggtttgatacctttatgagcagaggacagagtgctagcttgctatctttctgctgtgtgaggatacagggagaaatcggctgtgggcagcctggaagaggggtctcaccagaacctgatcttgaactttcagcctccagaactgtgaggaatacatttctgttgtttataagccacccagtctatggtgtgtggttttttttattttatttttttgagacggagtttcgctctgttgcccaggctggagtgcaatggcgtgatctcagctcactgcaacctccgcctcccaagttcaagcgattctcctgcctcagcctcccgagtagctgggattacaggtgcgtgccacgacgcctggctaatttttgtatttttagtagagacgggtttcactatgttggccaggctggtctcgaactcctgasctcgtgatccacccacctcagcctcccaaagtgctgggattacaagcgtgagccactgtgcccagctagtgttttgttgtagtagcccaaactgctaggagcctaagggactgtactgagaagaactagagagagtttggtcctggaagggtagggtggtgcagattccccagggagaggctccctccagggtaaggaggtttgccacattcccaggattcgccataagggctccccagtaaatgtctgtagttgtctcacagaggcagaggatggtattcacagcctagatctgaagtgtgagggggaggggccgaaggatgagtgacagcagtccaggctggtgcctgtgtgattaaacctaagagctcagcaaaggctttttcttcctcagaggttcaaatgtggggagtgagagttgactaaaggtagtggctagattttggccaaggggtggttagggtggaagagttggattagccaaagaaacctgagccccaaggatcagggtgctgagtttgggtttgaggcaaagcatgtataggattgagcttgcatcaagagctgaccttgcactgtagcaagcgtgcggtattcctggaccctctgtgcgtgctgcacagtggcaggcaggaagagagggagggaaagccagggtgggtccttgtgggcttcggagggaaaatcttcccatttacatcctcagttaggaaaacggaaccatcaggagagaatatgagcccagcagggactgtgcagacccctcccagctgtggatatggcctggggggccccaggatatggcagttcaggggcatctgtgactggggtgtagtgggactaggggttgatggccagggtctctgaggaggacagtycttgggtctctagaattgtcctgagtcggaggaggtgggaatgggatacacatgctttcccgtgtggagggaggaagggaggcgtgatgagaggctggggtcctgtccccagaagggcagggctgggaaggcgccctggsagagtctcccaggagcttcttctgtctctagaatggatcttacctcggtcctgggcctggcacagccccacctccgtgatctcccgacaccaggcctgcagctcagggtcccccttcactatgtcatccctytggtagaagaggtggacgatcccctccacatacctgcccagggggaaaaggcacttgagggcagaaagcccccgcctctgacctctattcctctttctgtggcatctgcccaatgcttccacagtatctgggaagacacctcgcctttgggacatcctcagccctctaaacacactagcatctcatggaagatgtgggtccttagttctaggaattcgcatggttgctgtcatacatcgtcagaaaatcctgatttttccagacacctcccccagtctccccccacagctcccctcacctcctctctctgcctcatcccagtctcctcattttcagagccacccactgtgtcctcacttttcctcatctctccccaggattgagttctctgcttctcctttctggaccttcttgcttttgccccatgctggcctcaggccagagcccccccscccccsrccccaccatttctcagctcctccttactcacctggcaatgatctcccagagccgtaaagcatcatgggcatagagagcacctgggagtcccagcaggccccggtcagccaggtcgtcaggaggacagagggagcagtaggtcagctgagctgccgcccgacggagcaactgtacatggccccctccacctgtgctcactgcctgggacaggagatcacaggtcttagagggggaaacagggctggagaaccaacacatcttccataaagtggggcaaatgtgggattttcagatattaagacatgggtatacagcactttgggaggctgaggtgggtggatcatgaggtcaggagttcgagaccagtctggccaacacagtgaaaccccatctctactaaaaatataaaaattagctgggcatggtggcgggcgcctgtaatcccagctactcgggaggctgaggcaggagaatcgcttgaacccaggaggcggagatggcagtgagccgagatggcgccactgcactccaacctgggcgacagagctagactctgtctcaaaaaaaaaaaaaaaaaaaaaaaaagacatgggtataaaagggacaggttcataggttaagagtgaggacattcacacatagttgatcttggatcctgaaagtggcagatcatggagagatggatgaggcagtcccatgccccgtaccctcctcaccttatcaaaaattcctccatctgagatgagttgggtccgggcccgggtgttgatttccatggtgtagcggatatgggggatcaggaactggagaggaggagattggagggcgtgactggtggaggccatgcttgggtccttcctggtagggcctggcacccagcatggcgccttctcctcttgatgctttcctttacaggctgatctcctgctgttctgatcactcactcttgtgctctccaacttccctgtgagttgggccctggagccagactgaccaggattttaacctacactttactcctcatttgagacttggccaagttaataaccttttaatctgcaatctcttcatttgtcaacagggggcagcaatagactctcttatctcaggggctgtggtgatgctcacctaagtgatgttggagagtgtctattacacataagagtcctggaatagtagctgtctgcttcattgtttctaccttgagtataggtgccttatgaatcagccctttctgattttctttgctacctcctctgtcattcacatcctcttaaactagcctctctgcttatgatcaaagctgcatctccatcttttagttgtttcacagttgggggtttctttaggggatggatggggagaatactttctgtcagaactagaagagctatattcagctacctgtttaagcaaatctttctccacccctacttaagcactgttgggcccctcttctcctgcttttccttagctattgaaaaaaggccatggtctttttttaatattaaaatattttccttagctattaaaatttaatattaaatttaaattaatttaatattaaatatttaattttaaattaaaattttaatttaatattaaaataaaaatattaaaatttaatttaatattgaagcaaaattaaaattaaattaattaatttaattaaattaaattaaattaaattaaattaaaaatattaaattaaattaaattaaattaatattaaaattaaaaatattaaaatttaatttaatattaaattaattaaattaagttaaattaatattaaattaaattaagttaaattaatattaaattaaattaatttaatattaaaattaaaaatttaaatgtttatttaaaattaaatttaaattttaaatttaaatttatttaaattttaattatttatttaaaattaaaatttattaaattaaaaatattaaaatattttccttagctattaaaaaaaggcatggtccttacatgcgtttctttttatcttagactgtttgtcttcctttccacatagttaacatgcaggtttcaagcagttttggtgcttgtctgaattgttgatgctggacactggcaatgaccccaatgacacctttggtgttaagataccaaagcagctcacattaacctgaagcttttcagaagattcatgaaagatgccaaatgtcacggaaaggccaaagtccacatgaggagaaaggatgcctaaggataaacagtccttaataataataattgcaagaactagctgggtgtggcggcatgtgcctgcaatccaggttacttgggaggctgaggcaggaggatcgcttgagcccaggaatttgagactagcttgggccacatagygaaaccctgtctctacaaaaaataaaaaaaattagccaggcatggtggtgcacacctgtagtcccagctactctgaaggctgaggttagaggatcgcttcagcccaggagtttgaagctgcagtgagttatgattacgccactggactccagcctgggtgacagagtgagaacttgtctctgaaaaaaaaaaatttgcaagaactaatgttttttgtagcatttagcttgtgtcacaccattaagtcattttaacctttaataacctcacgatggaacatgtgaggacatctggaaattattgaggccggggttcaggactaagaccccagcaatccaaagtcagagcctgcataggccactgttaagacatstgcaggcttgacccttgtgtgcatctgccagcaactcagctgtccgctggggcatggcattactgtggtgagtggagacacggagaggactgaactaggaaaaggaattgtaagtgtgaatagaggcttcacttgttcgtgtggagcagaggatggggaagcaggagacagcatgagatgaatgaaatccaagattccattcatcagactggtctccatcttgtctatgttaccgaaggggaaaattccagaggcggcacagctatactggccaggcttggggggtcttggtggaggcccccagctgaaacacaatttggttgtttttacccaggacatacttgcatatcttgccaatacatcaaactccatgtacctaaaaccaaacacctcatttttgctgactctggtttcttctaactttactgtttctgacaattactctggtttgtaagcttgtatcatttttgtgctccctctgccaagttccctgtatataaagtatcatcaagattttaagaacattttcttaagcaagcacaggtcttattttgccttctcccagcaatatatatggaactcactgttttataaaattacagtatttctttctttctttctttttatttagagaccgggacttgctgtgttgcccaggctggtcttgaactcctggtcttaagcaatcatactgctttggccacccaaagcactgggattacaggcgtgaaccaccacacccagctcttaaaaccacagtatttctaggtcagtataacacacctgccccagggacttacaggtgtggcagaagcttggacttctggcttttctctctcttgcacccaggcacgctgcagctaccatttcctcccttcactacgttttagattctttccttttcattcctgtcattaccatgctaacrtacatctctatccaccttrctgttgggcaggtatgagcggcttgctggctgttcttccttgccttttggtctgtttctacttagctgactcctcaattgggtagaaacattcttcatcaatactatactgttataggctgtcccttgtgatttcaaactctagtaccagatactgttctctggttggttcttatgggcatcacttgtttttctggctaaatactagatctaaggtaggaatatggcttttkttttactagcagtgttcaagccctactgtgagcgcactgctagactgtcagatctctgagaatttcagaggattcctatataatgttaagtgactaaacttaataaacttaattaaaatcaacatctcaagatattgagacagtctcctcttcactcacaaattgctacaaagagtttttgctgctgcartatcttttgatatggggctgttcctctctctggggtctgagggatatgtgatttaatagattaataagtaccttgaagatggggtgcagtcctgggaggcaccgcatggtggcgacagcgatgacctcagccaccaggtgmgtgttcagcaagtgatactggatctcgtgcagttggaaatctgaatttcggacccaggactttgccaggagccaggcaagtggggggtctgagggcaggaacagtgttggggttggagagctggggytgggaggctgaatctgggagaaagagaaattattgaactcccattccgtatatgacattatagtcagcattcttggggaaacagagatgactaagtaagattattgccttctaggaggttatagtctagcaggaggactgtgaaccctcccagcctgccgctcgctagctggagtgccctgatgtcaggtggaaggcaggagggactggaagaagggggtccagaaggaggccctaacagtggtgtgggagaaacctgctgctttggggtcggcgctcagatggtggtggaatgtgaaggagaagtaggaggtgtaagattattgacagttcttgtcacctgactgttaagaatagtgagagaaggccaggtgcagtggctcacascygtaatcccagcactttgggaggccgaggcaggcagattacttgagcccagaagttcaagaccagcctgggcaatatggcgaaaccccatctctacaaaaaatacaaaaattagccaggcccacatggtggcacatgcctgtggtcccagctactggagggactgaggtgggagaattgcttgaacccaggaggcgcaggttgcagtgagccaagatcacacaactgtattccagcctgagtgacacagtgagattctgtctcaaaaaaaaaaaagaaattgcragaaaagatattcaagagatggcgagggttcagagccagaggccactgagagatgagatagtgattctgaaagtgtagtcctgaactggtagtgtcagcatcactttggaacttataaaaacgcaaactcttagttcccaccccagacatactgaatcagaaagtctggtcatgggatccagaaatctgcatttcaacaggcattcaggtgattctgatgcacactgaagtgtgaggaccattggatacaggatgagaactccargaggccattttgactcttgaaaaagtaattctagttggatgaggcaggggagaygagggtacaggcaaatagtgacatgaagacaagtctcactgagtgaggatggggtttgggagccaagagctgggggttgggtccctgggagcagaggttgaggtgaacagagtgcaacgttgtgggagaggtctggggcccttacctggatgaccatgggctgcagcttcccattgggctccatcttcagcataacgaggggggcagccaggtattgcttctctcctcggatcacgttggctggaattccatccagaaggatgaagtcagcttcaaacagggaaccattctggggacaggagggatgtatccatttttagagttcaaagtctacccccagggggccggggcaaagggcaagagatttagtctagcttcttgccattctcctgcatcagtaccggagycctgttgggagaactagagcccctggtccagttcctctcatcttaaagtgaagaaacagtctggtgagggtagatgtcttgtgtgtggatgtggtggcagatctgggtttggaaccaggcctgctcaatccagttggcatcacaggcattgtaaactgaccacctgtcaaatggccaggcccctttctgatcattcccgaatggtctgcgctctggttttggctcctatcagctcagcaaatgctctttcattccctattcaaatctcacgtcctctgccaaatattccagagagcttcccctactacccctgccaccgcatacagcacacacatgcatacgcacacattttgcctaggcttgtcctcagtacagtccattgcttccaaaccccgctctctttttctagaaagcctccccgattctccccacctgatggcacttcctcacttttctccctgcccatgaacactggagtccagaacactgcggccaggcaatgtcactgttcctgctaacatctccagcccctctctgtgtgctggggatccattctattttccccttcctgctgggagctcctcatagtttcttcccctacatattttatttctgtatttttccagcacaggactgcaccaaggggcaaygcagtactgcagccttcctctgactcagtttggattctctctgtccgttctcaccacactactaaggagagaacagtgccaggcaggggaaggagaggtacctgaagttctttctccagttgagccygaagctcttccatcccygagggcagcactagcctggagggcagagaggtcgagcgtctcaacagcatggggttggcaccattgaggaactggtagctgaacaactcatcatcctgccagcactggcgaaccttctctttggtgggcggtgaaaggaggatatatgtaccacagcctgcatatcccttctccaaaatctaccccaggggttcaggtatataaccctccctgaacccagcttctgcgttttcattctcaaggcctctctgagttgaccagatatgataaggtctcttcttgcraagagttacgggggactgtggagtgtgatgagtcatccagasgggccattaagggattatggagacctcggggaaccactgaccagccagggcactcttctggccccagaagatctgatcaaagtcttctaggcagttccaggagctcaggagggtgtaaacaygtttgagggccatctccagagccctaggacaggtattgaggcttaactcatcagctgatccctcagtccctcaccgtctatcatcattcttggccctcccagcccttatttcactycgaggtctagcctttttctcaccctgccttcagtgtccattcaaagtccagcctcttctcctcatggaatctcatatttggaggtagatcatccttacggtctgcagcgatggtcaggggtaacccttccttccaggtggcccagctaggagttggggacaaagcttcaggaaggatgtcatggtcagtgatggggccaggggcaggggcaggggcagggaaggggtgggacagtggtggcggggttagtttaaggggtgggtggtcaccagtagatctgctgtctgtctttcagttccttctctcgatgcttctggaacatgtccaaagcattgtctcctggcaggcgggctggggagacatcaagacaattggcctcacggctctgtctggtcctatgcccgcctcttgtcctcatctccctgtggttagccgtattccatgttttcagccatgcactgttgcttttatctctggctttgcctcatttgattatccaccagacatgtttatcccatctttgccaactttgcactcctgctttctcttatttcagccctcatcctttgcctgtagataaaaacctcctgtttgccaccatttcttgctccttcactcatcttcccctacctggccttacttcatcaatatctatggttggaaaaaaatcaccttaattaaggtgatgaaatcttagtcacctatacacctacacctactgtctactacagattgctttgattaatttcacatcttaaacctcacctgccacgccttcacctgtcctcaaaagattctacatttgcttttttttttttaaacctcatctttctggatttactatcataatctgtatctatggacttattctgggtcttttctgcatttacactcacctgtctcaaagtcatagatttgatgttccatccctactgccctcactcatctctggattcatctctcttttactcattacccatggttaaaaattcactatttgggccgggcgtggtggctcaagcctgtaatcccagcactttgagaggccaaggagggcrgatcacgaggtcaggagatcgagaccatcctggctaatacggtgaaactccatctctactaaaaaaaatataaaaaattagccgggtgtggtggggggtgcctgtagtcccagctactcgggaggctgaggcaggagaatggcgtgaacccaggaggtggaggttgcagtgagccaagatsgcrccactgcactccagcctgggcaacaragcaagactccatctcaaaaaaaaaaaaaaaaaaattcactatttgccatcctcattcctcctcrtctcctgcgggccagtgtgcttcttgtctttcacgggtgtcttccgtgttattccaaccaaaccagctctccagcatcctatgttttcttcccttagctgtctgctctcacgggtcacccaccccctcctgttccatgtggtcccctcacctgacttctgagtcacctttacatctccttcctactttcactttgcttctctgttttcctggatcgctgcaactcccactttctgtctttgccttcttggaagatgggatctccagatcacttactccctgcctccagcctcacacgcagcctctcttagcctgtgtaaaactttgggaattcataactccttcccgttttctgtccagcaccctgggatccctacatttcacctgccctgggcccatacmtcctctaagtctgctccgaccgtccttaactctgccctcctagccccgcagcagttcccgrgaccttgtgcctccttccccracgccgcctgctcaccggtgccctcgggcaggctcaggatgtcctcgccctgcacccagcggtagcacgggaaggccacctccgcgcaggctccagggccctgcaccgtgatgcggtcgcagaaccacgcgtcgtccaccagccagtggtgcttgcgcagcctcacgaactgcaggagccccaagtcctctgcaacgtcatgatcaaactcctcctcctgtgcaggccggacccaggccagacttagtaggagggacccractgaggccgtttcgaggacagagcygcgctcctgtgcaacctcagtttctcagggcctccaaagacagcatcgcctcgttcccgcccccgcacaacctgctctttgggtctcagacgcccggagtcgggtggaggacgagggcccgcagcgcctggagctgatgctggagcagcatcgcccacgtgggtcccattaactgagctctccccgcgccggttcttggaggagcttcacgtctgacctctggcctcatacttacattggctctgggtcactgggagaaggagctgggggctgccgggaccaggggcgggaaagggagatggggttgagcccagcccgggatcccagctgcggaccctgtccctgatcttgcccacctcgtcccagcttcgtggaagtcccagtccgcgaggtcgcgctgtcacctcgcccccagcctcccgccctcccgccgcgagcccagctcggcccgggcctgggcccggggtccccgctgccctagctcccctcgctccccgcgctgacctcgccccgcgccggccgcagctgcagctccagctccgcctccccgcgcgtcccgaccagccaaagctgcacgcggttgtacgacccggagaagagccaggccccggtggccacgcggatgcggtagcggcccatggcgccccccagcagcttaggcgaggggagccgggtcctgtgcgattcccgggaccgcccagggctgccggcgcctcggggccacttccaacctttaaaggaccggtctgcggccccgccctcctcgcaagttttaggcgctcccaagtccccgccccagactagcccaaacctgcgagcagagcggtagagccggctgtggggactggctgtgcytcctggtcggagcgtagctgcaggatgataaaggggcccgagccagggtgaggccaacggggtgggtgcggcgggaccttcctggacctcccgggaaggcggratcgaggtgggyctgagcccccgggttggagcgaacatagatgagaacacttcccgaggtctccaggtcttctgkggagccaggaggaagtaggggatgagtccatcttccaaacggaggggaaggtctccgcttttctgggctgggacccggggaaggcagtgggccggcttctggaaggtcggcctgggaggccgtgctggggtctggggatgtcccgyggctagacccggcgcggcccatgtgtcctccagtacctgagctctgccgcccttgaacgctgtgcttccgtcaacgaccaggggttccccagggtacctagaacctggaaatgtagcagctcaacacccgctccccaccccgtttcaaatatctgggcgctggggtcccaatgtacaccaaatatcatgggccagacctttgagagaggcctgaggcagggcagtgaaaaactcattttgtccaacctccgaagcgggtacagacaatgttagggacccaggaacaccagtcggggtgttagggtgcgggatggaattgcttagggacctggcctacgtggccagttcccaagaactttgtcttttccaggtgagtgcagccccttccgctccagtaggttccagattaattttttatccccaagctctttcctgctccttcatgggtctcaggtctcctggaaatccaggaacagcaattagcccactgctatttagggcctttgtaaacattgaaggatgattcggagcttaggctttctctcccgtgtcaggaatcagtcagatgaagcctgctgcacgcgtccctgtctagatcttgattcaagtgattatatgcatttggatctccgtggatgcatctggtggcctgggctaggccagtgtaagttaaatctgctttcttgagccagtcctcagaaatgacttggtggcctagttgttggtagaggtaagtgagtgggagttttagccccgccttccagcctccagatcagactctatctcaaaaataaataaataaataaataaaaataaaaaaataaagtgtctgtcccttactggattcaattccctttcttatcttctaggtccactctggcctacatcctctgctcaggactgcaggtcggccatttgctggtccccagttcttccagttttctggggtcaccccattctgtaatatccaaataaaatggctcaaattcccatcctgcctaatagtaggatctggcctttccacacacattttcgtgggttacttttgcctagaaaagagtttgtctcatacctacttccaaaagcactgtttctttgctgttttgtgacttattttctgcccactctagtgtactctacggccacgtgcagagagagggaatgaataattgaaaaaccggattcaagctactgcgcatgctaaatgagtgaatatggctaaacagtgagaacagtgcttggcgtgtagtccctctatgtattagctgctatgattgtattatttacaactgaatgttagcgttgctcctctaccgttcctctccgcatgctatttctccatgtccctctctaggcctagcctctcactagagctcttatcactctagacccttccccctcctgcttttgtttcccttttaagcacatgcgctatgttgggagaatataattagaagcaaaattttctcccaacccagaaaaaacctctccacgaaagtagtgaagaaagaaaacagttttattattgaataagcattaaaccagaatgtgagcacatcacaggcagtttgctaagagactgcaaagacagaaggaagtctcacttttatctagccaagcagatacagcccattacatatgtgttctcaagataaactataaataatctttaggaggactcgatagcaccatttgtcacatatagtgcagtctagagacacctggcaattgtgatgaccatctatgttagctaactggcttaatcagaagaaaaacttctcttttttttttgagatagagtcttgctctgttgcccaggctagagtgcagtggcgtgatctcggctcactgcaacctccacctcccaggttcaagcgattctcttgcctcagcttcctgagtagctgggattacaggtgtgcaccaccaagcctggctagtttttgtatttttagtagagacgaggttttgccatgttggccaggctggtcttaaactcctgacctcagatgatccacccacctcggcttcccaaagtgctgggattacaggcgtgagccaccatgcccagccagcttttcagatttttatgacagcagatagttttgcagctcaagcaaagtgtccatttaagttagtcctaccctcccacagaaactgggaaatgaaggctccatctttcttggtgtttacatttcaaggagatggctcctgggtctttgtgaaagacatccctgggtagtaaagctggcaagaggctgtgtggcttctaaaaatatttatacacgttttgaagacacagaaaataacttacaagttttctggctgggtgcggtggctcacgcctgtaatccccgcactttgggaggctgaggtgggtggatcacctgaggtcaggagtttgagaccagtctggccaacatggggaaaccccatctctactaaaaatacaaaaaattagccaggcgtggtagaggatgcctgtaatcccacctacttgggaggctgaggcaggagaattgcttgaacccgggaggcggaggttgcsgtgagctgagattgtgccactgtactccagcctgggcaacaagagtgagactttgtctcaaaaaaaaaaaaaaaattttacaagttttctaaagcaaattttctaagaaaagagagggtggagaagtctcttcccttactttcaacatggagaactaagcctttaattttttttttttttgagatagagtcttgctctgttgcctagacgggagtgcaatggcgctaccttggctcactgcaatctccacatcctaggttcaagcgattctcctgtctcagtctcctgagtagctgggattacaggcacgcaccaccatgcctggctaatttttgtatttttggtagagatggggttttaccatgttggccaggctggtctcgaactcctgacctcaggtrattcccgccccccttggcctcccaaagttctgagattacaggcgtgagccaccgcgcctggccagtgttttgttatagtagcccaaactgactagcagccttttgttttgttttgtttttagacagggtctcactctgtcacccagactggagtgcaaaggcgccatcacggctcactgcagccttgatctcccaggttcaggtgattgattatactgcctcagcctccccagtagctgggactacaggcccgtgccaacatgccygactaatttttgtattttttgtagagatggggttttgccatgttgcccaagctggtctcaaactcttgggctcaagtgatccgctggccttggcctccctcccaaagtgctgggattacaggggtgagccactgcacctggccattttatttttaaattttgatttgtccctaacaactaccattttgttcttatgtatgccacaggaaggatcaggggcttgattttgtcagcaccctttgcagtaggaaaggccacgtgggcacacgtgtatgccaaatgtaaatcttctttcaaactcccgattccctgctgtctgtgccagtagccaagccaactcccacattcccattacctctctttgcagaacaatttaccttckgtgtgtgttttttttttttgagatagaatcatgatcttggctcactgcaatctctacctcccaggttcaagtgattctcctgcctcagcctcctgagtagctgggattacaggcacccgccaccatgcctggctaatttttatacttttagtagagatggggttttgtcttgttgggcaggctggtctcgaactcctgacctcaggtaatctgccctcctcggcctcccaaagtactgggattacaggcgtgagccaccgtgcccgtcccaggctccacttctaattctagttctctttcaatttctactacatctgcagttagttcctccaagaagtcttgaaccccttgtagtcatccataagggttggaatcaacttcttccaaactcctgttatgttgatattttggcttcctccattgaatcatgaattttcttttttctttttcttttttctgagactgagtcttgctcttgttgcccaggctggagtacagtggcacaatctctgctcaccgcaacctccacctcctgggttcaagcgattctcctgcctcagcctcccgagtagttgggattacaggtgcccgccaccacgcctggctaatttttgtatttttagtagagatgggtttcaggccaggnnnnnnnnnnnnnnnnnnnnnnnnnnnnnnnnnnnnnnnnnnnnnnnnnnnnnnnnnnnnnnnnnnnnnnnnnnnnnnnnnnnnnnnnnnnnnnnnnnnnnnnnnnnnnnnnnnnnnnnnnnnnnnnnnnnnnnnnnnnnnnnnnnnnnnnnnnnnnnaaaaaatacaaaaattagctgggtgtggtggtgggtgcctgtaatcccagctacttgggaggctgaggcaggagaattgctttaacctgggagtggaagttgcagtgagctgagatcatgccactacactccagactgggccactcagtgagactctgtctcaggaaaaaaaaagacggggtttcaccatgttggccaagctggtctcgaactcctgacctcaggtgatccgcctgcctcagcctcccaaagtgctaggattacaggcatgagccacagtgcctggcctcaatcatgaatyttcttaatggcatctaaatggtgactcctttctagaaggttttcagttcattttgcccagatctatctatggcagctatatagccttatgaaatgtatttgtttctttgttactttattattattattattttaaattttagagccagagtctctgttgcccaggctagagtacagtggtgtgatcatagctcactgcaaccctgagctccttggttcgagtgggcctcctggctcagccttgtgagtagctaggactgcaggtgcacaccactgcattggctaatttttaaattttttgtagagagatgaggttgcactatgttattatgttattcagcttgttttgaatacctgggctcaagtgatcctcctgccttgacctcctaaagcactgggattacaggaatgagccaccatgtctgggcccctgtttatttttwtttatttatttatttatttagacagagtcttgctctgttgctcaggctggagtgcaatggtgtgatctcggctcactgcaacctcctcctcctggggtcaagtgattytcctgcctcagcctccccagtagctgggattacaggcacctgccatcacgcccagctaagttttgtatttttagtagagacggggtttcaccatgatggccaggctggtctctaactcctgacctcaggtgatacacctgcctcggccctgttttttaaaataattacagtgacaggtcaaaattactcctgatccttgggctgcagaatgaatgatgtgttagcagtcacgaaaacagcattaatctccctgtacatctccatcagagctcttgggtgaccaggtgcattctccatgaacagtcatttttgaaaggaatgtttttgtgagcagtaggtatgaacagtgggtttaaaatatttagtaaatcatgatgtaagcagatgtgtcatccaggctttgttgttccatgtaaagacacaggcagagtagatttagccaagttctcaagggccctaggcttttcagaatgataaatgggcactggcttcagcttaaagtcaccagctgcattagcttctcatgagagtcagcttgccctctgaagtttttttttgtgttgtttttgagacagagtctcgctttgtcacccaggctggagtgcagtggcaygattttggctgactgcaacctccgcctcccaggttcaagtgattctcctgcctcagccccccgagcagctgggactacaggcatgtgccaccatgcctggctaatttttgtatttttagtagagatggggtttcaccatgttggccaggctgatctcgaactcttgaccttgtgatccacctgcctcagcctcccaaagtgctgggattacaggtgtgagccactgcgtccagccttcctttgaagttttgaaggcaggtattgacttctcctctccagctatgaaagtcctagatggtatcttcctccaatataagactttaaactacaatgaaaatccgttgtttagtgttgccaccttcttcagtgatcttagctggatcttctggataacttgctgcagcttctccatcagcacttgctgcttcaccttgcactyttatgttatggagatggctactttccttaaacctcatgagccaactctgctagcttcctgcagcttccttatctctctcacccttaacagatttgaagaaagttcgagccttgttctggattaggcttggtttaagggaatgttgtggatggtttaatcttctatccggaccactaaaactttctccatatcagtaataaggctatctcactttctttttttttttttgagatggagtcttgctctgtcaccaggctggagtgcagtggtgccatcttggctctcggcaaccttcacctcctgggttcaagcgattctcctgcctcagcctcccaagtaggtggactacaggcgagcgccactacgcccagctaatttttgtatttttagtagataccatgtttcaccatattggccagggtggtctcgatctcttcacctcgtgatccgcccamcttggcctcccaaagtgctgggattacaggcatgagccactgcgcctggccagtgaaggcttttgtgatgagttaaaacatggtggaaaaggtcaaaggggaaatgagcacctgcgaagaggatccaaacccaaggggcaccctggctttataacaacacacactcatgggaatgaattcatttccccgagaatcaatccaggctcatgagagtgagaactcactactgtgagaagcacaccaagccactcatgaggggtccagccccatgacccaaacacctctcactaggccctacctcccaatactgctacactggggattacatttcctcttttttttttttttttttttttgagatagggtctcactctgttgcccaggctggagtgcagtggtgcagtctcaggtcgctgcagcctagacttccctgggctcaagcgatcctcccacctcagcctctttagtagctgggactacaggtgtgtgccaccatgcctggctaattttttttttttgtagagacagggtctcaccatgttgccgaggctggtctctaatgccttgactcaagcaacctgcccaccttggcctcccaaagtactgggattacaggcatgagccaccgctaccagttggggattaaatttcaacatgacatttgatggggacaaacaaaaaaaaaccatatccaaaccatagcattgactatagttaataataatgtatggtatactggaaatgtgctgaagtgttctcagcacaatggaaaaaaggtaactatgtgaggtgatgaatatatgaattagcttgattgtggcaatcatttcaaattgtaggcatatagtaaacatcacgtcatacaccctaaaatagccaacttttatttgtcagtcatacctcagtaaagttgggaaaaaggctttggctgattataaacagttctggtgaaacacatcattcagtattgctacgtcctaggcaagggctgctaatgtgctcttatgagggaatgctgggtgaaagagtatgtgtgtgtgggcacacagagtgtgtttgtgatattacagagaatagagtcagtggagagatggaggcagagtgcattttggagtgtagcatgccttttgagaaatagggctgtgaaggtaacaaacagaaggccagagctggagatgggtagtcagtagagctagtgagagggacaggttaagatgctggaggccttgggtgtaagtgatgaggggaagatcccgagggaggagataaaatctggagaatgcgtggaggaactggccttacatctgcattttcccatccaagtactaaccaggcctggccctgcttagcttctgagatccgatgagattggatgtgttcagggtgctatagccgtagacagatcgtgcattctcagagtgggcaaccacatcttagatattgcaatgattcgtggccctcgaaagggtcagagtacacaaacatatattaaggggttaaaatttcacaaggtagcaggagcggggagcaattaggaaaaaatgccttagggccaggcatggtggctcacacctgtaattctcagcactttgggaggctgaggcgggcggatcacctgaggttgggtgtttgagaccagcctggccaacatggagaaacccccgtctttactaaaaatacaaaattagtcgggcgtggtggtgcatgcctgtaatcccagctacttgggaggctgaggcaggagaatcacttgaacctgggaggcggaggttgcagtgagctgagattgtgccattgcactccagcccaggtaacaagagtgaaactctttcgcaaaaaaaaaaaaaaaaaaaaaaagtcataaaggctccataagggggcaatgatggaaaaaagtagaggaacatggcctgaagtaagagagacaattcttccttcgtaataggaaacaaagcaaaacaaatggaattggcagcaaatcaacttgaaaatgacgtgtggggaaatatcccatttgatgaattgcattttctttgtgaagtgcttggcaaggatctggcttctgagggtcaaggaagttgtaggggcatttcagagatagaaggagagtggagaaagtttgaatagactctgagggcataagagagagagctgaatgaggggctgggataggaatgcttggcatggctgagacactaggtgaaaattggtgatcatgaatttaccgcctgaacgcatgcacctgaacgtcttccattcacttattctggagctggctctactcgacatttcctttttttwatttttttttttttgagacagggtctcactgtgtcacccacactggagtgcagtggtgcgatctcggctcaccgcaacctccgcctcccaggctcaagcggttcttctgcctcagccttctgagtagctgggagtacaggcatgcaaaaccatgcccagctaatttttgtatttttagtagagacgggatttcaccatgttggccaggctggtcttgaactcctcacctcaagtgatccacctgcctcagcctcccaaagtgctgggattacaggcgtgagccaccacacccggcctctaacatttccgtaaagagattgggaggctcatcctggcacccccccttcaagcccccactgctagactagtcttcagggacacaacacccaaccctcggactctcctttcaggacccagctggaagaccagccagagtattttgtatttttcattctatctggaagaagctcagctaaaagaacagttgagctgtagggtccaacagtgggcatgaggggcagcaaaacttcaccccttctctgggatccccggcaacaccccgtcactattccatgctctgtttatttttctctttgctctaaggtttaccttgtaatccttcattgttcaaatcgctgtcactgattgatagagaattttcatgtcttgcctgctgctgatggtgtctttgttccaccctgagctgatccctatttggcagctatcattaacacagagctggtccatgtcacagacttttcctgaaggtttagaagggcagggaccagggtgaaaccagcgaggcactttccttgagtgccacatttaagggggcaccaaaaactcagtgctcaaaataaataacgatttaatgcaatatttaaaacaccaaaatgaatggaagaaatccataatgaacaaactattagaattttaaataagaacaggatcaactgtaaagcttgatattagccatctatcatcttcctaacatacttttctttctttctttctttttttttcagagacagcatctcgtatgttgcccaggctggccttgaaagcctggcctcaagccatcttcctgcctcagcctcccaagtagctgggatcacagggttgtggcatcacagctggctatattcttaacattattttgtaaccattccaacccccagaaatttctctctggctgacttgatccacagcgcctccatcgccatccctgagtgccttgttgtggaaaatcttactttatcttggttctgtttggtataatcggggaaagtctgtattctttcattatgtaaaacaacttatctctcattgtttcatctcctttctgagctctgctctgccagctctctttccaaaaccaaaatggctcttcaagttattttgtaaataataatgggccatctacttcttaacataaatgaatgattttccaaggtcaagttctctggtttcactgacttctccaccagtgtctgtaaactgaaaaatgcagattgactctcttaagattcatacattgccttcctaccctcaagaacaattggctacagtcagggctgtgtgtgtgtgtgtgtgtgtgtgtgtgtgtgtgtgtgtgtgtatgattttgatggaagcaagaaaagtaatgtgttcaatttaatcccacaaaaccctaagtagtagatattatttatctctttaacaaatgaagggatacacttcatttattccttctttagtttcttcattaatggccttgaaatcctaggctcacctgatcctcccacctgagcctcacgagttgctggcactacaggccctcaccaccatgccaggctaattatttttttatttttattttttgtagagacaaagtcaccctatgttgctcaggctggtcttgaactcctggcctcaagtgatccccctatcttggcctcccacagtgttgggattataggtgtgagccgatgtgcctgggcatatatgtttattgtgcacctagcgtacacacacatgcacgtggcattagtctttgttccagtcattttctgagaaggagtgtttaagaggtacattttttgacatcttgcatatttgaaactgtctctattcaacttaaacttgatggtaatttgcctaagactagaatcctggatgggaaataaacttctctcaaagttttgaaggtatgtttgttagtaaaggtataggctaagctctgtaacaaacctcccccaaatacagtgacttaaacatctgattaatagtttctatactggccgggccctggtggctcacacctgtaatcccagcactttgggaggccaaggcgggtggatcacgaggtcaggagttcaagatcagcctggccaagatggtgaaaccccgtctctactaaaaactacaaaaattagccaggcgcggtggtgggcccccgtaatcccagctacttgggaggctgaggcaggagaatcgcttgaacccgggaggyggaggttgcagtgagctgagatggtgccactgcactcctgcctgggctacagaaagagactccattaaaaaaaaaaagacttcctatattgtcattgtctctaataatctccacctctctctctctytctyttttttttttttaccactttcttggaaatttccacctcttctattgaattaaaacttttttttgctattgaacattttctgtcttgttctgtgattgttgctttcagaaaacatcctgcttttrtttcaaagatgctaatcttctctagtatttctgaacatagtaaatatagtttaaaaaatctgtttcttcattattcctattttctctgagtccctctttttaaatatctgttgatccttgatttttttttttttttgagactggctctgttgccaggctagagtgcaggggcgcgatctcggctcactgcaacctccatctcctgagttcaagcagttctcctgcctcagctgggattacaggcatgtgcyaccacgcccagctaattttgtatttttagtagagacggggtttcaccatggtggccaggctggtctcgaactcctgacctcaaatgatccacccgcctcagcctcccaaagtgctgggattaccggcgtgagccaccgctcccggcccctgatccttgactttatttaagagtgaggcaataaaaaaagataatccggactgttggtggggtttttcaatgtaatgagcagagatctggtcaattgataattgacacggttcctcccacagtcagtatttgtaggtcttttctattgggatgcttggtttcttcggagaccaaccttctaatttcccttttggggtgtagatgcccaaccatcagcattattggcagtatttgaagaggactggggagtcaccattcagtgtgttgcttttgttacattttcttttgttccacagggcacatttacctgatgtccgaagtccagygtccccctctgctctakcagacgataaacttctagtcttctgctggagaggagggagaattgcctgacttagtggatgataaaggaatatgggggccatttgctttttatatggactttcttttgtttgtttgtttttttgagacgaagtcttgctcttgtcccccaggctgtagtgcagtggtgcgatctctgctaactgcaacctctgcctcctgggttcaagcaattttccttccgcagcctcccgagtagccgggattacaggtgctcgccaccacgcccagctaatttttggtattttaagtacagacagagtttcaccatgttggccaggctggtctcaaactcctgacctcaggcaatccacccgccttgacctcccaaagtgctgggattacaggcgtgagccaccgcgcctggcctttatgtagactttcaatcaattctactgtgttcagcctcatgtgtacccctaccttcagtagttattggtacagtagcccccyttttctagtggggagaccttctaacttccaagatccccagtggatgcctgaagccatagacataccaaatctatagatacagtcagccctccttatccatgggggcagaacccatagatcccaacccaccgtgtatcgaaaatattagaaaaaatttgcatctgcactgaccagaattcaaaatttttgaatttttcctgtcattatttcccaaataatatagtattacaactttccatatagcatttacatcatattcggtattataagtaatctagagatggtttaaagtgtatgggatgatgtgtataagttaaatgcaaatactgcaccattttatacagcatttgaggattcagcatctgaggattttggtacaagagaggggggacttgtcttagactgtaggaggtcctgaaacagtctccgcctggatactgagggatacagtactagattttttcctatatcgtacatacatctctatgacaaggtttaatatatcaattaggcctagtaagagattaagaacattaggaataaacaaatataaatgcaaattaaaaataaagaaaaaactataaaaataattagctgggcatggtggcrggcacctgtagtcccagctacctgggaggctgaggctggagaatcgcttgaaccctggaggtggaggttgcagtgagcgagatcatgccattgcactccagcctgrgtgacagagcgagactccatctcaaaaaaaaaaaaaaaaaaaaaaaaagaagcaaaaaagaaaackgaaaaaagaggggagcaacaacaactaatataaaatagaataaaatagaatataatagaacaattgtracaatctaactataataaaagttgggtgaatgtggcctttctcaaaatatctgattgtgctgtgctcacctatttttgggctgtggctgactgcaggaaacagaaaccagggaaagcaaaaccacagatgaggggaaacggctgtactccccttcctgagtctttctaagggtttgtgcttattgcttttcctacatactgcaagcatttgacttttaactttccctggtctgctgaattgattaccccttgtttatctgctttcagcttccaaaatatagatgccatttctttctttctttytttttttttttttttcttgagacggagtttcgctcttgttgcccaggctgggatgcaatggtgtgatctcggctcattgtaacctccgcctcctgggttcaagccattctcctgcctcagcctcccaagtaggtgggattacaggcatgtgccaccacgcctggctaattttgtattttcagtagagacacggtttctccattgttggccaggctggtctcgaactcctgaactcaggtgatccacccgcctcggcctcccaaagtgctgggattacaggcatgagccaccgcgcccagccagatgccatttctcatatacttgtgtatctttgcaactctctttgtattggtgggcttatgtcttcctttttaacccatcaactggcattttagtggggagggaggagagtgaagaagggagcatttgttcattccttcatgattaactgcaaaacattatttctttaaatagtgccttccccccatttttctagtccctcctttttgaactgttggaagctgattagaacttctggacctgttctccatgtttttcaatgtttcttcctcacattacaaagccttattctatgtggtgcactttcagagaactccttagctgagtcctccaattcacaagttggctcttcagctctgtccatcctgccattgagttttaatttcaacagttatcttttttttttttttttgagacggagtcttgttctgttgcccaggctggagtgcagtggtgtgatctcggctcactgcaagctctgccttccagttcacgccattctcctgcctcagcctcacgagtagctgggactacaggcgcccgccaccacgtctggctaattttttgtatttttagcaaagacagggtttcaccgtgttaaccaggatggtcgcgatctcctgacctcgtgatccgcccgcctcggcttcccaaagtgctgggattacaggcgtgagccaccgtgcctggccaaatttcaacagttatcattttttactttgaagatcactaattgcttcatttagtaacttccagttcttgtttcatgattatactacccacacttacctcttggaagatattcattatacttatttttaaagtcatatcctgataccttattaatttattgggtgtaagttcctccaattttttgactttgtttctctcttatggtgttaggaacttctcaactgtttggtgagcctttttttggggcacagctgtttacagttgatgttatttactagactgtctgctgtcttggctttcacagctcagttggggagagggtgctgccactgctgtcagggttacaccttgtatttattttcttttttaaaaaaattaaattaagttatttgagtttctggggtacatgtgcaggatgtgcaggtttgttacatgggcaaatgtgtgccatgtcataatggtgattatttaaaagttaagaacaaatgctggtgaggttgcggagaaataggaatgcttttacactgttggtgggaatgtaaattagttaaactattgtggaagacagtgtggtgattcctcaaaggtttagaaccagaaataccatttgacccaccaatcccattactgagtatattcccaaaggaatataaatcattctgctataaagatacatacacacatatgttcattgcagcactgttcacaatagcaaagacatggagtcaacccaaatgcccatcaatgatagactggataaagaaactgtggtatatacaccacggaatactatgcagccataaaaaggaacaagatcatgtcctttgcagggacacagatgaagctggaaaccattatcctcagcaaactaactcaggaagagaaaaycaaacatcgcatgttgtcacttgtaagtggaagctcaatagtgagaacatgtggacacagggacgggaacaacacacattggggcctgtcaggagagggcggaggttgcggggagagcattaggaaaaagagcaaatgcattgctgggcataatacctaggcaatgggttgataggtatttattttctttcttttttttttgagatggagtctcgctctgtcgcccatgatggagtgcagtgacgccattcagctcactgcaagctccgcctcctaggttcacgccattctcctgcctcagcctcctgagtagctgggactacaggtgcctgccaccacgcctggctaattttttgtattttttagtagagacgaggtttcaccatgttagccaggatggtctcsatccctgacctcgtgatctgccctccttggccccacaaagtgctgggattacaggcgtgagccaccgcgcccggccgataggtatttgttttccctgaaagttgggagtgggtgggttgggctgcttgtgaggtgtatgggaggcgtgtgtgctgggtgtgacggctccatactccctgtggagtgcttcctgtggttaccacgcctcagggcatgctcttgcttcctcctgagggagaagtcttctatgtattcctgcaggtactgtaggctacagttcccctttccatctaacctagtattgatgaagggcaggatcttggctttgctcgggaaagaattcaagagcaagcyagtgctggaagaaarcaactttactgaggaggcggctgtgtcacagctctgtgaccgctcccggggagcaggactacagcggaggcaatccgagaggacagtgcagggtggtgtgcagccatatttatgcccacttttagtgacatgctaattaaaggggcacgttattcaggaatagctaggaaatgggcagtaacttctgggtgttgctgtggcaatggtacattgtcatggtgctgataggagtgtcttacggtgatgggcagtgagaggttctttcagcccctctactggtttcggtcagttttgttttgtcttttttttttttttttttgagatggactctctccgtcgctccgactggagtgtagtggtgcggtcttggcccactgcaacctccgcctcttggattcaagtgattctcctcsctcagcctcctgagtagctcggattacaggcatgaaccaccacgcctgtctcatttttgtatttttagtagacacagggtttcaccatattggccaggctggtctcgaactcctgacctcaggtgatctgcccacctcggcctcccaaagtgctgggattacaggcgtgagccaccatgcccggccttcagtcagtttcaatctggtctggagacgagtcccacctgcctcctacctcagtatgatttctgtctttcagcatgttctctctccccagtccagcaagcatttctggtttttgagcataattattaatttattaataatatgcttctgttgtttgtgtggttagaatttggtgtagaagggtagactgcagtatctattagttcatcatcttataaccagtattggatattttgttcttcttctccttttttttttttttttgagacagggtctcactctgtcacctaggctggagtgtggtgatgtgatcatagctcactgcagcctcaatctcctggcctcaagtgatcttcctggcttagcctcccaagtagctgaaaccataggcaggcatcaccacgctcagctaattttcttatttttgtagagatggggtcaacctatggttacccaggctggtctccaactcctggactcaagggatccttccgcctcagcctcccaaagtgctgggattacaggcatgagccaccgcacctggccagatattttattttacatcaaatccccttgcgttggtgacggaaaagatttattttaaaacagttttgtcattctcaaattatgaatcaaagaagcaaaaagtagtttaactcatatatcctgcttcaccagtttgttacaaaattaggttacactccttttaatatttaaacaattctgtgcctccaccctgactactagaatatgttcttttccattctccaggatccttcttccgtgatgttygctaacagctctacagtacttactttgggccagacatttttctaagtgctttttacatataataactcataacaactccggactccttagagaggcttgttaagttttatgggttagcacttcttattatctttggaagaacaaagcctgaaaacctgctcagtcagccagagattcctgttctctttggctgttgttgcttttactcacatatgatatttccggtgaatctcagggtgtcctactatttttctgctagtctactgctaggagagtaggtccccattgaacactggtcaatgagagtatcacatcttcttggacagtgattggttcaaagatggacatatggtccaagatgggctaatcagagctaacgaggctttttctggggctttgatggaaatagaatgaaatctttgtgtttccatggtggctgccaagctggtagactacaggcctgttgactccagtgaccctcttggagaaagcctgtcagagaataaagccaacagacaggaaagcaaattgaggtcacggagagggagcaagagagtgagccttcgtcctgatgatattctttgaaccccctgatgcagccatgcctgaggtcagactaaccctgaccttttatgttataggaaccaataatttccttttatttttattgttctttttttctgtttccctccaacttaggtgagacaagaatgcctattttattttattttggtattttttatttttttgagatggagtttcactcttgttgcccaggctggagtgcagtggtgcaaccttggctcactgcaacctccgcctccctggttcaggtgattcccctgcctcagcctcctgagtagctgggattataggcatgtgctaccctgcccggctaattttgtatttttagtaaagacagggtttcgccatgttggccaggttggtctcgaacacctgacctcaggtgatccacccaccttggcctcccagacagctgggattacaggtgtaagccactgcaccagcctaaaaatgcctatttttaaaagccactttgaattcactttctgttacacgtagacaaaagagtcctgagtaaggccagaggtgaggcagaggtacggtctctaggctggagcacctgggcagctgtagactgtggctaaaaaactactgacttcaaacaatgtaccagcctgtgagtggcgttcttcctggcagtccaggatttgtgcaagtgagtttgcatgtggagtgaatttcttgctatcctcatacctgggttttttttktttttttttttttgagacagagttatgctcttgttgcccaggctagagtgcaatggtggcatctcagctcactgcaacttccacctcccaggttcaaatgattctcctgcctcagcctcccgagtagctgggattacaggcrtgcaccaccatgcctggctaattttttttttttgtatttttagtagagatggggtttctccatgttggtcaggctggtttgaactcccgacctcaggtgatccgcccacctcggcctcccaaagtgctgggattacaggcgtgagccaccgcgcccagccactgggtcctttttgtggggatattttctcgaaattgctgggaccttcaaccctcaggggtgggaagttggcatctcctaggtttttttttcatatttctatgggtgagtcagccaggataaaggtcaatgcatttgagtatgagaagactgcctagtgatggccttatagtttcatgttgactcactatttaatatttcttttaaaatttttcatgtagttggaagtagtcatcccctttttttctggakaattattattattattattattattattttattattattatcttggttcctgcctattaatcttaggagggatagaagacagttgtgttagcattagtctgctttgtgttgctattagggaatacctgaggctgggtaatttataaacaaaagaggtttatttggctcacagttctgcaggctgtgtaagaagcatagtgccagcttctgcttttggtgagggcctcaggaagcttccaatcatgttggaaggcaaagggagagcaggcatgtcatatggcaagagagcaagcaagagagagtgagcaagaaggtatcacaagctttgaaacaaccagatctygtatgaactcattaccactcattacttcaaggatggcaccaagccattcactagggatctgcgcctatgacccaaacacctcccagtaggcccacctccaacactgggggtcacatttcagcatgagatttggaggggccggatattcaaatcatatcgacagttctgtccaccagctcccagaggaggtcctttaaagtcagccaccttgatttggcatctcctattcaacttgtattttcacacggataatcttccaaatttctctatcattatgtagagatcaccctaccactggccagctagtttgtgttaatgtttttttttgaaatggagtctcgctctgtygctcaggctggagtacaatggcgtgatctcggctcactgcaacctccgccttccaggttcaagtgattctcctgcctcagcctcctgagtagccgggattacaggcgcccaccaccacacctggctaatttttgtatttttagcagagacagggtttcaccatgttggccaggctggcctcgaactcctgacctgaggtgatccacccacctcgacctcccaaagtgctgggattacaggcgtgagccaccacgcttggctctagtttgtgttaattttatagtaatatttattatcttttcagtggyttctggtatctggaggtgtttttgcaagcagcagcaatactttttttgggagtgcgtcttgggtggggtttttaaagtctccctttcataaatctactttacagcattaatctgtgaggacttgcagtctccacctaacctcaaaaagtaacatgtaaaatcggtgacatsaagattccactgatgtgtgattcagaaatgtcacaccacccgctcatgccatggtgttatcaacattaaaaaatattctgtgatttattttataaaacaatagctttaaaaaataaactttaaattttagaatggttttagatttacaggaaaattgcaaagatagtacagagaatttatcaccaacgttttgaaatttgtttaaaaatgtttaggtttggggttctctttggggttatttgtggtgaccctgtactcttgtataacggctaagtaaaatatttcaagyagtagctggatctcagtctcctgtaatctgagtacactatatcaagaaactcctctattgaagcagcatttccctcttattatatctatacaactgtggttgctttctggtttatagtgggatacacttctgcacagccagtgaagtgattgatcagtgaaaataggccgttaaggttccacctatcagattttgaggataatatgaggatgcacaatatatgactttgttttatacaaagtatcaatgttagtaaggcttttgcatatgtgtaggatatgtcttacaattggattggaccttctcaatcatcttaaacccaaatggccaaatatgccgtattttgtaacaaaaaatatacagttaaatattttactgtatcttaaattattttgttcttttctttttcataaaatgatataatttgattatctttctaatgttttgtaaagggattttaaatcaagtgtatttgaggtagagctcatgtacaatacaatgtattcatttcaaatgtgcgtttccaagtttcagcaaaygtacacacccatgtatccatcactagggaacattttcatyaccttaaatgttcttttgtgctcataccagtcagtctccctggctccaggaaacagctggtctgctttctgtcactacagatttgtcttttctaaagttgtatataartagaattayatataatatactcttctgtatctggctttatccactcagcatcatgtctttgtaatttattcacttttttgtggctatcagtaattcattacctaaaacaatttcttggctgggcatggtggctcacgcctgtaatcccagcattttgggaggccaaggcgggtggatcacacggtcaggagttcgagaccagcctgaccaacatggtgaaaccccatctctactaaaaatacaaaaattagctgggcatggtggtgcacacctgtaatcccacctactcaggtggctgcacatgtaggctgggtgcggtggctcgtgcctataatcccaacactttgggtggccaaggcaggtggatcacctgaggtcaggagttcgagactagcctggccaacatggtgaaaccccgtctctactaaaaatacaaaaattagccgggcgtggtgacaggcgcctataatctcaggtactcgggaggctgaggcagcagaatcgattgaacccgggaggcagaggttgcattgagctgaggctgagatcgggcaactgcactccagcctggcgacagagccagactctgtctcaaaaaaaaaaaaaagaaagaaacctgcatatgtatccccaaatctaaaataaaaattgaaaaaaaaaaaaagggctgggtgcagtgggtgcagtagttcactcctgtaatcccagtacttttggaggccaaggcttgtgcatcacctgaggtcaggagttcaagaccagcctggccaacatggtgaaactctgtctctactaaaaatacaaaaatgagctgggtgtggtggmgggcgcctgtaatcccagctatctgggaggctgaggcaggagaatcacttgaccctgggaggcagaggttgtggtgagccgagattgtgccactgtactccagcctgggcgacagagtgagattccgtctgaaaaataaataaatgaatgaataaataaataaataaatgtaaaaaaaattttaaatagaaaaaagcttgtgaaattaggatataaagaaaaaattcatacaagtgtaaaatatgtttgtgttttaagctaagcattactacaaatgagtcaaaaagttaaaaagaattaaagagttaaaaagaattaaagagtttataaagtaaaaaaattatagtaagctaaagttaatttattattgaagaaagaagtttttttgttttcttttgagacagagtctcactctgtcacccaggctggagtgcagtggcgcaatgcgcgatcttgactcactgcaatctccgcctcccgggttcaagtgattctcctgcctcagcctctgagtagctgggattacaggcgsgcaccaccacgcctggctacattttgtatttttagtagagacggggtttcagcatgttagtcaggttggtctcgagctcctgacctcgtgatcttcccgccttgggctcccaaagtgctgggattacggtgtgagccaccgtgcctggccaaaagaagtttttaaagataaatttagtgtaggggagatgtacaatgtttataaagtctacaggagtgtccagcaatgccctgggtcttcacgttccctcaccactcactcactgacccacctgcagcaacttccagttctgcaagttccattcatggtcagtgccctgtacaggtatgccattttgaatctttaataccatacttttactgtacattttctgtgttgagatacacaaatacttacaattgtgttgcagttgcctacaatattcagtatagtaacgtgttgtgcaggttgtttgagcaatggactatactatatagtctaggtgtgtagtgggttataccgtctaggtttaagtgcactccatgatgtatgcacaacactgaaattggctagtgatgcatttctcagagtgatgtacatctcagaatgtatccctgtggttaagtgatgtgtgactgtatttaaaaaaggctgttctacttccttgtggcctctgtgattgctgatgagaaatctgctgtcactcaaattatttcttcctgaaggtataatgttgtctgtctctcccattgttttcagaaatgttttctttgtctttagttttcagaaatttgattatgatgtgtctttggcatagatttctttgagtttactctgtttggggtttgctaaggtaggtttagatcttttgccaaatttggggacatttcatctatcatttttttgaatattttttcagctccaccccctgtctcctttccttttgtgactaaagtgatgtgattgctggatcctctgttgtagcccctcaggtccctgagattctttttattttattttattttgtttttctgcccattttctttctgttgttcagattgggcaatttctattctgtcttgcatttcgttaatttttcctctgtttcccccattcgctagtaagcccatatattgagctttttatcttggttwttctatttttcagttctaaaatttccatttggttctttttaaattttttatttctcagctgatatttttcattttctatttgtttcaagtgtgtttataattgctcaytgaaacctttttttttttttttttttttttttgagacaaagtttcggcctgtcacccagactggagtgcaatagtgtaatctcagctcactgaaaccttcgcctccctagttcaagcgattctgctgcctcagcctcctgtgtagctgggattacaagcgtgcaccatcatgstcggctaatttttttgtacttttagtagagatggggcttcaccatgttggccaggctggtcttgaactcctgacctcaagtgatctgcccccttcagcctcccaaaatgctgggattacaggtgtaagccaccacgcctggcccagcaggggaattttaagtgtgccttgtcccagccaggtaagggtagaaatccaggctgccactcagcatttgctaatgggatggcaacagggttgtggttctttccatgatgtttggcaaggatagtgtgatttttgtctaaaagttttctgtcttgccaaattagtcctttcctggtcttttggccagagagaccaggctttcttggggattttattttatttttttcgtttgcgcccattggtctttccagtggtttctccagcatccagttccagatatatgaggaagaaaagaaaacccagagaactcactgccatgccattcccaaggtcccaaggcttccaattgttctgtcttctctccaccttcaagagccttttagtgtttgttttatctataatatccatggttttagctatacttagtgggaagtataggaagaagtgcctccatttaatcttaaattcattcctttttatagctgagcaatatttcattgtatagaaatgtcacaatttgatcatccgtttcatcaacctgttgacaaacatttggattgtttccagcttttggctttaggaaacagtgctgctttgaacgtaatttaatgctgttatgaatatatgttgtcgggtctttgtgtggactgttttcacttctcttgggtaaacacctaggagtggaattgctgagtcatgtggtaattgtgtgtgtaactttatgagaaattgtcaaactgtttttcacaggagttgtaccattttactttcctaccagcaatgttccagttgctctacaacctcaccaatgtttggttttaatagtcttttaagttttagtcattctagttttaatttgcgtttctctggtgactgatgatgttgaacatcttttcatgtacgtatttgctattcatatagcttattcagtgaagtgtctgttaacaaatttggcctctttttattgggtcgccttcttgttatgaagttgtagaagttctttatatattctgaatacaatctttcattagatacgtgttttacaaatctttttctctcagtctgtgccttgtgtttttgtagtctttttaaaaagaaagatttgttggacttgaaattttcattgttttaactgtgtcttttgaagacaacaagttttaaattttgatgaagtttgttctttttttcttttgttgcttgtatttttgtgtcttatttaagaaaactttgcttcagccaaagtcacaacattactctcctatgttttttgtctaaaagttttatagctttgggaagccgaggtgggcagatcacgaggttgggagtttgagaccagcctggccaacatgrtgaaacccccgtctctactaaaaatacaaaaattagctgggcatgatggcgggtgcctgtaatcctagctactcgggaggctgaggcaggagaatcacttgaacccaggaggcagaggttgcagtgagccgagatcacaccactgcactccagcctgggcgagagggtgagactctgtctcagaaaaaaacaaaaaagttttatagcttcaattcatatactgaggtttattatttattttgaattatttttatatggcgtgagataaagttgagctctattgttttgcctatggatatctgattattccagcaccttttgcgaagattatcctctattatcttgatacctttgttgaaaatcaattaattatatacatgtaggtctatttctggactctgtcccattgatctatatgtctatcctgatgccaacactcttgctaataatatatattaccgtttcatatattaatatctattactgagctagctttatagttagctaagtcttgaaagtcagatagtatcagtcttccaactttgttcttatttttctagattgttttggatcttctagatattttgcttttctatttaaacttgaaattctgcttgtctccttctataaaatagctgtctgaggttctgatttttattgatgcctaaatcagtctaggaagaattgatgtctttttttttttttttttttgagatggagtctcgctctgttgcccaggctagagtgcaatggtgtgatctcagctcactgcaacctccacctcctgggttcaagcaactctcccgcctcagcctgtcaagaagtggattacaggcacccgccaacatgcctggctaatttttgtatttttgtagagacagggtttcaccatgttggctaggctggtcttgaactcctgatctcaggtgatccgcccgcctcggcctcccaaagtgctgggattacaggcatgagccaccacgcctggctgaaaattggtatctcaactatactgagtcttctgctccatgggcatggtgtacttctttattatttatttatgtgtcaacgtctctcagtattctgtagaatttcaattttcaattttggtcatttcttgtgactttgaaaccagttttattttctttctatcttcctctctctatccctctatccttcttttgccttcttccttctcttcctctttccctcctttctatagttttttattctttttttccttttaaaactcagccatatagtacatatcttgaatccttgttgacttttcatcgatgtattacaacttaaaatgcattctttagacaaatacatttggcaaaccttaaaatgacgttaggcagcggttgcagccaagcacgcagcactttgtgtggagaagctgttgtgcgtagagtagttgttgagagcgcagaccatggatccagaccacccgtgtttgcaattctgtctccgttattactagatgtgtcatcttgggaaagttatttcatctttgtgcctcagttgcttcatttgtaaattgtgaagaaaagtacctaccctgaatgatttttgcgaaaattaaaggtcaatacaagtgaaatgatcggaatagtaactagtaagcactggtttagtgtatgataataactactattattatgacccactgtctactgggaaaagaagccttgcagtgaaaacacaaataaaatgtgtaagaatcctgactggcatggccaggtgcggtggctcatgcctgtaatcccagcactttgggaggccgaggcgggtggatcacctgaggtcgggagtttgagaccagcctgaccaacatggagaaaccccgtctgtactaaaaatacaaaattagccgggcgtggtagtgggcgcctgtaatcccagctactcgggaggctgaggcaggagaatcacttgaacctgggaggcggaggttgtggtgagctgagattgctccattgcactccagcctgggcaacaagagcaaaactctatytcaaaaaaaaaaaaaaaaaaaaaaaaaaaaagaatcctgactgaagcctaggagcacagagattggaagagtcaggggagttttcaatgagaagttaatactgaagtctttagactacttttattcaggtatgattgatatgaaaagctattcctatttaattatcacatatcaatgaatttgcagttaaatatatgcctgtgaaaccaacactaccatcaaacccatcgtcatctcccaaagtttcctcctgtccccttctgtgataatgatgatgatgatgatgatgatgtgtggctcttttttttttttggcaagaacacttaccataaaatctactcttttagcaattttaagtacaaaatacagcatcgttagctacaggcggtatgccatataatagatttccagaacttatttatcttgcataattgaagcttcgtactctgtaattaccacttcctcattttcccctccctgcatcccttgttttttttttttttttttttttttttttttttgaaacaaagtctcactctgttgcccaagctggagtacaatggcatgatctcagcttactgcaacctctgcctcctgggttcaagcgattctcctgcctcggcttcctgagtagctgggactacaggcacccgccaccatgcccagctaatttttgtgtttttactagagacggggtttcaccatgttggccaggctggtctcgaactcctgacctcaggtaatctgcccacctcgtcttcccaaagtgctgggattacaggcgtgagccaccgcgcctgaccgacatttgttatttttgaatttttgataatactcatgctaacaggtatgagattatgtctcactgtgattttgatttgcatttccttgatgatgactgatgttcaacacctttttatatacctgttgggcatttgtatgtctcctttggaaaaatgtttattcaggtattttgcccactttaaacatcaggtttttttttttttttttgctgttgagttgtatgagttccttatacatttggaatattaaccccttatcagatacatggtatgcaaatgttttctcccattctgtggttgccttttcattttgttgattgttttctttgctgtgtagaaactttttagtttgatataattctatttatttttgctgttgttgcttgtgcttttggtaccatatccaaaaatggatatggattttgatggaccccccaaattattgtcaaaaccaatgtcatagagctttcctgtatgttttcttctaacatttttatgatttcaggtcttacatttaagtctttaatccattttgagttgacttttgtgtatgttataaataaggtctaatttcatttttttaatgtttatgttcagctcttttgtttttgctcacaatttctttagatattagaagtcttttgtagctcaatacaagttttaggatttcttttttctatttcagtgaaaaatgccattggaattttgaaaggggttgcagcgaatctttagatcactttgggtagtagagacattttgataatattgatttttcctattcatggacatgggattttgtggaataggtttactgtgcactgattaccaacttccctgagtccagtaagactgaacacacttatacgcagcaaattaaatatagtggatttattacctacagataggcagcaagggacaacagaaacccagtgttcattgcaagcattcccggagtctctggaaaactgcttgtggtggatggagtgtcatatgtgcatgctccacctgcattgcagctgagggacctcctcaaaaaaagcagcctgccctggcttttttttttttttttttttggagacagagtctcactctgttgcccagactggagtgcagtggcatgatcttggctcagtgcaacctccgcctcctgggttcaagggattctcctgcctcagcctcctgtatagctgggactacatgagtgtgccatcaggcctggttaatttttgtatttttagtaaagatggggtttcgccctgttgcccaggctggtctcaaactcctggcctcccaaagtgctgggattacaggtatgagccactgcacctggctggcttttttttaataccctggggtatgtgacatactgggctaaatcactgaaggacatcttatttctaggggagactggaatagagcctgggctattctggccaactccttatctcaggatggcgaattcccagcacattttatagttattcttgggaactacaagcaagaaaggggaagaactaagtcagtgcaagtctacctcctccctaaataactgtcctgcagatatctttccatttatttgtgactttccaatatatttcattaatgttttatagttttcagtgtataggtctttcacctccttatttaagtgtattcctaagtattttattcttcctgatgttattgtagatggaattgttatcttaatttcttttttggatagttcgttgtcagggtrtagaaatgctactgatactgtaggttggtttttgtatcctgcaactttactgaattcatttattagttttagcagtttttttggtggaatctttagggttttctacatataasatcatgttagcaaatgagacaatttaacttcttccttttctatttggatgccatttcattctttttcttgcctaattgctctggctaggccttctagtactatgttgaatagaagtggtgagaatggatatccttgtcttgttcctggtcttagaggaaaacttgactttcactgttgagtatgatgctagctgtgggcttgtcatgtatggccttcttatgttgagttacattgttcagtacttaatttgtaaaaagattttatcatgaaaagatgctaagttttgtcagatgcttttctgtatctattgagatgatcatttttatccttcattctgttactgtaatatggatcacatttattgatttgtgtattttgaaccattttcgcatcccaggaataaatctaacttgatcatggtgtattattcttttaatggattgttgaattttgtttgctagtattttgttgaggattcttgcatttgtgtttatcagggatattgtctygtatttttcttttcttgtagtgttcttatctggctttgggatcagggtaatgctggtcttgtagaaacagtttagaagtgttccctcctctttaatttttggaaaaaactgagaaagattggcattaattctttttaaaggtttgtagaattcaccagtgaagccatctagtctttgttagtgctctgttcagattttgtatttctcctgacttagtttttgtaggttgtaagttctgagaatttatccatttttttatgctacccaatttgttggtgtataattgctcacagtaacctcttctgatcctttgtattttcatggtatcagttggaatgactcatccttcatatataattttatttatatctcatctctttcttagtttagctaaaggtttgtcaattttgtgtttttcaaaaacccaactctttgtttcattgatttctctttattatttttctagtctctatttcatttatttctggtctaaattttattattccttttgctaactttgggctttgttcttatttttgtatttctttggggtgtaactttaggttgtttatgtgagawcttttcttttattaacgtaatcatttgttgctataaacttccctccaataactgcttttgctgcatcccatacatcccattttggtttttgtttgtttgtttgtttgtctcaagatatttttgtctcttcttttaatttcttctttgacccattggtttttcaggagtgtgttgcttaatttctgcatatttgtgagttttccaattttcctcctattattcctagtttcatttcattgtgattggaaaagatatttcatatgatttcaatcttcgtaaatttgttaagacttattttgttgcttaacatgtgatctatcctggagaatgttccatgtgggcttaagaagaatgtgtattttgcttctgttggatagaatgtcacgtatatgttcattggatctgtttggtatctagtgtttaattccactgtttccttatttattttctgtctggatgatccaaccattgttgagtgggggtattgatttcttctattatgtattgctgttttatgtcttcctgatgaattgacccttttgttagtatatataatgaccttctttgtctcttatgacagtttttgacctgaagtctattttgtcacatgtaagtatagccacctttgctctctttggttatcatttttatgggatgtgtttttcatccattcactttcaggctatttgtgtccttaaatctaaagtgagtctcttgtagacagtatatagttgggtcttatttttaaaagtccatttattgacccggtgcagtggctcaggcctgtaatcccagcactttgggaggccaaggcaggtggatcaccaggtcaggagttcaacaccagcctggccaagatggtgaaaccccatctctactaaaaatacaaaaattagctgggcatggtggtgggtgcctgtaatcccagctactcgggaggctgaggcagagaattgcttgaacctgggaggtggaggttgcagtgagctgagatcaggccactgcactccagcctgggtgagacagcgagactccatctcaaaaaaaaaaaaaaaaaaaattccgtttatccactgtatgcctcttaatgagagaatttagtctatatacatttaaagtaataattgataggtaaggacttactattgctattttgttaattgtagttcctttcttcctctctcgttgtcttcctttgtggctttattattattattgtttgtggtggtatgctttgattcttttctttttatcttttgtgtatctactacaggattttttttgtgattaccacgaggcttacataaaacatcttgtagttgtaatagtctattttaagctgataacaacttaatttttattacatacaaagactatatacttttactcctccccccacattttatattatttatatcacaatttacagctttttatattgtgtatcgaactatataccatcatcatggtattagagaattgtgagtttgactatatacttacctttatcagtgagtgtatgttttcatgttgctgatacatattcctttcatttcaacttgaaggtctccctttcatatttcttgtaaggcaagtccaggggtgatgaacttcctcagttttggtttgtctgggaaggtctttatctttctttcctttttgaaagatggctttgctgagtatgtttttggttggcagttttttttcttccagcactttgagtatatcattccactctatcttggtctgcagggtttttggtgagaaacccactgataatcttgtggaggtttctttgtatgtgttgagttgtttttcttttgctgctttaaaaattctctggtaaaaggaatttgaggagataaaaaataattaaaacaaaacaaaaggaagaaaattctttctttgtctttgatttttgactatttgattataatgtgtcttggtgaagacctctttattctcaatgtatatggaattctttgggcttaatggatctgagtgttttttttttctctttacagatttggaaagttttctgtcattatattttwtttatttatttatttatttwtttattattattatactttaagttttagggtacatgtgcacaatgtgcgggttagttacatatgtatacatgtgccatgctggtgcgctgcacccactaactcgtcatctagcattaggtatatctcccaatgctatccctcccccctccccccaacccacaacagtccccagagtgtgatgttccccttcctgtgtccatgtgttctcattgttcaattcccacctatgagtgagaatatgcggtgtttggttttttgttcttgcgatagtttactgagaatgatgatttccaatttcatccatgtccctacaaaggacatgaactcrtcattttttatggctgcatagtattccgtggtgtatatgtgccattttcttaatccagtctatcattgttggacatttgggttggttccaagtctttgctattgtgaatagtgccgccataaacatacgtgtgcatgtgtcttcatagcagcatgatttatagtcctttgggtatatacccagtaatgggatggctgggtcaaatggtatttctagttctagatccctgaggaatcgccacactgacttccacagtggttgaaatagtttacagtcccaccaacagtgtaaaagtgttcctatttctccacatyctctccagcacctgttgtttcctgactttttaatgattgccattctaactgatgtgagatggtatctcattgtggttttgatttgcatttctctgatggccagtgatggtgagcattttttcatgtgttttttggctgcataaatatcttcttttgagaagtgtctgttcatgtccttcaataagctttctttccctttctctttctctggtccttttgggatttctataatatttatattagtttgcttgatgttttcccataagtccagcagagttgagccagctgctaagatccatgcctgttgttaatgttcatgttctctctgcagcatttaatgtgggccatgcacagtggtgtgttgggccccatacatggtggggtggggcatgcaggttgcatagactcgttgggtggagggtcctcacgtgagtcatctggtgggatttgtgggcaagtctcctgctggagtctgtgagctaagtggcagaatctgtggttggttgttgaaaccacatgctggttgctgtgcagtccattcccttctccctgttcctagatgatcagtcatgctgatcatctgtattctgggcagggagacagaagtgagcctcccgggcaatgttcttcttgctgatcatctgtattctgtattcagtgttcttcatgctcatcatctgtattctgtattcagtgttcttcatgctgatcatctgtattctgggcagggagacagaagtgagcctcctgggcaatgttattcaagtctggggaagccaggtgttgactatgcttttaccttcccctgtggagagattgaaagccaaaggagcttctctcagcacaagctgtgcctccttgggggagggctgatgcaggtaaagtggaactgcacttcttacccttttcgatgcttccactcttgggttgatttgctccagtggggtgctggaacctcagccagactccaggcctcccacataatgattctcatctgtcactgcctgccttaactggtgtttctatggggggatgagagctggaacatcctattctgccatgttactgatttcactcctggactgaattttgaagaatgaacagaactcactactagatgtatgaagagaaaatcgcatcctaaacagagggaactccaggtacaaaggcagagaaatttaatatatcaaggtgcttgtgatggacagttaagttttttgtgggacttggatgtaggtttcatggaaggagacagtgggagtatgtaattggaaagttagtcaggggccagattaccatgggctcatatgtacagtgaaaactataaaagaaaatggaaaactcgtgatgactctgcttattgaactttaccagcgaagacttttctttctatctgagcaggattttagacatggattcatcaatgcgcagttgcagtactgtacatgggagaagtcaggagtgatagttgagctaagagatagagacatccgtagaggtatgtaccgtcacagtttgtgagacaggcaataagaggagttcattcaactaattcattcaactaatatttgctaagtatctaccacaaactcccaaacttctagaaaytgaagacacagcagtaaacaaagagacaaaaatcccactcttattctgttacacaccatatatttactatatatatatatattctggagtatttaaaagcaaatcccagacatcatgtcatttcacctttgaatattttagtatatgtctctaactgataaggactttaaaaatacatagccttcatacataactaccatatcatttatcatatcataatatataataccatgatattatttaatagttattatgcatttatattttcacttatgtttaaaaatgtctttttaaaattagttactttgggccaggtgtggtggctcacacctgtgatcccagccctttgggaggcccaggcaggtggatcacttgagggccaggagtttgcatccagcctggtcaacatagtgaaaccccatctgtactaaaaatacaaaaattagccggtcgtgttggcgtgcacttgtagtcccagctactcgtgaggctgaggcaggagaatcgcttgaacccgggaggcggaggttgcagtgagcagagagtgcgccatttgcactccatcctgggcgacagagcgactctgtatcaatccatcaatcaatcaatcaatcagtcaatcaaattaggtgccttgaatccaggttcaaatccagggccacatactgtatttggtctcttgtctctattaaaatctaacagttccctagccttcctttggtatccttttatgtctcttaaatttttttttttttttttttttgagctggagtctcacgctggagtgcagtggcacaatctcagctcactgcaagctccgcctcccgggttcacgccattctcctgcctcagcctcccaggtagctgggactacaggtgcccaccaccacgcccagctaattttttgtatttttagtacagatgggatttcaccgtgttggccaggatggtctcgatctcctgacctcgtgatccacctgccttggcttcccaaagtgctgggattacaggcgtgagccacygcacctggccttcaaatttttttattttaaaattatcatacagtaaaattagctttttggtatacagttctacacattttaacacctgtatagattcatgtaaccacgaccacggtgagtatacacaacagttttttcacctgtgtgtgtggggtaggaggggatttggtggttgatcctctatgacacactgttaggcacccccttgattgttgctctatggctcacctttccacattgaacctcccagggccgagcctttccaggttctgcgggggtttagtggctcacttgccattgcgttattcttcttcagggtaaggaagattgaattgcccaagcttccacatcgtattgtggaattcagactcgaacccaggttttccatcttcaaacttctgtgtttaaaatttattgtataaaactagaaaaaaccctgagcacataagagtaccagaagaaccaatttcagaatatagatgcaggattcctaaataaaacagtaaccaactgaatctagcacaaattaatgaaaaatatgtgcatggtagataactcaatacataaatatgaagtaaaatgaggtaccatttttgtgcagaggttactaacttggcagagattttaagagaaatactaccaactataggcaatggatggagaaaataggcattcttatatgtttctggtgtgaaaccaaattggtaccacctttcaaggggtcaattttactatatataacaaaactcttaatattccatgcaacttttaatccagaagttccacctctaggaatttattttcaggaagcaatcatgatattcacaaaaatttagctatgaggatattcatttcagtgttatttataatattgaaacattaataacaatgtatctgtccactaatactgacttcataaaataaaataccagacacaaaataatgttgaagaataattttaataacatgaacatatgataatgttacattcagtgaaatacacagtttcaaaacagtatttttttgtattacaagggattctttctgttgcaagtaatgaaaactcaactaaaaatggcttaagagaaagaaaaggaagatattgattcataatactggaaagtccagggccacagtgccttcaggtaaggctgcatccagcctcatcatcagtaatctgtttccgtctcttggtttggctttactttcagatagaccctctaaaagcattgttaaagagagctaccagcagctctgggattgtgctttaccaacttgataacctaacaggacaagagaatttcctttcaaatcattctagcaaaaatcctagggctgaatctcattggccaggtctggctcatgtactcctctctttaactgagaggaggtgtgagtcccatttgaactatgtcataataatgatagctgaaatttattgaatattgattatgtgtcagattatgagtctgagtcccatgatttgatgtgtaactttgagcaatttaaccttcctaagccagaaaagaacacataatctgtgtcctctgtattatttcactaaattctcttggcaatcctagtgaaacagattctgtgtccatcctcattttatggatgaagaaactgaagctcaggcaggttaattattgtcttagtccatttagcattgctataaaggaatacctgaggctgggtaatttctaaagaaaagaggccaatttggcttatgggtctttggctttacaagaagcatggcactggcatctgcatcaggtgagggcctcaggctgcttctactaatggtggaaagtgaaggggagccagcgtgtgtggagatcacatggcgagagaggaagyaaggtgtggaggcggtgccaggctctttttaacaatcagttctcccggtaatgaacagaggaagaacttacccttgagcgaaggcactaatttattgatgagggacccacccccatgacccacatacctcccactgggcccgaccttcaacattagggatcaaatttcaatatgggatttgaaggagacaaacatccaaactaaagcaagtttattatttaagttgaaagaattagcaaatgatgcattcactcacatggattgagaatatgggaggcagcagttcttcaaagaagaatcagatgctgcttcagacattgactatgaagcccaaaacaaaagtaaagaaaaacaaaacaaccccatagaataaacaagcatacaaaaactttaaaagtctactattaatatacttggaaaggtacagaatagattgcacccatgttataagaacagaataagatcctgataattttaagagaagaaaaaagggcccttaaaaattaaagcaagagagtagacctgaaaaatgtaacagaagagttggacgataaacttgaggaaatcgcccaagaagacacggagatgaacaatagaagagaaaagatacagaagattagagattaagactggcgtgttcaggccgggtgcggtggctcacgcctgtaatcccagcactttggaaggccgagacgggcggatcacgaggttaggagatygagaccatcctggctaacayggtgaaaccctgtctctactaaaaatacaaaaaaaattagctgggcgtggtggcgggcacctgtggtcccagctactcgggaggctgaggcaggagaatggtgtgaacctgggaggcggagctggcagtgagccgagatcgcgccactgcactctagcctgggcgacagagggagactctgtctcaaaaaaaaaaaaaaacaaaaaaaaacyggtgtgttcaatatttgaataattggtgctcaagagagaaaaagaatatgtaggagaggcagtcatcaataaaaccatacagaaaagtttactcaaaactcaagaaggacatgagtttccagattgaaagggttcttcaagtgcccagagaaacggatgaaaaaagacctgtcaaggcacgttatcatggagtttcagaacaaagtccaagagatcttaaaagcttagagagcaagggagagggtacatacgaagatcaaatataaaggatcgggaatcagctttggctttgccggcttcaataaacaatggtagaggcaagagacaccagagcaatgcttttcaaaattcttaagaaaaactattcccagcctagaattctgcacccagctaaattatcaatcaaatatgagtgtaaaataagggcattttcagatatgcaagatttacttcccatgcgttctttcttaaggggctactggaggctgtgcttcttgaatgagaggacaagccaagaaagaacatatgggacacaacaggtaggaatcaaacacaggagagtggtgaagggactctagggtaagggtgatgggagagtccagaatgacagttatgcactaggtgcagaaggaaacaagtccagcctgaagaagtgggacaccaggactccagggagagacacactgagggcttccatcaccaccrtccccactgccatcatgctaacttttaaatcaaggactcaatacccagagtctggcccagatttttcctttgtactttctttattttgaccacatgctgataaagttcctgctcattcctcgagtgctctgatgcttgatctactgtgggtgtcatccagaaatgttctgccttgacctcttctgggaagtggaggagaagtcgtgatgagcagaatatacacaacagccatctccttctgactatatcctggccaaacatctaaaactcggcccattctccagcgttaccgtatgtctcacctgtgctgagcccagtgattcccagtgttactcatcatcttactcaatgattttcccataaaaagctcttataaatgcttagggaagctgaagccagacaatgaccgagaggctgttcagtttatcttctcctcctgcgccttcctcaaacagtggtaacatcaccctttccttattcttctagattggtgcttgctgctcagtgtttcaaaactaagtcrtgttgtttagggatgtatatattggtggaaaactgtaaaggaaacaggagaatgattaacataagtcatcatcgtggttatcactgcggatggagaagagaccacaatttgggagggataagcagaggcttctaaaggactggttatgttttataccttaaactgggtagatgattatttaccttattattatattaggttggtgcaaaagtaattgtggcgtttgccattacttttaaatatttctgtcgagcaaattttatccatccttctatttgtatgatgcattttacaacaaaccatttaaaaaatcaggtgctggccgggcgcggtggctcatgcctataatcccggcactttgggaggccaaggagggcggatcacgaggtcaggagatcgagaccatcctggctaacatggtgaaaccccatctctactaaaaatacaaaaaattagccgggcttggtggtgggcacctgtagtccccagctacccaggaggctgaggcaggaaaattgcttgaacccgggaggcagagcttgcagtgaggcaagatcacgccactgcactccagcctgggcatcagagcgagactctgtctcaaaaaaaaatcaggtgctgttactcaataaaaggggaagtcaatgaaacaattagaaataagagatatttattctgaatctttggataacaaaaatacctgcaaagagaaaggataagaagggacaatttatttatttaatttatttttttgagacggagtcttgctctgtcacccaggctggagtgcaatggcgcgatcttggctcactgcaacctctgcctcccaggttcaagcaattctcctgcctcagcctcccaagtagctgggattacaggcgcctgtcaccacgcctggctaatttttgtgtttttagtagagctgggggtttcaccgtgttggccagaatggtctccatctcttgacctcgtgatccgcccgccttggcttcccaaagtgctgagattacaggcgtgagccactgcgcccggccctacattttattttttttaaagtgaaagcaaatttattaagaaagtgaaggaataaaagaatggctactccataggcagagcagccaggaagagacattttttttctctggctctttttttgctgtatctcaaaaagagtaggagttgttttgagcctacgcacggaaggaaccggaatagtaaaacttagcatttcctacaggcatctctgtgtgtctgtctgctctgttctctattagctctacagacactcctctgtttatgatggggctgtatcctgataaacccattgtaagttgaaaatatcgttaagtcaaaaatgcatgtaatacacctaacctagtctaaggtagcttagcctagcctaccttaartgtgctcagaacacttacattagcctcaagttggcaaaatgatctaacgcacagcccattttataataaagtgttgcctatctcatgtaatttattgaatattatgctgaaagtgaaaaacagaatggttgtatgggtatttgaggtacagtttctgctgaatgtgtattgcttttgcaccatcctaaagttgaaaaacaccaagttgaaccatcgtgggttggggattgtctgtataacgaatctccccaaaatgtattgtcttaaaataacaaccggccgggtgcggtggctcacgcctgtaatctcagcactttgggaggcgctgaggcgggcggatcacgaggtcaggagatcgagaccatcctggctaacacggtgagaccccgtctctactaaaaatacaaaaaattagccgggcgtggtggcaggcgcctgtagtcccagctaccgggaggctgaggcaggagaatggcgtgaacctgggaggcggagcttgcaaagtgagccgagatcgcgccactgcactccagcctgggcgacagagtgagactccaaaaaagaaaacagaaacaaacaaacaaaaaaaccaaccactacttatttgttggtttacaatgctgaactttgggaagggattgacaggaacagcttggttttgtttcatgtggtgttggctgggccgccttgcctggggctggagggtccgggtggtttcactcacctgtgtggctcagcagaggtgtctagaacagcaaaagactggccagaccaatctctccagcaggcagtcggtcttcttcttattatttttttattatactttaagttctggggtacatgtgcagaacgtgcagttttgttacataggtatacacgtgccatggtggtttgctgcacccatcaaccggtcacctacattaggtatttctcctaatgctatccctcccctagccccccaccccccaacaggccccagtgtgtgatgttcccctccctgtgtccatgtgttctcattgttcagctccccgttatgagtgagaacatgcggtgtttggttttctgttcctgtgttactttgctgagaatgatggtttctagctycatccatgtccctgcaaaggacatgaaatcatccttttttatggctgcatactattccatggtgtatatgtgccacattttctttatccagtctatcattgatggacatttgggttggttccaagtcattactattgtgaatagtgctgcaatagacataggtgtgcatgtgtctttatagtagaatgatttataatcctttggggtatatacccagtaatgggattgctgagtcaaatggtatttctggttctggatccttaaggaattgccacattgtcttccacaatgattgaactaattacactcccaccaacagtgtaaaagtgttcctgtttctccacatcctctccagcatctgttgtttcctgggcagttggtcttctttatgcagtggctcagggctccaagagaaggaaagtgcaagatgtcaagcctcttcgtggtcaagaactggcaccgtgtcacctctgcattctgttggtcaaagtaagtcacaagaccagtctagaacgcagggagacatagatttcatctcatgatgggagaattgcttactagatgagaagcatctgtggcaactatttttgcaaacaatttgccatatcttttcttccacctcataattttggtgtgtacgtaattttaatttgctatagccgaactccacatgtttttctgtcacctccaactttattgctaagtagcaaattctttttgtttaggtttaaattcctaagaacagttggtttaattcatctctttacctcgtgtcagtggtcggaggtcagaggccatcctattttttttttttcctgagtttttattttgaaaagccttagggtctgggcccagtggctcatgcctgtaatcccaacactttgggaggccaaggcgggtggatcacgaggtcaggagttcaagaccagcctggccaacatggtgaaaccccgtctctactaaaaatacaaaaattagccgggtgcagtgtcaggtgcctgtaatcccagctacttgggaggctgaggcaggagaatcgcttgaaccctgcgggtagaagttgcaatgagccgagatcgtgccactgtactctagcctgggcaacagagtaagactccatctaaaaaaaaaaaaaatgcctttgggatagttgtaagaacagtaccatgaatgcctatagacgcttcacttagattcaccagttttaacgttggccacatttgtttgatcacacattctttctccaagcatatatatatggagttggttgaagacatcatgacattttacctttaaatactttagcatatatctgctgagaacaagggcattctcttacataaccacaaccaaattaccacactcaagaaatttaacatttctatacaactatcatctagtgtactaactatattcatatttccacaattgccccgtcgtgtcctttatataccattcttttttgatccaatacttaatctgtgatcacacatcaaaattagttgccatgtccccctaatattctgtttttttgaaagacaggaggatctcactcccttgcccagataggaatgcagtggcttgatcatggctcattgcagccttgacctcctgggttcaagtgatcctcccgcctcattttttgatttttcttgtatatagagatggggtctcactatgttgcccgggctggtcttgaattcctgggctcaagtgatcctcctgcctctgcctcccaaagtgttgggattacaggcgtgagcctccctaatgttatttaatttagataagttctctgtcctcttttgtcttttaggacattgacattttggagagtctaggctggttgtttagtacaatgtctttcaatatggatttgcctgattgtttcctcatgattagattcagcttaaacatttttagcaagactacgccataggtgatgtgtggccagtcacttcaggggctactcttagacaattgttggccagttgcctgtgctttgctcccatcccaccccacctcccatcatttcctttgcctgaagtcttttgggtaagtttggccacagaaagatgatagcagatgactggagggtgggaggaggggaaagcctaggatattgccccctatttctctgttttccgtgacagcttttcttgtgtgtctccaattcctcccaaccaaacgctctctctgtggttccagctcctgcgggggaaataccctctccttagttctggctctttctgtttggcctcaacttctgtgctctgatgaaactacctcatcccgttgaccctttagttccagggtggcagttgcttttggctgttgccgacctctcagtggcctcatcatctcatcctgtgtttggcttctcagcttttccatttcctgtgtaaccaatttccttattaacgttcctctttatttggtttgaaaagtctagggtggtgtctgttttcttgactaaaccttgactaatataggtagggttttcatcgtcagtgtgatttgtgtgacttgtggaatggggccacgtggcacaaaataaggcagcattagcaacaggagttatatgagtggaaattcctttataaggagaaataagcagtgtaggcctcctccctggttacacaaaaggaaatatacaaaaaagaaacatctcaaggtggtagaattttgtatggtttttatattatttttcttcttttctgttcatccaaattacctaaatttttttttacaatggatgtagatacttttgacatgaagaaaaaattgccatatttgtaaacaaatgaaggagaatggtgtacaggtgtacaagttgtatacaataaaatattatcagaggatacaaaagtggctaacccccatcaaaagacaaaagacaaaattacaacaaatttagagaccttaattggtttttatttgccattctagagtaaggtaacacctcatcctacaaaatagaatgagtgctctgagttgctgagcagaggtggtggtaggcagaaaatggctgaggaaagcagaaatagaaaataaaaggtagactggttgtttcagagttactttcctcgtaaagattaaagcagagtggacttccttattataccagctaaaattgggttgtttggggatttggctattatgtctcactctcctgatttcttggaaggtcagataaacaacttagttttgtcttgatgatgtgggcctgtagcatgagtgactccattttggtttggtctgttggacttagtataggagctcagtcaaaaccaatggcctccgatacattttatttaatacccccacaaaagcatttggctcccaaaccttttaaatagaaaaaataagaaggtcattcagtgtaagatgataaaaagagtaacaagagactactcttatgaaatttcttcatataaaatgcttatactttttggtatgtctgatatagtttataatctaataatttaaaaaaatttcacaaaaaacaaaatcgtaaaatgggaaatggtttagttgttgaggttttcacgtgatcactctagctcacaaatgggcaagtctccagtgatcaagaaaaaactacactggtacttatggaaatgtttacatttaataggtgacataacagtgattgtttataacaattaaaggcacttttttcaacgtttaattacttagctatccttaggaattttggaaagctcattagaaactgaagaatttaaaggggtaccaaagtagctgaagcatgagttagaattcatagaaaatgagtaaaaaagactaggaaatattagtgaaaagatcaaatagactgcaaggttacaataaaactgcagtaaccaagacaaacagaaataatcagagataaaatggattactggaaatgagaagtgcaaaaatgtagaggtactcagtaagtatcagatttgaaaaattaacaagaagttttcacagaagagcctaacataggaaatatgtactgtaagtgagggcatgcgaaaacctgcttccaccctacgtataatccaatataatctggtacaaaatgtcttgaagagtcaaaagaaggtagtttcctaggtgtttaactgtttcaatggctcccrtcagtaagtcatagctagcaatggacttctgacttaaacctgctcatacctgctgctatggtttgaatgtctcctccaaaacccttattgaaatttaattgccatcatgatagtattaagagatgggacctttaaagggtaattaggtcatgagggcttggcccttgtgaatagattgacgttatcatgggagtggcttagctgtcgtgggagttaggtctccattttctgtctctgttttgtgtgcttgcttgcccttctgccatgggttgatgcagcargaaggtccttgccagattctgacaccatgttcttaggctttctagcctccagaactgtgagtcaaataaattgctattctttttaaattaaattaaatttatttatatattttgagatggagtcttgcactgttgcccaggatggagcacagtggcatgatctgggctcactgcaagctccacctcctgggttcacgccattctcctgcctcagcctcccggtagctgggactacaggcacccgccaccatgcccggctaattttttgtacttttagtagagatggggtttcaccatgttagacaggatagtcttgatctcctgacctcgtgatccacccacctcggcctcccaaagtgctgggattacaggcatgagccactgcacccagcagccactgctattctttataaattaccaagttggtgacagtccattatagcagcagaaaatggactaagacatctgccaaaacatgtatttagtcagagtctgattaaggttctctcaagagtttattcattgggctcactaagtgctatatgttagaagaataagattgttaattctgtctgaaatgaagcatattaataaataaatgcattgacattttattgtgaataattatgaccttctagtattgcatatttatgttatagcttaggaacttagaagaaagtaccaagtcagagtcaagcctgtttgtctttacgacctgcactgagacaagaatctgggttgaagtagtatctctgattctgagaatctcttactttaggattttccattgacaatattggaaaacatgatctggattatgcaatatttggctcttcataggctgcaaagttttgaaaggtgctggtgtgaatcttggcagagatctctggcttaggcattcctttactttctcccaacttcatcctgcgtaaatatctcattagagcgatatctactaattcacagggctatagtgacactctattgacacatcaggaaaactttaggacacaggactgggaggagaaaacgggcttgggataccttcttatagctatgtacctaacactaccaaaataataaaaaacccaatggcttttatgcttaaaaattgatatttattaattatataattcaagcccttttcttttaagtctccccccactctgtttgtagaagttcgaggtcatgattacctttccaatttccagagacactataaaataaccatcattagatttttagctgtaggtaataaatagaagagttattataacattctgagcataatagctggtgttcctagaaatatccaggacaactgtcatttgtcatttctggcaatgtctaaggccttgaggcatcaaacaggcatctaaatggaaaatctgtctgaactgtggtcagtggagggttgagattcttttgaaagctattgatgtgcagttatgtgaaatacaaccgccatttatgcctgtaatctgcttgagagtaatcatgtacatagttaatactccaaactacttttctttttttttttcttttattattatcctttaagttttagggtacctgtgcacattgtgcaggttagttacatatgtatacatgtgccatgctggtgcgctgcacccactaactcgtcatctagcattaggtatatctcccagtgctatccctcccccstccccccaccccacaacagtccccagagtgtgatgttccccttcctgtgtccatgtgatctcattgttcagttcccacctatgagcgagaatatgyggtgtttggttttttgttcttgtgatagtttactgagaatgatgatttccaatttcatccatgtccctacaaaggacatgaactcatcattttttatggctgcatagtattccatggtgtatatgtgccacattttcttaatccagtctatcattgttggacatttgggttggttccaagtctttgctattgtgaatagtgccgcaataaacgtacgtgtgcatgtgtctttatagcagcatgatttacagtcctttgggtatatacccagtaatgggatggctgggtcgaatggtatttctagttctagatctctgaggaatcgccacactgacttccacaatggttgaactagtttacagtcccaccaacagtgtaaaagtgttcctatttctccacattctctccagcacctgttgtttcctgactttttaatgattgccattctaactggtgtgagatggtatctcattgtggttttgatttgcatttctctgatggccagtgatgatgagcattttttcatgtgttttttggctgcataaatgtcttcttttgagaagtgtctgttcatgtcctttgcccactttttgatggggttgtttgttttttttttgtaaatttgtttgagttcattgtagattctggatattagccctttgtcagatgagtaggttgcgaaaattttctcccattttgtaggttgcctgttcatcactctgatggtagtttcttttgctgtacagaagctctttaatttaattagatcccatttgtcaattttgtcttttgttgccattgcttttggtgttttagacatgaagtccttgcccatgcctrtgtcctgaatggtattgcctaggttttcttctagggtttttatggttttaagtctaacgtttaagtctttaatccatcttgaattgatttttgtatgaggtgtaaggaagggatccagtttcagctttctacatatggctagccagttttcccagcaccatttattaaatagggaatcctttccccattgcttgtttttctcaggtttgtcaaagatcagatagttgtagatatgcggcgttatttctgagggctctgttctgttccattgatctatatctctgttttggtaccagtaccatgctgttttggttactgtaaactacttttccattcagatcattttagtttggttaattatgtaaaagcaaatatttgtttagagtaatgcygctgctccattaatgaattattgcctggttccctcgttattgtacatctcagtcactttcaattatgctcaaaaggcgcatctctcaaaggaatctttttttttttcttcccacactcactcagtttaacttcctctcctggtttatctaaacaggaattcatcttcattttaggaagtacttacttcacaaattagctttccttacattctttctaaagcaaaacaaatctagttttgtttctaagaatcgaaatcagaaatgctataacttaaattttgtaactgcttaacaacaaacacaccgactacaagtttttcttaaagacaacattgcccatttccagagtatatattttttcaattaatagacttcattttaagagaaattttagatttacggaaaaattaagcagaaagtgagaatctattttttgagcagaaatttttgagagctcacaaaatttcagggtctgttgtaatagttgggtttctgttycaatgagcttgtggatacaccaatagcttatagccaagtgcatatcagtacccatcaaatccatgagtgagatatttttctttaaatcacatggctctaaatgacaggttttacatatacttagccctctataatggcagaggtggaatctgtggatacagagggccgactgttacctggaaagccagggtttgtttgcctggtgagtaacaagcgaccctccgtgagaatgcaggttatgatgaataggagtgttcttagttggcacaagaaaggcaggtactgggagtattctcgaaaacagcgtcttctcaagggaaagtgacaggaggctgtcgacaaaaagggctaaagtgtaacatagttaaaaaggtttattctgagtgaaatgagtgaccaaggcccacgacacagccccaggaggtcctgtgaacatgggcccaaggtgctcgggccacagcttgattttatacgttttagggtgacagaagttacacagataccaatcaatacgtgtcaggtgtgcgtcaattcagcctgaaaaggtgggacaactcaaggcagcagcttccaggtcataggtggattgaaagattttctgactggaaattggttgaaagagttatgttatcttttttatttatttatttttttgagacagagcctcactttgtcacccaggctggagtgcaatggcactatctgggctcactgcaacctccgcctcccgggttcaagtgattctcctgccgcagcctcctgattagctgggattacaggcacacaccatgcctggctaatttttgtacttttagtagagacgaggtttcaccatgttggccaggttggtattgaagcaccagtgtaccagcagcagcggaggtcctcctccttgcagaccagggttaccgcataggcagtgtgcccagagtagcagctcagaggcaggtctgcactcatacccacttctaattatatgcaaattaaaggagttatgcagaaatttctagaatgagggtgatagcttcccagttgtcaggtcgttgccatggaaaggggcagtaacctccaggtgttgccatggcaatggtcaactgacttggcacactggtgggtgtgtcttatgagaaggtgcttctgccccccaccccaccccgcaccccgacctgtttttagctagccttcaactggtctagtgtcctagccccacctctggagtcaagtcctgcctcccacctcagaatcttggtctccacaaccccttatcttaacccagacaattcctttctattgatttcaggtccttagataataacaacttggctgggcacagtggctcacgcctgtaatcccagcactttgggaggccaaggcgggcggatcacctgaggtggggagttcgagaccagcctgatcaacatggagagactccatttctactaaaaatacaaaattagccgggcattgtggcgcctgcctgtaatcccagctactcaggaggctgaggcaggagaatcgcttgaaccggggaaacggaggttgtggtgagctgagattgtgccactgcactccagcctgggcaataagagggaaactacatctcaaaaaaaaaaaaaaaaaaaaaaaaagagagagagagtgagagagagagagagagagagagagagagagagaaaatggctcaacagcaaatgcaggcatttatgtccaggataaacttatagaggkgggggaccagcttagtgtcagtgcccactgcttacaggctggggtatttataggtatgggcgggaggggcctgggcagtatggcttgctgcctgataggatattgataagatgttcctttgatcaggcggtttggcccttgttctggtggagtgtggtgttccttgcattttctcctagcagaataagataagaggcaggctgtttctcacggtccgaacccccgtggaatgttccactttgaccaaggtctgtgaaatggcgggagacttacataatggtgcagtttggactaacacttttgagggctcttgttttttttgactgtatatattttctaggaggagaacaagtttctgggtactcttaaatattacttgtgagctttaagttactcagtgatttgacttacggtggtggttatctttaaataygtcatgctttttttcttaaccatttttagtgtggactgtatagaatacacaaaaggccaccatatttatatacaatttaaaaaataatttaaagcaaattaaaaagtacccagatagctacaacccagtccaagagttagaatatggacagagtccctttccccactccatcccctacctgcaacaaacctcttcctcttcccggaagtaaccactctccaaacgtgtgacaatcacttccttgcaaatgtttatagttttacacttctatatgcattgcttaattttgccttttatgtttagacctttaatctacttgaaatttatttacgtatgatataaaggtccatttttttccatatggacacttccctgtcccaccactgtctattagaatttctacttcctcgcctgatctacactaccactgaggcaggagaatagggtctggaggcagggaagctaaggctgattcatgctgcttatgagggaaaggaggggttgaattgggcttaggttcggaacccaagcccgattcatcccttttcaacccctccttttttctgcgaggcagttgaaaaatgaaagtacctctgattggtcccctcctgcaaccaatcagactggtcgggggccaatgggaaccctctagagggtatttaaacctcagaaaattcagtaacaggctttggagctgcttgcttgagcccactgtcctctgttggagtaaatctctgctttccctgccttgctttgtgtgttttgtccaattctcagttcaaaacgccaagaacctggccaactacccttcagctggtaacgtattttggtgagccagccaggaggtaagcccaacgtttgggatttattttcctttttgtcctctttctctctcttttcctttccaactcgggactctcggtggacagygcctaggcatggaggcaaccgcaggtttgtggttggggccactctccagggaaactgaaagggttccgtgtggaagcgcctgatcaccaccacccggtttgggtgagggacctgagtccttttcttttcagtcttgcagcagctgtttcctggcaggrcaaatggtcagaaataccatatgtacaggccttcacggccctacgccaaaacctaatcatctccgcaaagaaagtccaaagacaggactagatagtatagatgacccccttttataagggccacctgtctctcagggtgaacataaccgcccccacgtagccccttgccaagtgctcctgaggctaaaacccaaaccctggacaccctactaggtccccctcacgctcggaggggacactacattccactctccctccagccctgctaccccttcaggaagtagcaggagccgaggggccagtcctagtgcaggccaccttctctataactgatatacaacggtgtcagggaaagctaggaagctcttctaagaatcccaggaaattagcagatgggttccaaactttgacctcagccttcgatctctcacagagaaatgttcaattcattctagcaacctcttgcaccccctttgaaaaggaatgaatcttttgaggctgcccactgggaagcagacgatttatttgcccaaaaccctcagggcaatcacctgggcccagacacagtccccacaactgatcctaattgagactctaatgctctcgtgggaacgaaaaactgggctaaatttcttgaggctctccttggaggaatgagaaagggaataactaaggcagtaagtgatgatgaagtaagggaggttccaccggaccaggtaacccttgccatgctcatgctacaatctggaaaggaagagggctgctaactagcaaacactcccctgtaaagcataggcctgaaattctgcagcttttggaagcaatacacctgccaaaggctgtagctgtaattcattgcagggagcatcaaagggccttaacccttatagcacaaggaaacagaaaggctgatagagaagcgaaagctgtagttctcagggtgcaatcccaacagattccagctctacttcttttctgtgattccccaatggagcctgaatacacaccacaggaagaacagttaataaaggagcaagggggacaaaacccaggatgctggtggtacatggcatcaaaaccacatctccctcaagcagcctgatggagaattagaaaaactctgcatgactctttgcatatggggagagaagccaccctggccgtggttaacaggctcttcattgagcctaacttagcttctgtggttaagcatgtctgtcaaacctgctcactgtgtgcactgaacagcccaggaaacagaatgcctcctgtaatagaaccagtccagaggggagttgtattagaggacgctgatagaacatacccaggaaaagatgggcgattagacttcacacatatgccagctggcagaggttataagtttttgttagtgctaatagatatctttactggttgggtcgaagcttatcctaccagatcagagaaggctactgtggttataaggttctcttaaaagaaataatcccccagtttgggttacttcagcgtctccaaagtgataacggcccatactttatctcccagataactcaagtagttgctaaggctctcagaatcaaatactatttacattcagcatggaggcctcaatcctctgggaaagtagaaagggctaatcaacctctaaaaggatcgttagctaagttcgatcaggaaacatcagaagcttgggtcagcttactgcccatagctctcttaaaaatctgtaatacccctagagcaaaatttaatataagcctatacgaagsctattagtttgtttttakgtgtgtgtgtgtgtgtttttttttttttttttgagacggagtctctctctatcgcctaggctggagtgcagtggcrcgatcttggctcactgcaagctccgcctcccgggttcacgccattctcctgcctcagcctcccgagtagctgggactacaggcgcccgccagcacgcccagctaatattttgtatttttagtagagacggggtttcaccgtgttagccaggatggtctcgatctcctgaccttgtgatctgcccgcctcggcctcccaaagtgctgggattacaggcctgagccactgtgcccggccttgtttttttggacatggaattttcgctcttgttgcccaggctggagtacaatgccttgatcttggctcactgcaayctctgccttccgggttcaagcgattctcctgcctcggcctcccgagtagctggaattacaggcatgaaccaccatgcccggctaattttgtatttttagtagagayggggtttctccacgttggtcaggctggtcttgaactcctaacctcaggtgatctgcccgccttggcctcccaaagtgctgggattacagaaggctattcttaactgatgatgtaattactgattcagaaacagctggtttagtaaaatacctagttaacctaggacaatgtcagcaggtttatacagaagtttggaactcaaaggcttccggtactggaagctaaccagccacctcaaatcaggccagcagataaggtgcttgttaaagcatggacggaggggtcacctcctcaacaattacaaccccaatggaaggcaccgttttcagtgatactggccacgccttctgcggtcaaagtactgggattagatagttggatacacctttcaaggatcaagtctgtgatacctgaagccccggacctggaacctgaagttcccatcagccmctgcacctgtgaacctgtggcagccctgaagtacctgtttagaagacagccaaaararaaatgcctaccaacgttccttggtgtttttgttgcatagttactgtaggstggataatagtagccatgtttttttttttttttttttttttgcagattaattaccttctttcaaacagttggaatcacttccttcatagtaattaagtagaatcttttaattcwtttctataacaaacattcctgacagcataggtgtccacctcctgaagttcccatgaaatcttttaaccattcatttcctcttgcctggagatgattgtgcagtaaggtttccagccagttccaaatgaattcaccacccctggccatcaagaaactaccctgtctccactagacagagcagggtgagagttctgtgattccaataggcagggactgtcagtcaagtcagtgtgacgcagttacagaaaaaagaccatcagtccctctgtctcacataaagacttacggggatcctgtctctcagggggggaaatgaggcaggagaatagggtctggaggcaggaaacctaaggccggttcatgctcactggatatcagaggctactcttcaacaccccctttttctgcgcgacagttgctgcccctcctttttctgcctggcggttgaaaaatgaaagtacctctgattggtcccctcctgcaaccaatcagactggtcgggggacaatgggaaactcctagagggaattgaaaccccagaaaattctgtaaccaagaatcttgagctgcttgcatgagccacccccaccctgtggagtgtactttcatttaaaacaaatctctgctcttgctgccttgctttgtccattttgtccagttctttgttcaaaacgccaagaacctggacaactaccctcagctggtaacaccacctctgtcaaaaatgaagtgtccatatatgcctgtttctgggctgtccattcttctattccaattgttctacttgtcaatccctgtgttaataccatgccatcttcaaaacaggtcatttctattgatgtctggcttgtttgctcatactagccatagcatgtcttgcctgattgcaatctcctaattttgttgagacttactttatcgtccagcgtgattcactttgtaaaggtcctgtgagttctcgaaaagagtgtgtggtatgcagtgttgggtgctgtgttgtgtgaatgtccacttgatcaagtctgttaattgtgttcaaatctatgttcttactgatttttcatctacttgttctatcaattattttccttccataggtcccccttttctggggatttcctcctcaatttccagcttctctgggagccccaaatcgaatctctagctccacatcccctaaaattgcttctttctgtttgagatctcttccgctgtgtgcagcagcagcaagctgggaagtccctcaggagaaaaatcttggtaaatgtggagctcatctcacgtgcttccttcattttgaggactgtctgttccctgctcagtttctgcctgctaaggtttatctccagtcccttcaaagacctgtttgttatattttgcccagagtttataaataattttggcagaggggttaatctgataccgtctagtcctccaaaacaagaactagaactctggccacatctgttttcatccagtcttttgatgctcaaattataacggccgtgaccccttagttaaaagaagcttcatctttcctctgcagtatcttcttgtgatagtctaaagggattagtctttattaatactgactgtgagggaagaaacaagaaaggctgatttttcctctaaatgtcccatcctctcacaccagtcagaataggtattattaaaaagctgaaaaataacagatgctggccgggcgtggtggctcatgcctgtaatcccagcactttgggaggccgagacgggtggatcatgaggtcaggagatcgagaccatcctggctaacacggtgaaaccccatctctactaaaaatacaaaaaaaattagctgggcgtggtggcgggcgcctgtagtcccagctactcgggaggctgaggcaggagaatggcrtgaacctgagagtcagagtttgcagtgagccragatcgcgccactgcacyccagcctgggcgacacagcgagactctgtctcaaacaacaacaacaacaacaacaacaacaacaacaaacatgctggtgagattgcagagaaaagggaatgcttattcactgttggtggaaatgtaaattagttcagtcattgtgcaaagcattgtggagccttctcaaagagcttcaaacagaactaccatttgacccagtaatctccttattgggtatatacctgcagtagaccacactgctataaggacatatgcaagactgggtaatttataaagaaaaagaggtttaatggactcacagttccacatggccagggaggcctcacaatcatggcggaaggtrgagaggagcaaaggcacatcttacatggcagcaagcaagagagtgtgtataggggaactgccctttataaaaccatcatatcttgtgagacttattcactatcatgagaacagcttgggaagaaccygcccccatgattcaattacctttcactgggttcctcccatgatacatggggattatgagagctacaattcaagatgagatttgggtggagacacagccaaaccataccaatacccaaaggaaaataaattgttctaccataaagacacacgcactcatatgttcattgcagcactactcacmatagcaaagacacggaatcaacctaaatgcccatcatcaatacaccagataaagaaaaggtggcacatatacatcgtggaatactgtgcatccataaaaaagaacaagatcatgttctttgcagcaacatggaaggagctgggggccattatcttaagtgaactaatgcaggaacaggaaaccaaatactgcatgttctcacttagaagtaggacctaaacattgagtacacatggacacaaagaagggaacagtagacactgaggcctttgtgagggtggagagtgggaggaggctaaggatcaaaaactacctattgggtactatgcttatcagctgggtgacaaaacagtttgtacaccaaacccccatgatactcaatttacctgtacaacaaacctgcatgtgtaccctgaacctaaaataaaagttaaaaaaagagataaaatttgtaatcaacagcaacaaccacaaaagcttttgtttcacaaagcattcattacaatatgtaaaatagtaatacttaggacagttggcaactcattaagaatccaaaatgatggtgattatttgacaaattcccactctatgccagctctaagtcctagttcctgactacacggtgcagagtgggcttaaattagtcagggaccttaacatttttaaaatcacggtgaagttttaacaattttaaagtgtacaattcagtggcattaagcctgttcacccatgttatgcagccatcacctctatctcggtccagaactttaaaaaatcaccctaaacagaaatgctaactaagcagtcactctccatttctctctcttctcagcacttggcaaccactaatctgctttctgtctctatggatttgcctattctggacatttcwtataaatggaatcattcaatatgtggtcttcggtgtctggcttcctttatttagcataattttgtttgtttgtttgtttgtttgtttttgagacagatcctcactctgtctcccaggctggagtgcagtggcacgatctcagctcactgcaacctccgcctcctgggttcaagtgattctcctgcctcagcctcccaagtagctgggactacaggcgtgcgccaccatgcccaggtaatttttgtatttytagtagagatgaggttccaccatgttggtcaggctggtctcgaactcctgacctcatgatctgcccacctcatcctcccaaagtgctgggattacaggcatgagccactgcacccggccagcttagcatagtgtttttgagggtcatccatgttgtatttttcgttcattcctttttatggatgaagaacatttaactttatggtatcaaaacacattttttttattcatctgttggtggacagttagattgttttaaccttttggctattgtgaatagagctgctgtgttcactggtgtataacattttgtaaacaaatggaaacgtttttatttgaacacctgcttttacttctcttgggtacatatttaggagtggaattgctaggtcatgtgataattctgtgtttattgaagaatcaccaaactgttttccacagtggttgtaccatttttcatccccaccagcaatgtatgaaggttccaatttctccacagctttaccaacatttattctctatttttaagaaatggctatcctagtgggtgtaaaatggtatatctcattgtgcttttgacttgcctttctctaatgactaatgacattgaatatctttttgtgtgctttttggccatttatatatcttcagagaaatgtctattcaagtcttttgtccctttttaaattgggttgtgttttgttgttgagttggatttttaaagctttaaattgcagaaaacactagcttacacaaaaaatgattttcttttttttgaggaggaggcttacacagctggaaggtaaaaggagtgatttgtttagttccaggaattctaacaatgtgaggagggctctgtgtcctctttacatctgtcagctgtgatttcctcaaattcgttgcagaggtttcttttactacagagtggcaaggcgaccttcagtagcaccacatccatctcattcctgaccgacagtggaaagaaatcttcctaataccttccattttaaaggaataacattaggagaaatatctaacgtagatgacgggttgatgggtgcagcaaaccaccatgggacgtgtatacctatgttaacaaacctgcacgttctccacatatatcccagaacttaatgtataataaaaaattacttttawatttatttatttatttagagacagggtcttgctctgttgcccaggctggagtatagtggtgcaatcacagctcaccacagccttgaccacccaggctcaagtgatccacccacctcagcctcctgagtagctgggactgcaggtgtgcatcaccatgcctggctaatttttttttttttttttttttttttaagatggagtctcgctctgtcacccaggctggagtgcagtggcgagatctcagctcactgtaagctccgcctcccgggttcacaccattctcctgcctcagcctaccgagtagctaggattacaggcgcccaccaccatgcccagctaacttttttgtatttttagtagagacgggtttcaccatattagccaggatggtctcgatctcctgacctcatgatccgtccgcctcggcctccagctaatttttttgtttttcatagagacaaggtctccctatgttgcccagtctggtcttgaactcctgggctcaagcaatcctcccacctcagcctcccaaaatgttggaattacaggtgtgagccactacacccactctctaatacctttcagaaaatgtccagggagaacctagtttagatttcatgtccagatcttaaatgatcatggtagccgatgttatgggtagcataatttgctgagtctaggtcatgtacccactgatgtcgtcatggtggcaagtcagtgttggccctgtcctaaccacagggaaggggttctctacagaaaagtagagtttagatctgagaaggtagttgagaatgagtgccgtatagtgaataatagtagatttttaccccattttacccctttgtctttggttgtatatatattcacataccattctaattatacatatagtttcaaaaatgcctctgcttctccaaacacaactatactttatatatattttcaaaaacagttctacctccttcttccaaagataaatatctgtgttttgtgtcctccatggccacccctaagagaggtgcaaggaggatttcattcctgggaattacctactttaatagcctgggtatttactgaaggactgaagaattacaggcacctatttccaggcttggcatttttaagcagtatttaaaacctcagttgacatttgatgattctgtggcataataaccacatccagagatcttgtctaaacctggaccttgactcttgatcctcatcttgtggtttctatttcttgccaataatctattctggcttttccccatctcccaaaataatgctttcactttgctgtctgctttgaacaatgtgaaagacttgaaggggaaaatgaagctaaataatgtggcatttcccccaagattataacctactggatgcatttttataagggatatgatgcttttgtctggcaaagaatacctagaatataatatttgagagagaatcagacttcccaaattttctggctcatccaagacccaatattttatttattcatttaatcattttttcaacaatttaaaaaattgatggataataagttacatagtttcagggcacacatgataacttaatacattcatataatttgtatacatcacatcagtgtacttgggatatccatcaccttaatatttgtctttatcctagaaatgtttgaatttttctcttctaatttgaaatgtacagtatgtttttgtaaactatagtcaccctactcatctgttgaacactggagcttatttcttctctcaactttatatttgtattgatttatcaacttctttgaatcccctacttctgctacccttgctggcttctggtaaccaccaatctactctctaccttcatgagatccactttttcttagcttccacatatgagtgagaacacgtagtatttgtctctttgtgtcacttaacataatgacttctagttttatttatgttgctgcaaatgacaggattttattcctttttacagatgaataatattccattgtgtatatataccacgttttctttagccattcattcgttgatgggcacttagatcgattccatattttggctattgtgaatagtgctgcaataaacatgggcgtgcagatagctctttgatatattcatttcctttcttttggagatatacccaggagtgggattcctggatcatatggtagcacaatttttagttttttgaggaacctccaagctattctgtgtagtagctgtactaatttccattcccaccaacagtgtacaagggttccctttcttccacatcctcgctagcctgcgttattgcctgtcttcttgataaaagccattttaactggggcgagatgatatctcattgatttgcatttctctaataatttgtgatgttgaatattttttatatgcctgttggccatttgtatggcttcttttgagaaatgtctactcagatctattgcccatttttaaattggattatgttgtttttgtttgtttgtttgtttttgctattgagttgtttgagctccccataccttctggttattaaccccgtctcaggtggttagttatattttctgccattctgtgggttttctcttcactttattgattatttcctttgctatgcagaagtttttagcttgaaataatcccatttgtctatttttactttgtttgcctatgcttttgagatctgacataaaaaaatcttcacccagaccaatgtcctggagtgattcctcaatgttttcttctagtagtttcatggtttgaggatttagatttaatctttaatcaattttgatttgctttttgtatatggtaagagagaaggatccagtttcattcttctgcatatagttatctagttttcttggcaccatttattgaaaagcctatccttccccccattatatgttcttggtacctttgttgaagatgagctggccgtaaatgtgtggatttacatctgcgttctctattctgtcccattggtctattctgtctgtttttatgccagtgtcatactgatttggttactatagctttgtagtaaaatttgaagtcaggtagtgtaatgcctccagctttgttccttttgctcagattgctttggttatttggggtcttttgtggttccatatatgtcttaagatttttttctatttctgtagagaatgtaattggattgcatttaatctgtaaattgctttgagtagtattataatttaaccaatattaagtatttcagttcgtgaatctggaatatcttttcattttgttgtgtccctttcaatttctttcccaatattttagtatggtatttctttatctctttgcttttgtcttcacaaattttagcttaggatgcagaatttggccttttcaaattctgactcccagtcctcaaggattgcaaggtatgggtataaagatttttctaaaaaatgaagtttcattattccctctctgcttttagatagtatagcttggactgaacttctgcttttctcatataatattatttgaggccacaagtaatgttcaatatcttgctatttttcttggggctgagtccaaagatttaacaaatcattggatagccagttgcatttctactgtataacaaaacttttcaaatattatttagggatgggaataattatctcctctctgttttgcaccccacactatctcagctattttcatatgttagagcctgttacttaaattatctgattcttaggtataaatgactcaggactttttcctttgcagatgacagaaacccaactcaaaactgctttaacaaaattaaagtgggtggtggggagtgcagatgtgtgtttcagaggagggaagattatctccacatctacaagtacatgctagattgggcactgatggacagaatcatcagtttattagtgaagcataacttgtgtgaacgagacaagctggctcaagcatttgaagatgcttttgaggtactgaggcaacattcaactggagatcttcaaaacttacctggttttcatcagtgattgtmcccatgtcagaggagattccaactgctatggaatgttgcttacagaggaatctatttataattggagaactttaataaataatgctgcagacttctattttgaaggaaccattcattgatctttgtggaacataactgaaagccagctggtgcagtctgctgttttccagcaacagggaggacaaggcgggaagcttctctgactgtttgaataacttcacaaatctcagtataatcccaagatggcatctgcattcagtaagtagataaaaccaaaggcagtttccagtttgtatcaaaaaatgaagaaaaatttgccaaactttgaggaataagaaagggcaataggaagaccatggtctatcagaaaatggccagggaactgaggaattatggaaaaactcaggaaatcaacaaaatctggagaaagctcatttaccaatgagcttcagtggggccattctctgaagatctctccatcttgtttctctgagaaagagatcgtctactcacagtatgttcaactgatcaagaacatctcagtttaagtaattggaatgcaaactaaaattttacatatgccagttaccatgagcttagtcaccatgattgctaaatatactctcccatttcatcatcttttttggcattagaaatccctacaagcttcaggatttttctcttaaagcaaatactgaagataaaaaaattagcttcattsaggctatcttttatcaaatagcacataatttatacagacttggtgggaaattctgccagtgaacaactttgttgtttcaaatcatcaagccccatttgaaagtatggactaaatatccttgcttttactattctctatgcagccactttcttctaggttaacaatgccagtgcagatgatttgatttatgtattaatttaaacattttcctgtcttacactcaggtgaaaaatcatttggatatatatctgatggctttacaaaaattatttacaaaaagtaattgcatataatacagtgtttwtgccaaagtatgtttatgtcttaaaaactttagtggaaatgtgtattcaggtcccttgctcattttctaattgggtttcttgttttcttaatattgagttgttggagctccttctgtattttggatattaatcccttgtcagatgtatggcttgcagctgttttctcccaatctgtgagttgtttctgcatgctgttggttgtttcattggctatgcagaagctttttagtttgatgtaatctgatttgtctatttttgcttttgttgcctgtgcttttggggtcacatccaaaaaaccgttgcccagagagtgtcatgtagtttttcctccctgtgttttcttccagtaagtttagagtttctggtattacgtttgaatctttaattcattttaatttgatttttagttctatatatggtgtgagataagggtccaattttattgttctgcaggtggaaatttcattttcccaacactatttattgaagggactgtcctcttcctattgcgtattctggtacctttgttgaaaatcaattgactgtatagtagtaggttaatttccaagctctctattccactccattagtcaatgtgtctgtctttttttttttttttttttccaataccatgttgttttgattgctatagatttgtagtatactttgaaatctggtggtgtgatacctccagctttgtcctttttgttcatgattgccttggttgtttgaggtttttgttgtccatatgaatttttgttttgttttgttttttgagatggagtctcactctatggcccaaactggagtgcaagtggtgcaatcaaggctcactgcaacctccgcctcccagcttcaagtgattctcgtccctcagcctcccaagtagctgggattacaggtgagtgccaccatgcctggctgatttttgtatttttagcagagatggggttttaccatgttggctaggttggtctcgaactcctgatctcaggtgatcctcccacctcggcctcccgaagtgctgagattccaggtgtaagccaccatgtccagccccatatgaagttttggattttttttttatttctatgaaaagtgatgttgggatattcatagggattgcattgaatttgtagatcactttgggtagtataacattttagtaatattagttcttctgaaccatgaacatgaaatatctttccatttatttgtgtcttattcagtttatttcatcaacaccttatagttttcgttgtataagtcttttgtctccttggttaaatctattgccaatttctttttcttgcttaattgctctgtctagaacttccaattccatgttgagtgggcattgttgtcttgttccagatcttgggggaaaggctttcagttattcactgctgagtcactgttagctgtcagcatctctggatagcttttattgttgagctacctttcttgtatacctaatttggtgattgtttttatggttaagggatgttgaattttgtcaatttttttctgcttctgatgagataatcatatgatttttgtcatttattctgttaatgtggcatatcatttattgacttgcatatgttgaacmctccttgcattccagagataaagacatttctcaaaagaatacatataaatggctaacagatataatgaaaaatactcgatattgctaatcattagggaaatgcaaattaaagccataatgagacatcatctcatactggtcagaatggcttttatcaaaaatatgaaagataaatgttgtcaagaatgtggagaaaagggaacaattgtacaatgttggtgggaatataaattagtatagtcaatatggaaaacagtatggaggttcttcaaaaaactaaacataaaattgccatatgatcttgaaatcccacttctgggtatttaccaaaaaggtttaaaatcagtttgttgaagagatgtctataccccatgttcattgcagcactattcacaatagcaagttacagaatcaacttaactgtgcatcaacaaatgagtggataaagacaatgttgcatacttacagaaaggaatactatgaagccttaaaaaagaaagacattctcggccaggcatggtggctcacacctgtaatcctggcagtttgggaggccgagatggatggatcagttgaggtcaggagttcgagaccagcctggccaacatggtgaaaccccgtctctactaaaaatataaaaattagctgggcatggtggtgggtgcctgtaatcccagctactcaggaggctgaggcaggagaatcacttgaaccggggaggtggaggttgcagtgagccgagctcgcaccactgcactccagcctgggtgacagagtgagactcagtctcaaaaaacaaacaaacaaaaaaaacaagaacaacaacagaaaagaaagacattctgacatttgtgacaacatagatggaattagagaatattatgctaagtgaattaagtcaggttcaggaaagcaagtactgcaggttctcacatatatgtggaatctaaaacccacagaagcagaaggtagaattgtggttacagaggctgggggttgtggggaagggagagatggtgatcaaagggcatcagattttagtcagacaggaggattttaaaaatacttttgagttctattgcacagcatggtgaatatagttaataatagagtattgtacatttcaaaattgccaagagagtaaatttcaaatgttctcaccacaaaaatgttaagtatttgaggtactggatatgttaaccagcttgatttagttattccacattgtattcataaattgtaacatcactttgtatcccataaatttaattataaattatcaatttacaatttcaaaaataaagtaggaaggggatttattggctcatagagctaagtctgaggtcaataggattaaggtgtggctggatcagatgtcatcagtactctgccttcctttctattccttcttattcttttttttttttttttttttttttttttttttgagagagagtcttgctctgtcacccaggctggagtgcaatggcttgatcttggctcactgcaacttctgccccctgggctcaagtgattctcttgcctcacctcttgagtagctgggattacaggtgcccgccaccatgcccggctaatttttgtatttttagtagagacggggtttcaccatgttggccagcctgctctcgaactcctcaggtgatccgccctcaggtgatccgtccgccttggcctcccaaagtgctgggattacaggtatgagccatcatgcccggccggaaagggtttcttaatgagagctgatgggatgggatttgaactggcaggaaataaagtggcagatactcctttgggcggctgcatcagcaagaatggaatcagggagttgagacgaggtgggacaggtaggaggaagccaactctcacttcctccttctctccccatttatcttcttttttaccctgagcagatacctgtcatcctttttttcatttaatattatatcataagcattttccatgttgctaatgtattttctcaataaactttttattttggaataattttagacgcacagagaattaatgaagacaacagagagttcttgtattcccctcccccagtttgcttctcctgatgttctcatctcacatgactggtcaattgtcataactaagaaaccactcttgtatgttactatttttatttttgagacagggtctcactctgtcacccaggctggagtgcacaggcacaatttcagctcactacaacctccacctcctaggctcaagcgatcctcccacttcagcctcctgagttgccaggactacaggcaaaaattaaatgggtgtggtagcatgtgcctgtagtttcagctacttgtgaggctgagaagaagaatcgcttgaacccaggaggtggaggttacagtgagccgagatcgcgctactgcactccagcctggcgacacagtgagtctctgtctcaaaaaaaaaaaaaaaaaaaaatgctggaaacaataagtggagggaaagtaacaggtacgggaaccaccatgaacaaaacattagaggcagaaacaagctctctttttatgttggcccctgggacagtttactcttctccccacaaagagtagctgaccaacacttggaggaaactatgtcaaagagtttaaagcctggagtggaaagattaggggtgtgctgggggagagacggggtgctgagaaggagggaagaggcatggctggagagagagagagagagatgtgggagagcaaagtgacttgtcaccactgctttttggctggcgtggcagtggggataattattaaaataatcactactaattgtaaaaattcatggacaatagaagggaacatcctcagctccttttcaccacttttttgtttgctttttgttttttaactgctcctaacaatctggtgtatttcttcacatgctttcttcctgtgcatacaaaccataagaatacaaacttacaggataccaggcaacaccaacctcctaagcctcgaacctctctctgccactggctgcttcgtccctgtgctggttctcctcctaacctccaggtggkctctctattctttccccttccttctctctttttttttttttctgattgagacaaagtctcactctgtcaccagactggagtgcagtkgtgtgatctcggctcactgcaacctctgcctcccaggttcaagcgattcttgtgcttcagcctccgagtagctgggactacaggcgtgcaccaccacacctggctaatttttgtatttttttttttttttgagacagagtcttgctcctttgcccaggctggagtgcagtggtgcgatcttggctcactgcaacctctgcctcccgggttcaagcaattctcctgcctcagcctcctgagtaggtgggattacaggcacccgccaccacgcccagctaatttttttgtattttcagtrgagatggggtttcaccatgttggtcaggctggtctcaaacccctaacctcatgatccacctgccttggcctcccaaagtgctgggattataggcgtgagccaccgtgcccagccaatttttgtatttttagtagagatggagtttcaccatgttggccaggctggtctygaactcctgacctcaggtgatccatccgcctcggcctcccaaagtgctgggattacaggcatgagccacggcgcctggcccccttcctcctcctgaaaaggcggatctcaaggctcagtcctgctcttccctccacatcctttgctcttgcargtctcctcttccacgcaggtggctccctcatctcctcttcaatatctgacttctctcaaaagttccaagtctggatttgccattacttgctggacatctcttcctttatctcatacccaccactgctcataaagatttgtcgacgaccaaagtcagtcatttgtctcagtttccttctttaagctttccattttttatcactggcatttgtgtatacccaaagtcatgggctcaaaacattggccttatccttgacttttctcattaacatccagctctaactggttcttctcctgtaatatctttctcctccatcccatagtttcagtctattttaccacctagatcatgatagacttcctaccatgaatctgtccccactccaacccatctccttacagctgccacatgaacctttataaaatgctatttacgtgttaatcctcttcctcctgaacacagaattcctcaccttcttgcttacctgccactgtcccaatttctaatcctggtaattatacctcccaccgtctaccaccaaactgtcttcctagactcacctcctgctcttcccacgcccgtgttccactccagcccaaatcatttagttattggtctcttaaaacactgcatttgctgactcctgggtctttccttgagccactaactcaatctgaaattttgatctccttttttttgaacttgttgaagaacttttttcccagctcaaatcccagtcaagccctgtctctttcaagaagcattcttttagctgggcgtggtggctcatatttgtaatcccagcactctgggagtctgaggtgggaggattgcttgagccctggagttgagactagcctggacaacatagtgggaccccatcttcacacacacacacacacacacacacacacaaagcattttttgaccacctccacagtccatggaactgacccttccaaaacctgaggccaatgcttattgatagactgggttggtatttacatattatatattatctctttggcctccctgagtttcccctgtgcagagactctacctatctctatttaccttctatttctctatttatcttcagtgcctggcacaggatctggacatcatagatgttcaataactttttgaaaaaattatttatatattgagagacagggtctctctctgtcacctaggctggaatgcagtggcatgatcatagttcaccacagccttgaattccttgggtcaagggatcctccagccccagtctcccaggtagctaggactacaggtgcaggccaccacacctggctaccattttttttttttwacttttcatagagatgggggtctggctatgttgcccaagctggtcttgaacttctggccccaagcattcctcctgctttgtcctcccaaagtgctaggattacaggcatgtgccaccatgcctagtctcaatagcttttatgtagaatgattatgcttatgcataggttgaaggtttgaaggcaagaagataaagtttggggaataaacaggggacatgttataggaatggatgaaggataaaactgtggtggggacacagggttaaaggagaggcaaaattgggtttggggattaagatcgcagaagagggatacgagtatgagattgtgtgagactgtcctacatgtcattggcagtgctcatgttagagggaccatctggatgtgctcatgaagttgttgggtgagaaccagatgggcctcagggtagggaaaattaggtggagtttggcctcctcagatctacaaaggcagacaacccagtgaattacttacttaatttgactcttgtagaggctcaaagaagcccgtcctggaaggtctagctgcttgtttcacaaaggccaaagacagggaagtattttgtttactggattcattcagaaaagtatttattgagcatatactatgcaccaggcattgagaacatagagattttgttttccctcaaggagttcctagtctagtggggggaaacaaagacataaaaagtaaatgcaacagtgtgttacaatggagaaagaatcccgtgtggggtattatgggggcacaaagcagggagggataggttcacctygaggagatagaaaaggcttctcagggaggcaacttgagctgagtctttaaatctgtgtagatatctaccgggttgatgggaatgaaggacagttggggagagggtaggcattctgggcaaacagacagcaagagttgcagggagctgatgaaatttcagggaaattcatgaattttgggtcaggaagagatgagtgatgtggttgcacagaaaacaggagacccatgaggagacgtctttggtgtgctggggagagataataaaggcctgcagcaagcaggggaagcaggaatggagacgggcagggtggaagacatgcraaggaagtggagcggtcaggactccattgtttaattggtgatgacaggaagagaaagagaaagagtagactgtgtgagagagagcagaagagaaggaaagattggtcattgttactccctggttcttggctggggtaactaggtatatgatgtgtgtgtatttgctgagatgtgggacacataaggactagaagagttgcttggtttttgataaccaagtctgaggtgcttttgggaatcatggcccacttaactttccactccttttcatctgtgaaagctctgatgtctgagaaaggtcaaagggctccttggtagagaactataagcaagtacgatccaacttaaaaataacttactgaacattcactatgtgccagacacagtgtggtccacgctaatctccgagggggcagggactctgacttgttcacgtttgcattccagtgcctcatacagaggctgacacacagtggacattcaattaatatttgttgaatggatgacaagacatgaatgaatataacggttaatgggcagtaggaatatagtaatgagaatctcctgatgcctccttttgggagcaagctgtctggttggggcgacaaatgtatagacaaccagtgtccaaagagcatattaaatacttgaatagaggttggatgtaagggcaatggggactgaagagaaaggaggagtgactgagccctcgtgttggatttttaaggatatgtacaagttttctaggcaaagaggaaaagaaatcccaggaagaaggaatagaccatatcaaggcttagaggggtgtaaatgtgtggcatggttctcagaataacaaaatgtttaatgcatctgaattctacatggcgatcataatacctgccatccccttataaggaaatctgccccatccacagtcagaggtgtacttggatgggaccactccccagacaaaagagcagggtcagtttctcactatgggkgtgtgtgtgtgtgtgtgttgatctggaaaatacagagaggatcaggcagttagcaataggaacaaagacggagagaagccagaggggccaagatggccatggggaacagaagttacaaagaagtagaacctcatggtagagaaaagacatgctgagcagagggagaagccgtggttrttttttyggctgagagcagatgaactcagatggtcagcccattaatcacatctgtgtatattaaaaatcttttagtcatgttaaaatatttgcttctaaccatcaaatatattttaaagaactcattaggagagggatagtctgttatatttacccagatatttaatgtttctgttgttctcgcttgattccccgtgttccaggtttccttctcacatcacttcccttctgtctgaagaaatttcttaagcaattcttttagattacatatgctggaaattgattgtcttagtttttttttcttcttttcatctgagaatgtcatcatttcaccttcatttctcaaagatatttttttctggatatagaattctgagttgatagctcttttctttcagcactttaaaaatattattctactttctttttttaaaaaaattttctttccacaggttattggggaacaggtggtgtttggttacctgagtaagttctttagtggtgatttatgagattttggtgcacccattacctgagcagtaaacactgcacccaatttgtgttctttaatccttcaccctcttcccgccctttccccctgagtccccaaattctattgtgtcattcttatgcctttgcatcctcatagcttagctcccacttatgagtgagaatataggatatttggttttccattcctgagttacttcacttagaataatagtctccagttgcatccaggttgctgccattaactcgttgctttttatggctgagtagtattccatcgtatgtatgtgtatatgcatatcacagtttctttatccacttgttgattgatgggcattttggttggttccacagtttcgcaattgcgaattgtgctgctataaacatgygtgtgcaagtaccttttttgtataatgacttcttttcctctgggtagatgcccagtagtgggattgctggatcgaatggtagttctacttttagttctctgtgaatctccacactgttttccatagtggttgtactagtttacattcccaccagcagtgtagaagtgttccctgttcactacatccgtgccaacgtctattatgttttgatttttttgatgatggccattcttgcaggagtaaggtggtatcacattgtggttttgatttgtgttttcctgattagtgatgttgagcatttttcatatgttggtcattttgtatatcttgagaattgttgtctattcatgtccttagcccactttttgatgggattgttgttttcttgctaattcgtttgagtttgttgtagattctggatattagtgctttgtcagatgaatcttctggcctccattgtttttgatgagaaccctgcagtcattcaaattattatttctctatgggaaatacattgcttttctctgcttgctttcaagatttttttctttggctttagttttcactagtttgattgtgattatctggatgaggatttgtttgttttatcctgttggtgatttgttgagattttcgaagctgtaagttatatcttttatgaaatttgaaaaattggaagtcgttatttattttttttgtgcaccacacactcttatctttctttgactctgatgacatgaatgttagaccttttggttttgtccttcatgtccttgagactctatttacttaaacaattttttcttgatgtcattcaaattgcatagtttctattgagctatcttcaaattcactgactgtttcctttgctgtctccattctgctgcaagctcactcagtgagctaaaactttttttaaaaatttattttattattaatttattaatggggtacaggtggtttttggtgacatggatgaattatatagcggtgaagtctgagattttggtgcacccgtcacctgaatggtgtacattgtacctaatgcatagattttgttcccttggtcctcttcccaccctcctgaatctccttctgaatctctaaagtccgttatatcactctgtatgcctttgcgtattcctagcttagctctcacttataagtgagaacatacagtgtttggttttccattccattatctcctagggggttggaatggtagaggtttcttaaagcttatctccttctcccatctcatgcactttttatttatttattttcccccagtattttatttactggtttgatggttcaggtttcaggccagtagaagaggtgtccctgagtaggaatcggttgtgggtraagcaagtgggtaaatgaagacccaggcttgacagaggtggctggaggagccctcggtgagtcacagtgaggtcttatcagggagaagggttggagccaccttagctcccctgcaaggtcagcagggacgttttccacttcttagatatgctcctgtcccagcgctctggctattcagatcagacaggcacctcttttcatctgtaggtgttggtgttccaaatagagaggaattgtgactgtttcttgtgcaagcctgatcctggagggtgctcctcttgtggggatgcagtcgccttgatgtgttccagaatggccgtctatagttgcatccatgtcgagctcctgtgggagaagtcccaactgtgcatatggtggtgaacaaggggggaaagactgcctcttctccaagatccttcccatgcaccaaagctgtctgactgttgcgatagagctgaaggctttccccgctgagcctakcacttcagctgcgcctctgctcaaggaagctttccaccagcggaaggatctgatgctcaaggcctgccatcccgattctttggtcccacagggtcttcccttgatggggcgcactccccctttccctatgagtgggagtccctgtgagccacgctactgtgaatgttgttgctcctctgggtctagctgcccagtgacgttgccaccctccaggctggtgttgggaaatgccagttgtgaatgccagtttcccagaagtgggtagcaacaccagctctactgggggtagcaggggagtgacgtagactctgaaattccttggttattggtagccatagtatgttggctttcttgaatgctagttatagtagtaatgagctggtcatgtggactcaggacctcctggttagccggagtgatgcaggcagtggtaatagctgagatcatagagcctccttcttcctgggtgcaatgttattctaccaggagatgctgtaatggactgtgctggttggcctccagccaggaggtggtgcttgcaaatgaacaccggctgcggtaggtgggtgtgtggggggggggggggggaggggcgtggtggtgggggcgtggagggaggaatactctggtttcacaggcaatagtcagggccacagagctctcaagagattctgtcctttgtgttaagctaccagggcaagtggcggggcaaagcgagatgggggctgcgtcggtcaggtttgtgctctgattctccgtgtgcagggcaagcagcagctcctgtgaatgttgggggatggagtgggtctcaggccactgggttgatgttcttctgcccccgctgcgcagaagagtttgtgcagagtggggagtagcaggcagcggtgagcccccaattcccatgcactcagtgaggcagatctactaccacagcttccactggcagcggcgagctgaattccagccagtctgtaatcggaacttgccacagttataagctttccccacgggagatcgcaattgtggttttcacgccacacccttccctgtcctgcaaagccggcacccgaggttcctgcacccgcggcttccgcactcacggccccctgcactcgcagcccacttttcactctcccacgcctggccctggccaagggagttggtccccacccaaggttatgtatatatatcatgaaacccctcgggagcttcgttcaacctgcgaccgccgtctaaactttttgcctgtcctccacgggggtcccctgtgaggaacagtaaggaacggctgccctcctgtgttgggatttgggagtgcacgcaagtgtcttctgccactgctcctatttttatattccgccaccctccccgagttggtccctttgctgggtggggttagggccttcctccgtgtcctgtactttcagggtccctggtgggggtgtgtatcccagaggcaaaaactcttcccctctcacactctgggactcacagtccttcacctgactcacagtgtagactgcagcctcctgcgtccttcaaagcgtccctgggttttcctgttcaatgactgcatcgcctcttgaaaaaagttcacaaagtgaatgtctctacactattttgtccttccacgtgggagaggcgtgccagcaatgcctctcatccgccatcttgacagaaacagttaaaaaaccttattgcatttttcagttctgaaatgttcatttggttctcctttatatttttctatttagttcctgaggtcttctaccttttcaacagtgtttgccccgacttggagtattttataacttctcttcatagtcatctatgtctcttcccatgtgaactgagattttcctgtcttcttatgatgagcaattttggattgtatcctaatattttgaatggtatgttatgagacaatcttgtttatgtcctgtggagaatgctggtatttttctgaagcattgacctggttgagttcagcccacgagttcgaatgagtcttccgcggtggtttcaattctagttctgttttccaggcctttgcaatgctatttggatctagcccatgcatgtgccacccagttaggaacctggatgggaccctatctctgaattcagctctcagtctttagtagtttggtccgtgatctaatctctgtttgtgcagtttaggaatgagcccctgagcttataaacaatattttggggtttccttcctgagctcctctctccctgtgatctcctctgtgcttttcagtttcctggcattttcctttttggtccttcagccagaaatttagggcctaatttagcctaccttgctgtacacttcttgcatctgtgccctcattcggggtcaagtgataagaggaaagagagaggaaaaaaaatccacggaggtgttccccgcgctcttgggaccacacttcttctgattggagaggaagattccccttcttcagactgcacgtgcttatcggcccccgctgctgttgtcatttccaggagacccctttatcactcccttatcccagaactgagggctttccctaaagcttgatctgtccatgctgacttgcacctctaggttttaggctgccttgaagtcagtctaggagttctgcagggaaaatctagtaagctgattactagttttccttctgctttcactccaacccccgtgatactgctgcttcacgcattctgcccaggtcttcattgttacattcagtggcagagaggaaccagcatatctgcctttaaaaaaatactacaaattataaagcatgcttgtttcaacctgacactgttgcttttggtttctttacatattaccacgttcttggcatctcagataacttttatagtattatttttccttttctttctgagcacattaccaaaagtttttgtgaggcaggtctttctttagaagtaaattttctcattaaaaaatgattgaaaccattttttttagagttctgctgagttcacatttcttggttgaccrataatttttttcaatacaccgaagacctgattctgttattttctggcttccgttgttgttgggagttttgttgttgtgctaattctggttcctttgtaggtgatctttccttcctttttgcctgtattccagattatcttttgatctgcggtgttctgaagtttcactctgatgtgtctagttatagatttatgttcattttttctgcttgggatgtaccagtctgtggggtttgatgtgaagcctgcagaactgtgtaccagttaacyctcttttcttcataaattatccagcctcaagtatttctctatagcaatgcaaaaatggcctaatccaccttctttgtgtctttttacagtttttgacttgaagtttattttatctaagtgtaacttctcttactcctttttggtttccacttgcatagaatatctttttctattcctttagtttcagcctatgtgcatctttatgaagtgagtttcttgtaggcaaaatatagttggatcttgttttttttttaatccattcagccactctgtctttaatttggaaatttagtcaatttaatgttattattgataggtaagaacttactattgatattacatagttgttttctggtcattttgcaactcctctctcccttactttcttttttactgtctacctttgtgcttaagtgattttctctggtagtatgttttaatttccttgctttttatttttagtgtagctattataggtgtttgctttgtggctattgtaaggcttacagaaaacatcttataacacattattttaaacttaaccagttgtcatttaagatgaaaattaactttagtcacaaagaaaaggagaaaaactgaagaaaactttacactttaactccatctccctacattttgacttttcattgtctcaactcacattttttataatgcctatctcttaattttcaaactagagacaggagtagcttacacatcactattgcagtattagagtatttgtctatttgtctatgtacttgcttttaccagtgagttttatacatttagatgttttcttgttacatgttaggatccttttctttcagaatgaagagctccctctagcgtttcttataggatagatccgctgatgatcaaccttgtcagtttcatttgtctgggaaagtctttatctctttcatgtttcatggatagtttcttggatatagtattcatgactgaaagtttttttcctgccagttgtggtggctcatacttgtaatcccagcactttggaaagccaaggcaggaggaaaacttaagttcaggagttcaagaccagcttgggcaacattgggagaccttgtctctataaaaattgaaaattaaccaggcttggtagctcatacccgtagtcccaactactcgggaggctgaagtgggaggagcacttgggcttcaggaaaatagaggctgcagtgagccatgattgtgccactgcactccagtctgggtgacaaagtgagactctgtctcaaaaaaaaaaaaaaaaaaaaaagtttttttctttgcattttgaatatgtttcccattctgccttggcctgtatggcttctgatgaaaagtctgttgccagacaaatcagagctcctttacatgttatcatgttattgtcttcttttctcttgttgcttttaggatcctttctttgttcttttttttttttttttttttttgagatggagtctcgatctcggctcactgcaacctccacctcctgggttgaagcagttcttctgcctcagcctcctgagtagctgagattacaggtatgtgccatcatgcccagctaactttttttttgtatttttagttaaagatggggtttcaccatgttggtcaggttggtcctgaactcctgacctcatgatccacccaccttggcctcccaaagtgctgggattacaggtgtgagccaccgcgcctggccatttctttgttcttgacccttgagagtgcgattattatatgctttggggtggtcttatttggatctgaatctatttggtgatatttgaacttcctgtacctgtatatttatttctttctctaggtttagaaagttttctgctattatttcttggaataactttctacaccttgctatttctcaactccctctcaaattccaatgactcctacatttgctctttggaggcttttccctagatctagtaggtgtttttaatttcttttcattctttttttcttttctgtgtgcattcaaacaaacagtctgagccttaacatgcaaattgctgctccaagatggcctactagatgcagccagtagaaacatctcccagtgagggaccaagacatcaggaagactggtgcactcctagcagatcttcagagggaaggcattgagagtggacagagggaaggcacagaggctgggctgaaggggaggaagctgggaaccctgaacagggatactgcacaccaggactcattctggcccccactgattcctgtggaaggggtgagtctaacaggcaaggagcagcccaccctcaccatgggcctccagaatcccaacaagaggagagctctcaaccaccagatatacttgagttggcaggaagagatgtctagagaaggggtaggggcagaaatcctgctggtgcagagcccagagagttcggtgcaacaatgtctgtactggagtacagccagggaaacccatgtccctaggcttgacttgctcccataggacactttagccctaggggcacagtcagacctgaactctgaagggtggtgttgcccatgagacaggaccagtttgacctcagcatcccttggtctgctggcgtctcacagagccccagcctggctgcacctgcctgcagtgcagctcccagatacctccttgggggcccacatcatagctcctgtgctggtggaccatgcctgaccaatatatggatccagcagagcagccttcacagatatgcaccaggctacccttgccctcccttaactatagcctcccccatgcagctttctctgtacacactcacctgtggccacccacattgctttgccactgcatgtgtttacaggcaaactttgcctttccttccccaccagtgcacatgtgtgcacaccctgccatgccactgctgctggcatgaatacactccgttctcctgcccctcaccatacctgtcagtgttggtgggcatggaacacaccagctctgctaccaacagtgccctggccctgtgccaaaactgcaactggcacaaagctaggcatggagaacagcgaatcccaccccttccctgagcagccaccaccaccgatgtgagcacacacacaactgcacacacagtcctgctcccaacaccaccctgtctccatgctaacaccaccgccacaaacacatgcatggtcactggcagaagacccttgtgccgcccaagccatgctacctcttttgctgctatgaatgcctgcatggaggctggtaccccagcacccactagcatcctgccgcagccaaggagcattcaccttaccatggtgccactgctgttgctgctggtaagtgcagatgaaaactaatccagtggccaccaccctatgagtaactggaactctagtaggaacgtaaacagatatagacactttgggaaacagtttggcagtttctacaaaagttaggcacacatataccatgtgaaccagtcatccccaagcaaattatttcccttatagatatttacccaacagaaataaaatcatatgcccatacaaagacttgttcacaaatgtccatagcagctgtattataatttatatatatgtcaatattttgactatcacaagagtcaaaaaccggaaacaactcaaatgtccatcagcaagtggcagatttttcttaagttgcagtatatacatatagtggaacactactcaacagaaaagaatagtgaactgtggacacaggtcacaacaaagataaatctcaaaataattttgccgagtgaaaaaagccaaataaaaaaccctgcatattttataattcaacttatataaaatttgaggaaatgcaaactaatttatagtgacaaaaagtagatcagtggttgcctggggtcataggtgcagaatgcagggaggaaggaaccataggaaggggtcataaaagggcacagggacactttcagagttgatggatatcatggtaggtagaaaatgtccatgtcctaatccccagcatttgtgaatgttttcttacatggtaaagagactttgcacatgtgatgaacaatcttgaggccaggggcggtggctcacgcctgtaatcctagcactttgggaggcccaggcgggtggactgcctgagctcaggagttcgagaccagcctgggcaacatagtgaaaccccctctctactaaaatacaaaaaattagccaggtgtggtggcgggtgcctgtaatcccagctactctgggggctggggcaggagaatcgcttgaacccaggaggtggaggttgtagtgagtcgagatcacgccactgcactccagcctggcgacaaggtgagactctgtctcaaaaacaaacaaacaaaaaaaaccaactcaccagaaatatgttgctaaggagcaaataaaacatgtatccaaacacttccatatgagtttaaaatacttatgataaatcaagaaaagggcaaacatgtcttctagagctgggatacactcatctcctcccttagacaacagaactccaggtttgccagcctggattccaggacttacatcagcagcttcacaggttcttaggaccttggcctcacaccaagaattacacaatcagcttccctagacctgaggcctttagacttggattaagccatactaccagcatcccggagtctccagttcaccaatggcctgttgtgggacttctcagcttccataatcacatgagccaattcccataataacccccctcatatatgtgtatgtgtgtgtatatgtatctataaatctatatttatatatatatctgtgtgtgtaatctatatgtgtgtctctctatcctattgggtctgtctctctagagaactctagtacacaactattgcctgtttaataatgacaattcaggtagtagaagtacacacacatttaagaataaatttttaaaagatatcaataaaaatttggtgatgagagggaggaaatatctacaagccaatttcatcattgctcatactaagaaatattttaaatgaggagattaaggtctttatatcaaatagaaactataaagattattgctagatcaaaattataaaccttcttgaatagtctaactgcaataagaagccacagagtaaaacattataatttatatatataaaaaatcacatgaaaaacttaaaaatagagcatatcaatagatgtaaatgatgtaaatgaacatagcatgtattacaagaaaaatattttcatattagattacaaagaaaaacccaactgtctactatacacaaaaggtacatttaaaataaactaattctggaagttgaaaataaaaggatgggcaaatgtataacagacaaaaaaagtatcactcataatcttaaaattagatattataggccaggcaccgtggctgacacctgtaatcccagcactttgggaggccaaagcaggcagatcacgaggtcaagagatcgagaccatcctggtcaacatggtgaaaacccgtctctactaaaaatacaaaaattagctgggtgtggtcgtgtgcgcctgtagtcccagctacttgggaggctgaggcaggagaattgcttgcttgaacccgggaggcggaggttgcagtgagccgagatcatgccattgcactccagcctggtgacagagcaagactccatctcaaaaaaaaaaaaaaattagacattatagaattcagagcagaaagcaaggctacgtgtttttttttttttttttttttgagatggaatctcgctctgtcgcccaggctggagtatagtggcgtgatctcagctcactgcaacctccgcctctcgggtttgaagcaattctcctgcctcagcctcccgagtaactgggactacaggcacgtgccaccatgccaagctaatttttgtatttttagtagagacggggtttcaccgtgttggccaggatggtctcgatctcttaacctcgtgatctgcccgcctcggcctcccatagtgctgggatcacaggcatgagccaccacgcccagccttttgaaggctagagggaataattcacaataaaaatataacaataatccatatcaatataaaataacaatagcaatttttatggtagagaaaataaaagagatttacaaacaaacactgactttgattatgccaactgtttcctgccagggattctgattgctatgtgtgtgtcccataaaaatatcacacatgtcatcttttatgttctctcttattttgctacctaaatgttcttaagtatggtgaccacatgttaaatatgcagagccacaagatgaagggagcctgagtccctaacttagtgaaggaggactacgcaccaattaggaaccattgttttaaatttatcaggagtgaaacaaaagaacaactattgtctttgaaccattatttatttgggctgatttgttacagcagctgttaccttaacaatgtaccttctaatcaattaatgagaaacccagtcattctcctatgggcccttcccaaaagcctagagacagagtttccagcctatttgtttaaatattaagggtagcttgtgagtgaaaatcaggatgactttgggaaccagggactccctggaatgggtacctgcatggcagagaaccattaaggaaagtggacaaccaggagactatgatgtcatagaaagtaagagataaaagtatttaagcaaagtgaaagtggctgtgtcaaatgccaccaagaatccacatagactgctgttgactgtgataactatgatctatatctgaccagcagacttcctacccgttctggtaaagtatccaaataataaggtggtatggggaaaataggcatcccagtgacccagagttagtcaaggatagcctctttggccacatataagagacacagatgtagatctcctggagatgtgatgagaggccttggagatttctgtaagatttgtataatacaggacccttttgctaggtttggaaatttctctagtattcaaatatcttaaaacttcatgcagtatggaatcaggcaattctctggagcagtaaccaaagccagagatacaagcaacgaattgagccatacgggcatcagacttacccagaatgggatcaaytcctccagataccataaaagttgatgtgatattaaactgacaaatagaatcatcaaatataatcctttccgtatatttactgacatttggatgtccccatgagaaatgtatgtttaagtcttgagtatatttttttcttttttgagatggagtctcgctctgtcaccaggccggagtgcagtggcgcgatctcggctcactgcaacctctgcttcctgggttcaagcgattttcctgcctcagcctcccgagcagctgggattataggcacacatcaccatgcccagctaattattattwttttttttttggtagggacggggttttaccatgttggccaggatgatctcgatctcctgacctcatgatctgcctgcctcggcctcccaaagtgctgggattacaggcatgagccactgtgccaggccttttgtccattttttattgaactgcctatttcttcttactgatttgtagaaagtctttattctagtctggcaggtattttctttcaacacttccaagattattcattgtctctggcagctaatgtttcatttgagaaaatgctacctgtattattgatgcccatgtgaaagtaatgagatttttctccacattgaagatttctctttaatctgtggctgatgttgtctttgaaggattctcgaccatccctgtatctctctctctgtctctttctcacccactttgggttgggacctcaaagagctgcaccctagcagtaaaggtggggtggaaattcaggccttaaaggggttaaaacccagcatcaaataatcttagttcctgattgaattaaggtgatctgtgactgctagatcctcagtctagctctctgcacatcaaatattttctaaaggaaggtaagtctagttagaaagttagaccaacagacttaagctaggctttacagaactgataggttcgaagtacttctaatccaccgttgcctgaatgccatggcattttatcttttagttataatagttaactcttctcttctacaatgatatgtgatttattgtgtaatgttgcttttggctaattaaaaaaaaaaaaaactctgcctctgccctggagaagagaacatactaacaccattcattagcttagcagaaatttagagacaaccctgtgattttgaataaagatccctctatgggccagaaacgaatacaaaggacctgctgttaagccgctgtgaaatggaatgagagaaaaatgaagagatgaacttgaaactggggttctcagcctaatagaatcggcgcagctccagaactcaggatgctttcaatatcatttttacagacagctgctatattgccaaactccagaggacaccttccacatggaatacaacataaatggtaccctgtggagttttgtaatagcatgaccctacatgagtgcaggcggactagggagcgaaggaccaatcaaagccagaacactgagctttaatgattcccgaaggcaatttgagcctgttgtagaaataaggggaggtgatttcataagacatctagaggtgagcagtccacgtaggattaccacaaacatagattcagagatcacagtaagcctctcataggcacaggtgcctgaacagattatctgagtaaaagagtcgttatatcagaccctcctgagagatgaggtgggagaatttgaaagctggactgaggatatgactgtgctgtgcagagatggggacacttgctgaggaaacacacgaggatggggagtagattggggaggaaaatgggagtgaggtgacacatctagaaaatgggagagccgctgggtgyggtggctcacacctgtatgtaatcccagcactgtgggaggccgaggcgggtgggtcacctgaggtcaggagtttgagaccagcctgaccaatatgatgaaacctcatccctactaaaaatacaaaaattagccaggcttggtggcacatgcctgtaatctcagctatttgggaggctaaggcaggagaattgcttgaacctgggaggcggaggttgcggtaagccaagatcgtgccgctgcactccagcctgggcaacaagagtgaaactccatttcagaaaaaaagaaaaaagaaaaaagaaaatgagagagctcagggagacaacccagtcataggaagtgatgacagggcttccgtgacctgcatcatccagcttttcttcttacctttcaaactaggatcattctcacttcctggcttcattttcttttttctttttttgagacaagtttcgctccatcgcccaggctggagtgcagtggtgcgatctcggctcactgcaacctccaactcctgggttcaagcaattctcctgtctcagcctcccgagtagctgggactacaggcacgtgccaccacgcccagctaatttttgtacttttagtagagatggggtttcaccttgttggtcaggctggtcttgaactcctgacctcaggtgatccacctaagtcggcctcccaaagtgctgggattacaggcatgagccaccgttcctggcctcatgttcttttttatatccctaattcttgttagggccaaggacaccttggccctctgcctcttctttttcccttgttcataaattcagctcctaagtcatccaaactgtagaactcacctccatttttttttttttctcttgagacggagtttctctctgtcgcccaggctggagtgcagtggctcgatctcggctcactgcaagctccgcctcccggttcacgccattctcatgcctcagcctcccgccaccacgcccggctaattttttgtattttttttaagtagagacggggtttcaccatgttagccaggatggtctccatctcctgacctcgtgatccgcccaccttggccttccaaagtgctgggattacaggcgtgagccaccgcgcccagccagaactcacctcctttcttttttcagttcagcctctccaattacctgtttaatttcttcccataagaaccacagtattacatcaaacttaaacaaccttccttctgaatctttgtatttctcgccagttgtgccgcaactgaaaacctcagcgtgacctctgcctcttcctcatcccctccctctcttctgactctccttgctaccattccatgcaaccacaaaaacttctagcaaccaagtcagattctgtgagtctatggtctgtggctatcttaaaattctttcgtcatctactgaaaaaagtcatatgatggacggaagcaatacacagaacaggacgggacattagaaggttgagggcatcagtaggtgaatctggatggctcacacatgtctatttctaccgtattaaccgtattgtatatgttccttttaaaaatatatgggacataagtaatttgaatgcataagattctttaaaagactcaaagaatctttatctctcctttttttcccattacatcagatccatccgaggctttcattggcctctagattttatgatcagtcttttaactgttattgctatgaccacaatcctgggctttgcttccttctagcaaatggaatctgactctgctgcattttggtcccaggtcatttctgcccttatctctccaaccttcattttcctgttataagatggtgatagtgataccaacctcacagagaagttgtgaggataaatttttttttttttgagaccgagtttcactctttgytgtataggctggagtgcaatggtgcaatctcggctcactgcaacctctgcctcctgggttcaagtgattctcctgcctcagcctcccaagtagctgggattacaggcacctgccaccacacctggctagttttgtatttttagtagagaaggggtttcaccaagtcggtcaggctggtctcgaactcccaacctcagatgatctgcccccctgggcctcccaaagtgctgggattacgggcatgagccactgtgcccggtgtgataaattgagattatatatttaaaatttctaacatagagtctggcctactagttccttctttatccatttatctccagtatctaggactgtgggctagatggtatgttttaaggatgcaaggatagagcatgatgagaagagggtttatcaagagtcctgggacaggactgagaggaaggctgggatgcagctggggagggatcatgcaggagggctgtgctgggagttgcaccagaggcgttgctgcaggtagcctaagggatggcttattgaggattcagagaggcctcaagccaaaaacccttgtcaagagccaggtttcttagccccagtggactcagtcatccagaacacttgtcatttaacttagagaggttccaagatacccttggaaaaagcattgattgctagaaaaaattttcattccaggaaaacttttctttccttctttggaatctgaataaaggggcaggaaacaaagcaaggtctctcctcccaccttccaccaccacacatataatccgttttgttatttaatcatatatttttacttgtatctaagccaggtcctttggcaatgaggaggtgtgcagggatcggggtgaggaagtgcaggactggatggacatttaaggtagggcagctttgggggatgccacttccaaatgcaatggggaccatcactgtgtattccccatagttgtgtggtgagcagctctggataccctgaccacaaagctttggggacaatttgttcaccagaggatgtgaggaggacggaatactcaaaggcactcagggatggtggagctttggagctgaggcgggcaaggcctctcagatggtcacgctgttctctaccatgctgggtcaaaggtactcacagggcaggtccaggactgcattccggacctcaatctccttgtccatggaagccagttcctcctggaattgtctcagcacagcttggggctcaggaccagagaaatatttctcctcatgctgagaggcagaagacaagttggctcagccccttgggactctcagcccrgaatacttcccctcctttgagctgcctccttcccaggacccaggcatttgcttctcaccatgacaggctggcgtctgccaaggaactttgtgaaggtcttttgcatacgtgcctggtggagattgggcagtaagtccactakatccttctctgtcacatccttagagaygggygggggcttctgcatggtgcatgggccattagggatccaggrgtaccagtccagctgcagggaggagagcccagagaaatgcaggctgatgacctgggcatttgatcccccacttctccatcccaggagccsttgtgggatgatcacatrggttacctggcccaggtggttagaagcatgctgacctgtgcatgtgaagatgcacatggtgacaaagtggcagagctgagcccgggactctaaggagatgaggaacctggtgaaatgagaatcctggtgaaatgagaatcagagatctcgaaaccagaacacgaaataggtctcasgcagggaaagctatgtggagatacagaaaagaacttttctgtggttctggcctgcacaccctaggactcccaccttgtgtgtgctcaaaggttaatgcacktgggatgaaccttgagctatggggagaggggagggaagagtgagggaaaatacctaagagaagttttgtatctagttccagaggaagctcttagtgcagaggagagagaacactgtgtaggaacagggctggggagatcaggagtgcttgttagcatttctggacacactctggagaattctcagcttccttgggcaggtggggtgtctcatgatgatgtgagaagaagcagattgtttgcagrggagtrggtgttgacagggttcagtggggarggatccatgtctcacccctggtcttgggcyctctgcagtccagtctcagtcatctctctgcaccaggyctgcagctctagatcatccttcatggcttggtcactattgtagaaaagcccaaccatcccctccaygtacctattccctgggaagaagacactcagtctcaggggccaatgcaggaccttctggacctacagtcccccgcccctccgttcattgcctctctgtgccaccttcacctaccggctgatgattccccacagcctgatggcatcttagccataaaaagaagatttcacatccaggagcccacggtcagccaggtcatcaggaggacagagggaatgataggtcaaacaagccatggctctctgaagaatgtccacgtggcttccactaccagtgctcaccacctgaggataacccacagccatgccaagttgcagagggagggagatgagtatcaggaaactccaggcctatgatcctactctagcccttttaagcaggaagctcttcaggcatgaggcaggtttgggagaggccttccatggaggaaggagagcttgggggaggaatgggaaagggaaacaacccctaggattcttccaatattgaaccatcctccccttcacccatccatttccataccaggtcaaaaattccccattcggagacaagactactctgggccagcgtgttgatcgccatggtgtagcggaagtgggggatcaggagctgattatggaagaaagaaatgggacatggtcaaataagagagttcccagcatccatgagggaagaggatgttaaaggaagtgacagaaaagaagggagaggatgggtctttatgaaatggagagacttctcgttaaattggagtgggtcagggtaacatttgggaatatagagatgggaaaatgtcttctcagagcatcccgtggtgaaagttttaggagttcacttatttccacagtttcatgtccttggaagaattctaaaaatcccatatcctcgcaggtacccacatatgagcccatccctttttgccttcaccctcctataattatattccttctcctctctctgtcatacaaacatgtgcaatattggataccctaaagaaaacctgtgcttgacccccacatccttgtcttgccatctccctgtttcttgctttccctttcacagcaaatcttcactcagtgttgtctttgcttacccacctcacatttgctgctcacccccatgaatcaggcttcctccacttccctgagatggcgcatgtccatttattaaccaatgacttccatattgagaaatccaaatgtcacttctctgtaactttcttgatctctcagcagcacttgagacagataatcacgcgtccctcttgaaacgctttcttttcctggctgccatggattgcactttttgattttcctcctacctcaatgaggttccttctcttgtttcttttctcactctgctcccttctctcagtctgtaaatgttggttcaccctagagttatatctcggtcaaattctctacaaaccctagagaacttcatccagtacaatgactttgatacttttgttttctaatgactctaaaatctgtattttcaacctacacctcttctaggaactccagactcacatatccagttgccctcctgacatgtgcaaatgggtctttataggcattggaagccccacatggtcagaaaataactcttgattcttctccccgctaagtaacatggcttcttctctcatctcctcccacttcttcttcctcctcatcccaactcatgccctacactttaatctcacccaatctcagccattatccatgttcccttctttcctcgcctctttagatctttgtggctgtaatgttccacccctcacttgcccacctggaaacctcctcagccaaaatttcaactcctttgcaaaacctattctcacttctccccccaactcatagtaagtgtgtgtcctgggtgtttccatattactgtgtatgtgtacgcgtgtgtgtatgtatctgtgtatgtgtctccacatataaattgattgctgctagactgaaatgtacaaggttagactctttgtaggagtctgaaatatgaaggacagtcagatacagaatgacagagatgctgaagtaccttgtagataggatggaggctaggcaagcttctcattgtagccacagcaataacctcagcaatcaagtgtcccctcagcagatgtgactgtaactgctgcagctggaaatcagagctccggacccaggtcttggccaggagccaggccatggggggatgcgagggcagaaagagcagaggtgggggacatccgtgtcaaggtggctggagctagagcaggagagagagtgggggctgagaacttgtgtatctaagtccctaaaggagatcagtgtctggtagaaaaatacctgggccctctcacctggatgaccatgggtaagagtcctccatcaggctgaagcttcagcatgaccaaaggggctgccacgcattgctgcttaaaaatgatgacattaggcttgactccatccagcaaggagaaatccacttcaaacagagatccagcctacagggccaggggcaggaatagaaaacagggttggagttgtttctggagctgcccttctctcattttccagggtggatccttcctctacccacccaagtcttttttactttaaacaccaatcactttctgcagaaccaaaaaactgaatgcaaagttttcatgactgatgtcttccttcagacttggagctccctgcagcgaagtttctggttttccaccacataaggccactgcattcttcacgtatcccctcttctgccagctttagccaatgtagcaaaaatatttcctttagctacccatctccccccaaaaacagattcagcttttagctctccaaggctttgtttagtttttcttgctatttctctccagaagcttgcgcttttccctaaggctgatatatgttcaatgaagaaggaagagaggaatgtggagaaagaaaagaagatacaggaggagatgttgtagatcaatgttctcaatcaggggcaattcctcctctccccaaccccaggacattcagcactatctagacacatttttggttgtcacaaccggggggatgctgctggcatcaatgggtagaggccaggaatgctactaaacaccctacgatccacaggaaagccccccccccccccccccgccagccaacagagaattatgtggtgcagaatgttaatagtgccaacgttgagaaaccttgggtgtagatggaggagatgagagaaggggctggagatgggaggaraagggaggtgggggtaatggctgggatggtggatgggcagaaagcccagcagcacctggagttctttctccagctgggtcttcaagtcttccatccctggaggcagcaccaggcaggctgggagccttgaaraacacctcaggagcatggggtttgcaccattgagaaactggtacccaaagaaggcatcattcttccaagaatcataaacccgctctaggaacatcaattggggagcaccctgtgagctctgagctccgaactcctaatcccactgatctaatcctccatccccctcctttttcaaatccctgggttggaagtctgtatattggttttgggaggttgtgaaaactgaccagccaggacagtctttccatgtgggaatatttttttgaaatcttccagccttttcacacaatttatgaaatccagtgtccccttaatggccaagyccttcaacctgtggaaagaatggagtgcaagaagatcaaggaagmatcccaccttgtgccctaggaagcaagtgcccagcctctacctggtactcacccttttgctagggagacattaaagtctaaatccttatcctcgaggaatcgctcgtccctaggaaggtccggttgcctattccctgctataggcaggattaacccatctttccaggagccccacctggaggaagaacacacaggtaggggtaaggaggcaggtggcaggtttcttgggatctggtaggggatcaaagacttcctggggctcaacggtacaccttccttctttcctcgagctcctgttcccgatatttcttaaacaggttctgggggtcatcactcacggtccgggctgggggagagggacaagagcacatgccctccctggtcacccctccgcgctcgggtctccccatcagccaccctcccccttcacttctccccatctccctcatctctcattttccctcttttacagtagcctccccccacccgcttcttcctccagcctgccaggggctgtgccccttctccaccgagctcaccagtaccctcaggcaggcagatarttccgtggccctgcacccagcggtagcaggggaaaaaggcckcgccttgggtccccgggccctgcactgagatccacttgcagaaccagtcgagactcaacagcacgttgtgtttgcgcagcttcaccatcaggaggcgccccaggtgcagggggacgtcgatctcaaactctgcctcctgcgcgacagtacacagctcaggttttggggtcttcagggaggacggcggggtcggtgaaccttcagagaatcctggctccgtttcccctccacagcacagccggggagaggtggaggtgaggaggagcagctggtactgcggggcgccagcctccccccgggcctgccgtgcccaccccagcgggcgtctctgtccttccgctcgggcaggaaaatgcctctcatctctcctgttcctctcgcttttcctatcaggcgcaccaagtgcacccgacctcagcccctaccccgcttcccaggtttctcatgggtggggcagcagcaccctccgaatggccccggcccccagtgacacctctgagtcccagggccccagctctcaccgcagtccgcgctcacctttccccacaccggtggcagctgcttccctaggtctgcctccccgtgctcgcccaccagccatagctgcascaggttgggagagcccgccaggagcaaatccccggtggctacgcggaccgtgtacttgcccatcttgcccggagatccggggagaaatcagctttaaaaggatctgagacccagctcccagggaaccacgcccagcccagagtggctgttgtatttgggtttcaggctccccacctcccacccacagattcctccccgactaggaggaacgctgggactggcgccaggctagggtctctgtatccagagtttctcccggcggctctggaaagggcagcctcacccttattcacttggcaaacactccctgatgccagtttcacaccctgccatgagccaaacacagcagcctacggacgatgacagctaaacactagctcccacccaattttggtgaatacataaataagattgccacggaagtgaaatggcttgatcataggggtatttttcaatggaaagttgacactccccagacactcctgctcacccacggctcgcctctctcctggacctcctgggctatcgtgaacagaagggcttgaacagcccttccacctcctcatgttgaaagagaaataaagggccattgtgttttcattgaatgggggtccataataagagctcttctaggtctttcttgcataagctacatccagatgagttgacatttatttgaaataaatgtctagaacctaaaggttcttgtggggaaaaaaactaaatgcagcctctatttagatctttacagttttctcaaaaccttttatagttgtatggctgactcctagtcatcaaattgacagtgacttttaaaagattattgtttatgtagtcataaaatattcaacttatttttaaaaaatactggtatgtttatactcctatttcattagtttgtctataaatttcatcattacaataacaaatataactgatataaacagtttttttttcttttgagacagtcttgctctgttacccaggctggagtgcagtggcatgatctcggctcactgccacctccgcctcctgggttcaagcgattctcatgcctcagcctcctgagtagctgggattacaggcgcccgctaccacgcctggctaatttcttttttgtatttttagtagagatggggtttcaccacgttggccaggctggtctcaaactcctgacctcaagtcatctacccacatcaccctcccaaagtgctgggattacaggcgtgagccactgtgcctgccataaacagttttggaagtttacacaactattcttgataaacataaagctcaactggtggacatcaaagtgccgggcaggtcagtttttttttttggaggagatggacagtgtcagtctcctgataagttggtgatgggtaggtaatttaaaagcttctattataaaatctagtctctctgacactgccctgtccactgcagtcacatctcccaatactgaagaatcctgagaatacgagcggtcatgacacttactcacgtcattcaccagtaaaaccctctatccttcctcctcaaaatcaggaatgctctcctatcctccccattgacccccacccctcacaagcttcacctccactctgtgccctaccattatcctctagagcctcaacttctctttgaagaagatccttctaacattttggcaacatattccctccacttaacctctaattcccattttcagtttcagtcaccgaccagtgcaataacagcttagacttcatttgtcacttaaaactcacctatagtatattacccattttgtggtttatccactcagcccatgagccactctccccttcctgaaggttctgactggagagagaagaaagagagagaacaattgagtttctgagggttttccaggtcctgtgaaatccagctcaattctcttccttgggty

SEQ ID NO: 5739 - DNA, 33683 bp, Homo sapiens
aatagagaatttccagtattgtgttgtgatgaaaacaaaactgatgtggtggggccagcatactgagaggccgaggtgggagggtcgcttgaggcaaggagaccaacctgggcaacaaagtgagacctcatctctacaaaaaaaaaaaaaaaattaaaaattagccatgagtggtggcatgctagttgggagcctgacccagggggttcactggagcccagttcaaggctgcagggagctatgatggtgccactgcactccagcctgggtgacagagtgagaccccatctccaaacaaaaaacaacctaggctgggccaggcacaggggctcacacctgtaatcccagcgctttgggaagctgaggtgggtggaacacttcagatcaagagtacgagaccatcctggccaacatgctgaaacactctctctactaaaaatacaacaacagccgggcgcagtggctcatgcctgtaatcccagcactttgggaagccgaggcgggcggatcacgaggtcaggagatcgagaccatcctgactaacccggtgaaaccccgtctctactaaaaatacaaaaaaattagccgggtgtggtggcgggcgcctgtagccccagctacttgggaggctgaggcaggagaatggcgtgagccattcgggaggtggagcttgctgtgagccgagatcgcgccactgcactccaaaatccagcctgggcgacagagcaagactctgtatcaaaaaaacaaacaaacaaaacaacaacaacaacaacaaaattagttagacgtggtggtgcatgcttgtaatcctagctacttgggaggctgaggcaggagaatcacttgaacctggaggtggaggttgcagtgagatggaggtgcagtggcactgcacactccagcctgggtgacagagcaagactccaaaaaaaaaaaaaaaatcctgatgtgaagcgggtgatggggttgggaacagtaatgagtggtccagaaaacccttctgagaaggtgcatttgagctgagctcatggtgcttggtgttgggtttgtagacatggcacagacctagtcttcatccctgacaaactcttccctggccccaagcctgtgtgtgtccatcctcttctaaaaaaagcttggacttgccagtctagaggtgagggtccctgggagcaacgtggaccctctggagaaggacgcttagcctgtggatctccgaagcacactttggaggtgagagatgaaaaaaaagaggccgggcacggtggctcacctctgtaatcccagcactttgggaggctgaggtgggcagatcacttgaggtcaggagatcgacaccagcgtggtgaatatggtgaaacccgtcgctactaaatatacaaaaattagccaggcatggtggcacgtgcctgtagtctcagctacttggaggctgaagcagaattgcttgaacccgggaggcggaggttgcagtaagccgagatcatgccactgcactccagcctgggcgacagagtgagattctgtctcaaaattttaaaaaattaaaaaaaaaaattgtgcttctcagtggccctgctcctgtggctgcaatatggaggaagagtacaaagggtgggtacaaagactggcctctgtcttgctgttgggaaatccagctgccacgttgtgagcttgtgtctggaattggttccttctggtgggttcttggcgtcgctgacttcaagaatgaagccatgcaccctcgcagtgagtgtcacagttcttaaagatggtgtgcctggagtttgttccttcagatgttcagatgtatctggaatttcttccttctggtgggtttgtagtctatgctgagttcaggagtgaagccacagaccttcgcggtgagtgttacagctcataaagataatgtggacctatagaatgtgcaacagcaaaatttattgcaaagagcaaaagaacaaggcttccacagcatggaaggcgccctgagccagttgcagctgctggctagggtggcctgcttttatttccttatttggtcccacccacatcctgctgattgatccattttacagatagctgattggtccattttacagagtgctgattggtctgttttacagagtctgattggtccgtttttacagagagctgattggtgcgtttacaaatctttacctagacacagagcgctgattggcgtgcttacaatcctttagctagacacagagcgctgattggtgcatttacaatcctttagctagacagaaaagttctccaagtcccctacctgattagctagacacagagcactgattggtgtgtttacaaacctttagctagacacagagtgctgattggtgcatttacaatcctttaggtagacagaaaagttctccaagtcctcaccggcccagaggcccagccatcttcacctctcaagctgtctgtagaggtccacgtgtcaagaaaactgaggacagaggccctcagtccagttcccacaagcaactgcatctccccaacagctgcctgaatgagtttggaagcagtcctcccaccattcagccttcagatgaaactgcacccctggctgacaggctgattgcagccttatagcagaccttaagcctgagacattcgacccacagaaaaggtgataattttggtctttttttttctaaacaggttcttgctctagagtgcagtggcacgatcatggctcactgcggcctctacatcctgggttcaagtggtcctcccacctcaacctcctgagtggctgggactacaggtttgtaccaccatgcacagctagtttttctctttttttcttctttttgtaggtacaagggtctccctgtgttacttaggctggtctcaaattcttaggctctagcaatcctcctgtctcagcctcccaaagtgttgggattacaggcatgagccactgcactggggcaatgttggtcttaggctaattatgcagcaggagatacatgcactgtgctttgggaattgaagtcacttctatttctttgtggcttcatcagtaatatggggcagggggcacggttcccacagctgattcttgagtgttctttctgagtatccttaatacttcacacactatcatatatctgaactttgttcattgattatctcccctttaattttcattccttgatgaatctccagggtctggattaagtcctaggatactttatgtactcatgaaatcttcaatgaatgaagaaatgattttttttttttttgagacagagtctcactctgtcacccaggctggagtgcagtggcatgatcttggctcattgcaacctccacctcccaggttcaagcaattcttctgcctcagcctcctgagtagctgggactacaggcatgcgccaccatgcctggctcatttttgtatttttcagtagtgacagggtttcaccatattggccaggctggtcttgaactcctgacctcaggtgatccacccacctcagcctcccaaagtgctgggattacaggtgtgagccactgcatccggcggatttttttttttttttttttgagacagggtctcactctctcgttcaggctggagtgcagtggcgtgatcttggctcactgcagcctccacctcccagtttcaagtgattctggttcggcctcccaagtagctgggactacaggtgtgtgccaccatgcctgtctaatttttgtattttcaccacgttggccaggctggtctcaaaactcctgacctcaagtgatccgcctgcctcagcctcccaaagtgctgggattacaagagtgagccaccatgtctggcctgaatgaagaaataattttttaaagagtgttttaaagtggggccgggtgcggtggctcacacctgtaatccccacacttttggaggccaaggtgggtgggtcacttgaggtcaggagtttgacaccagcctgaccaacatggtgaaaccccatctctactaaaaatacaaaattagctgggcatggtggcagatgcctgtaatccccgctacttgggaggctgaggcaggagaatcacttgaacccgggagggggaggtcacagtgagctaagatcgtgccattgcactccagcttgggtgacaagagcgaaacaatgtctcaaaaaaaaaaaaaaaaaaaagaaattgcatttcaaagccaggtgcagtggctcacacttatagtcacagctacttaggaggctgcggtgggagaatagcttgagcccagttgttcaaggctgagtgagctgtgattgtggcactgcactctagtctgggtgacagagtgagaccctgcctgtaaaaaaaaaaaaatctttcaggccagacgcggtgactcactcctataatcccagcactttggaacgccgaggcgggtggatcacctgaggtggggagttcgagaccagcctggccaacatggacaaaccctgtctctactaaaaatacaaaaatagccgggcatggtggcacatgcctgtaatcccagctactcgggaggctgaggcaggagaattgcttgaactcgggaggtggaggttgcagtgagctgagattgtaccactgcaatatgagactccatctcaaagaaaaaaaagaaaaaaaaaaaaagatagcatagcaatggctgtgggcctggatacaagtcttagcctctccacttctccacttcctggctctgtaagccttagacaagttccttaactccacacttccatttccatgtaacaaggggttataggccaggcattggtggctcatgcctgtaatcccagtgctttgggaggccaaggcgggaggatacttggggacaagagttcaagaccagcccaggcagcacagtaagacattggctctagaaaaataaaaataaaagaaatcatccaagaatggtgacttgcctactattctactcgagaggctgagaggggaggatttcttgagcccaggagtttgaggatgcagtgagctatgatcacatcactgtacttcagcctgagcaacagcaagatcctgtctcaaaaaattaaattaggctgggcttggtggctcatgcctgtaatcccagcactttggaaggccatggtgggcagattgcttgagcccaggagtttgagacgaggctgggcaacatgacgaaaccccggctctaccaaaaaatacaaaaaattaactgggcataatggtacatgtctgtggtcccagctactcggtaggctgaggtgggaggaatgcttgagcccaggaaataggggctacagtgaaccaggatcatgccagtgcactccaacctgggcaacagagcaagactctacctcaaaataattatttaaaaaaatggattaattgggcataggtggcttgtgcctgtagtcccagttactcaggaggctgaggtgggaggattgcctgagtctaggaggttgaggctgcagtgagccgggatggcaccattgcactccacctgggcaacagggtgagaccctgtctcaaaaaagaaaaaaaagggaggggttataatcactcctcctgacatgatacagagtatccatttgagttcataacataaatatgtacttggtgaatgctctgtaactattggcttttttattgttcccattttacatataaggaagctgaggctttgtgaggagaaatagcttagcccaggtcatccagtgggaagcgtctggtgcagaggaatagtgatcatggtgggactttgcctagcctaaggttcagcatacaatattcagtcagtactcaagggctgggctgtttctggtaatcaaagggctgccttgttctcctgccccacagcacaggaaattccaaggtggttttctttacaggctcctccgcttctgtggccagaggggacagcggaggagcccaggtacctaagccaactcaagagaagatggaattgaatatttcaaccaccttatctaggcctctgtgattgttgaggagggggctgtcactgggaaagttgtgagctgctttggaccttatctgggaatttccttgggcttacagcctttaccctatccttgaaatggttctggtttcatagcaacttctaggtggtgtgggcgaagtttgggactggtttagggcggggayaagaccaagaacacaagttyccttgtactacgggagagagggaggggaggaaattggagaccccagcacccccttgctcactctcttgctcacagtccacgatggcccggtccctggtgtgccttggtgtcatcatcttgctgtctgccttctccggacctggtgtcaggggtggtcctatgcccaagctggctgaccggaagctgtgtgcggaccaggagtgcagccgtaagaatggggaggggagaattgggggcttgggcgttagcctgtgtggagggtgctgcattcccttctattccttccctagaccctatctccatggctgtggcccttcaggactacatggccccygactgccgattcctgaccattcaccggggccaagtggtgtatgtcttctccaagctgaagggccgtgggcggctcttctggggaggcagcgtgagtcttgggagagtgaaagagggaagggtacagagctggrgtagactcattatccccatgaagggaagatttgaggggggtgaactgaaatagacattgtggggggatattgttacttactttattttatttgcttattattttttaattttttccgagacagagtcttgctctgtcacccaggctggagtgcaatggcacgatctcggctcactgtaacctccacctcttgggtttaagcgattctcctgcctcagcctcccaagtacctgggattacaggcatgcaccaccacacctggctaatttttgtatttttagtagagacagggttttaccatattggccaggctggtcttgaactcctgacctcatgatctgcccgccttggcctcccggagtgctgggattacaggtgtgagccactgccccccagcctattttcactttatttaccaattttaggacctgatatggtcccatgttctgttctagacaccaagatacaacaacaaatgatcctttttattctaatggagggaaatgaacaaaaagcaaggcataaaaaatagcagcagccgggcacagtagctcacacctgtaatcccaagtaaggccaagttgggaggatagcttgagcccaggagttcgagaccagcctgggcaacatagcaagacccccatctctataaaaaaaaatttaaaattaactgggcwtcatggcatgtgtctgtggtcccggctactcgggaggctgaggtgggaggattgcttgatcccagaagttgaggctgcagtgagccgtgatcatgctactgcacctcaacctgggcgacacaatgagaccctgtttccaaaataataataataataaaagcaaatatgcgctgctgtgagaattaacagagacttacttgggtgttcagaaagggcctctgaacaggtggcatttaagctgagattcatatgacaaggatggagcagttatgtggagatcagggagaagggagaatgcaaaggccttcagcaggcacaagcttgccatcttcccagaccctagcttttaactcctcttccccaggttcagggagattactatggagatctggctgctcgcctgggctatttccccagtagcattgtccgagaggaccagaycctgaaacctggcaaagtcgatgtgaagacagacgtgagtgtcatgggggctggcaagaaatgtggggggaggacccttaggttgtggggatgggcaaaaatgctcccacacttggctccctggcagcctaggtatgtgcgctgggagaaattctttccctgcctcaattttctcaccagtaaaatgggtccagttgggaggtgcaaagattagagggctctaggctaatttgcatagcacttgtgtggccagacctgggccctgcagctgcagcctttgctaaaaccactagatcctttgtggtgtgaccgctggttttctttccactgtttcccctttctctttttcagaaatgggatttctactgccagtgagctcagcctaccgctggccctgccgtttcccctccttggstttatgcaaatacaatcagcccagtgcaracggctcgtctccgtggtctttggggtggggtagggtagggtggggactgtacaaatgaaatgtttctctaggttgctgaatctaaccaattaacccgctgcctgtggtaacgtcagtggttgctaggcagagtttcactgatgaaagccctgtgcagtaggagcgctcctaagcttaggtttcggacacaagcaaaggaaaacctaagcagcccaactaggggattgtagtgtcctctctagaccagtgggagggagccaatcggactacgcggaggatataaatcgcacagtaaagrttttcttggaagattatctggaaagggaggtgggaagtaacctgcgcctatctgcccagttttcctccttttcgcctttgagaacagtaatcgctcccgccagctcaagatcagctcctcttccagcctctttctgtcaatcctgcccgtgcccccttctttgcatttgtatcccctcccccaagtccgctccgatccaatccggagactcgactctgccccccgtactccagactaaatccgttcctcggctcagctaagcagctctgcacgtcccttcccacttgctcagccaatcgctgggctcggcyccgcccctttgggcttggtccttctcacgccaccaatccgcgcctcttgtcccgccccctgcccgcgagtccgccaatcccgcccttcggaaagcgtcgcctggtatccagctgccggagcgggtcgcgccggaggggggcggaggcggaagtggcggtgccgggcccggggagtaggaaggagccggggctgtagccggagtggagcggctgccagccgaggagcaggcgcggccgcggcgccatattgcggccctcagcggccgcgaccgagtcatggctgagacctacggtgagggtggtggacgaagctggggtcctgggtctgggcccagggaggatgcggcctgtgggaatgggcggggctttgtagatcagggggcggggtctggtrtgatggaggcaggacctaagtggatgctgggwggggtttagtgggtctgaggctgagcttaatcgatttaggtggagcctgagggtctggtgcgtgggttaaatagatctggggcgggatttgagggagctggtcctgaggggttcagggaggccctgagggaagaggtgggccttaatggatctgggcggagcctgagtgaaggggcggggctgactgcatgaatggcaggagtcgggcttatgggctagagggaacactgaatggaagctcgggaccctggggctgatctggctggagagagctctggaatgggtttggggatgggctgtccttgagttaggggcaggacttagtggcaaagggtgggacttatgcatgagaatggagccgggttctgggcagagggagggaaggagaggtcgggaagtggaaaatcagtagggatgcaccataggaggtggtgattggaggcaggggaagtgcaggtttaggagtcagagggagccgcattcaytcaacaaatatagaagagaagggagaagagtgcaaagaccctgaggtgagaaccagcttgtcattttcagggaatagactgaaggtcaggagctatagtggagtgaatgagtcagagggtggtaggaggtgaagaggaacaagggctatatcgtagtccttgtttaaatagctttcaagagactttagcgacaaaatagctaagatcygggactctggagcccttggcctaggtttgaatctcacttctgcccagctgtgtcactttgggcaagtcagttaacctttctggcctgttacctcatccggaaaatgggaataatttttagtctacctccctcatagagttttcctgaggatgatgtgagctgttgatgtgagtaaagacctttagaactgttcctggcccacaacaacacacaattgacccatgtaacaaacctgcacatgtgggctgggcgcrgtggctcatgcctgtaatcccagcactttgggaggctgaggcaggcggatcacctgaggtcgggagtttgagaccagcctgaccaacatggagaaaccccgtctctactaaaaatacagaattagctgagtgtggtggygcatgcctgtaatcccagctactcgggaggctgaggcaggagaattgcttgaacctgggaggtggaggttgcggtgagccgagatcgcgccattgcactccagcctgggcaacgaaaagtgaaactctgtctcaaaaaaacaaaaacaacgacaaaaaaacccctgcacatgtactccctgaatctaaaataaaagttgaaaaaaaatatatagaatgtgcctggcacatggcaagtactacataagagttatctgttactgttacctattggtttgtttctgcctatgtctgtttctctccctctaactgtgatggttagagagagagattggattggaatccatcttttttccctgtatctttctctccctgtgggtatccctgattttggctccatctggtcagacttcctcttcaaattcctggtgattggcagtgcaggaactggcaaatcatgtctccttcatcagttcattgagaataagtgtgagtttcccgcagtggtcctgggaaccctgagctgtgtttatgcgcatggtgtgggctggtgggcagcyrgtggggagggcagggctggccataggtacaagtccagtgctggctttttggtccttgctttgtcgtatgtcctttactaggttctcsttgacctcaagtcactccagcaaggagaatgggtttgtagagactgagagggccttggaggrtgggggatcctctgagctgtctcctctctccctgtactgccccttctgttcctcctactcccagtcaaacaggactccaaccacacaatcggcgtggagtttggatcccgggtggtcaacgtgggtgggaagactgtgaagctacagatttgggacacggctggccaggagcggtttcggtaggtgggctgggctcccaagggtgatggggagagagagtgagaaggaaagagagagatgtgtgtgtagagtcacttggagacactgagagggcagacaaggcagacagagagagatgagacaccgtagttagcaggtatatatatccaaggagagagggagtactggagagataaagagatggtggaagaaaaagaggtaggggccaggcgcaatggctcatgccggtaatccccgtgctttgggaggccatggtgggaagattgcctgagcccaggagtttgagaccagcctgggcaacatagtgagaccccatctcaaagaaagaaaaagagatagagaaaagtggcttgggggtggggaaagggatggagactgagagacaccgaaacagaaagagaaggggaaacttgagagactcacactcagaaaggaaaagagcaagagagacagagactaagagagttgaagagaatgataagggaggtaaggaggcctggcacggtggcttacacctataatcccagcactgtgggaggctgaggcaggtggatcacttgaagtcaggagttcaagaccagcctgccaatatggtgaaaccgtgtctctactaaaaaaaaaaaaaaaaaaaaaaaatcaaaaaatgtagccaggctgtggtggtggatgctagctacttgggaggctgaggcaggagaattgcttgaacctgggaggcagaagttgtagtgagtcaagatcgcaccactgcaccccagccggggtgacagagcgagactctgtctctgaataaataaataaataaataaatgaataaataaataaataaataaataaataaataagggaggtgaggagacacagagaaacagaggtcagaggcagagagggagacagggtgagtcagacaggtgtagttggacgttgaatgaatgaatgcacgaatttacgggaaggcaagggtgagcatgagagccacagagatggaacagaaagagagacagtgagaaatagggaactgaagacacacacgccaaggcaggagaaccgcttgagtccaggagtttgagaccagcctgggcaacatygtgaaatcccatctttccaaaagagagatggagaaatggacgtgttgtgggagagagagagagagaaatgcgtagggctcaacacactgtaggtcttcaggaaatgcctgcagagcagaaaagttgatagacacatagaaaccttaggagaggccgggcgtggtggctcatgcctgtaatyccagcattttgggaggccgaggcgggcggatcacgaggtcaggagatcgagaccatcctggctaacatggtgaaaccccgtctctactaaaaatacaaaaaattagctgggtgtggtggcagacgctggaagtcccagctacttgggaggctgaggcaggagaatggcatgaacccagaaggcggagcttgcagtgagcccagatcgcgccactgcactccagcctgggcgacagagctaggctccgtttcaaaaaaaaaaaaaaaaaaaccttaggagagtcggagaaacagagagcagggagagaaatagagggaattcagtccacggaaaagtgtgatctatggcagcatctagtagctgctgagttaattcttgcgtatggattaactgcctgaggtgcacagagcccaaaggcagagagaggggctgaaggatagacaggtgtgtagcatgggctaggtttacggtgagtgcttagtaaatgctgtggaatgattgcatgagttccagaaggacccagactggtgagacagagaatgcagaattggctacactgggaaggagactccacctgacacagcaggagaaggataagcagatgttgtatagtgcttgggcagggccaggcaaaggggagatttgctcagaaaatgttgaatgaatgaatgcacaaatgcatgggaaggcaaaggtaagcatgagagagccacagagatgaaacaaacaaacaaaaaagacagaaatagggaattaaatagggccaggcacggtggctcacgcctgtaatcccagcactttgggaggcctaggcgggcagatcacttgaggtcaggagttcaataccacactggccaacatggcgaaaccccatctctactaaaaatacaaaaattagccgggcgtggtggtgcatgcctgtaatcccagctacttgggaggctgaggcaggagaatcacttgcatccggggggcaaaggttgcagtgagccaagatcacgccactgcacttcagcctgggcgacagagcaaaactccatctcaatcagtctcaatcaatcaatcaatcaatcaataaaagacatgtagggccgggcacagtggctcacgcctgtaatcccaacactttgggaggccaaggtgggcggatcacttgagctcaggggttcgagatcagactggccaacatggccaaccccatctctactaaaaatacaaaaattagcctgatgtggtggcgtgcatctgtaatcctggctactcgagaggctgaggtgggagaatcacttgaacccgggaggtggaggttgcagtggttgcagtgagccgagatcatgccactgcaccccagcctgggagacaagagtgagattcctactcaaaaaaaaaaaaaaaaaaaaaaawaraaaaaggaaaaagacacataggttaaggcaggagaatcacttgagcccaggagttggagaccagcctcggcaacctagcaaagccccatctttacaaaaaatattaagaaattagccaggtgtggtggtgcacacttgtagtcccagacactacataggctgaggtgggaggatctctccgttgggatactgagcctaggaggtcgaggatgcagtgagccaagatcgtaccactgcactccagcctgggctacagagcaagaccatcaaaaaaataaaaaataagacacacatgaaagagacacagagagaaaaacasacgaatggaaagatagggacacagggagagacaaaaatggagattcataaatagagacagctggccagctaagtgagatagaagctgagagaggcgaagagagagggacttcaaggatgcaagaagagagaggaattgcatggtgacccgaccaaggccaggttttgggggatgggccagcagtgaagkggggggcctccgaaccaccagtctgtctctgtagaggggggcattctcggggcagaccccagccttgggggtgactgggtccccctggccccacaggtcagtgacgcggagttattaccgaggggcggctggagccctgctggtgtacgacatcaccaggtgggtgcccrgggtgggtggggtagggcatgggtggttcctctcctgcactgcctccctcccttctcccttctccacagccgggagacatacaactcactggctgcctggctgacggatgcccgcaccctggccagccccaacatcgtggtcatcctctgtggcaacaagaaggacctggaccctgagcgggaggtcactttcctggaggcctcccgctttgcccaggagaatggtgagggctgtgtcgtggaccaggtggtggtgggggtggacagtccacagggaccatgggtttactggctctcagtggctgtacccagcaggggaacgtggaggttcagaagtctgggttcaaatttgagtgttggctgggtgtagtggctcacacctgtaatcccagcagtttgggaggccaaggtgggaggactgcttgagcccaggagtttgagaccagcctggacaacacagtgagatcctatctctataaaaaatttaaaaaattagctgggtgtggtggctcatggctgtagtcccagctacagtggaggctgaggcaggaggatcacctgagcctgagagtttaagactgcagtgagctgtgatcacgccattgtactccagtctgggagacagagcaagacactgtctccaaaaaaacaacaacaacaacaaaacaacaacaaaactaagtgttgccatcagtgagctatgtgattacactggttctcagtttcttcatctggaaagtgggatcacagtgtttctgccccacagtgtgctgtgatgattaagggagattgtggaaagtccttagcacccgccacagagtgggtgctagattaatgttggccgctaaggtttcgcctaccgtcaggaggccgcacagggtattggttttttaaattaattattttatttattttttcctcctaccgcaccttcctgggtattggtttaatgtagagattgcaaccctagatggccctaggtgaaaggcacttttttttttttttttctgagacggagtcttgttctgttgcccaggctggagtatagtggcgcaatctcggctcactgcaacttctgcctcagcctcccgagtagctgggactacaggtgtgcgccacaacgcctggctaatttttatatttttagtagagacggggtttcaccatattggccaggctgatctcgaactcctgaccttgtgatccgactgcctcggcctcccaaagtactgggattacaggcgtgagacactgcgcccggtgaaaggcacatttttgaatacaggagatgggatggggtagatccttgagtaacaggtactggtgttaaggggagtgcagcatactgacaacccacaccaaaargtttgcaagggccaaccacaatggctcacacctgtaatcccagcattttgggaggccaaggtaggagcatcacttgagatcaggagttttagaccagcctgtgtaacagagtgagaccctgcctctacaaaaaaaaaaaaaaaaaaaaagcctgggtgtggtggtatgtgcctgtggtctggggtactcaggaggttgaggcaggaggatcacttgtgcccagaagttcgaggctgcagtgatctgcaatcacaccactgcactccagcctgggggacagagagagactttgtctcaaagaaaaaaacaaaaaaggtttgcaagtataaactcatttgaaaacattgtgttggccaaaccacccacatctggtggcttgagatctgcctgtgttcccctgttttgcaacctccaggtttaaaggaggttttgccatcagagaggtgtgggtgtgaattcagctctgattttctgactgtggggccttgtcatgctgctgatgggtagactctggttggcctgttcctgtcctaratggtgctagagacacagtgttggagacagccctaggcccaaccttcatggagctcacagttcagtgggtgagggtggaaggacagacccacttccagacagtgacacctcaggaaggtcagggcttgatggtgaagcaccgggagacaggggtcagagccagcaggggagagccccagagggtcagggccagtactgggggggcaggcagagggatcggggtgggatggagaacacaggcagaggggtcagggctgggatagggcaggcagaggcagaggggtcagttgggatgaggggacacaggcagaggagttacatgggatggggggcaagggcagaggggttggggtgggatggggggcccaggtagaggggtcaaggccaagtttgggaggcacaggcagagcggttgcatgggatgggggagcatgggcagagggctcaggggtggaatggggcaggcctaggcagaagggtcaggggtggaatggggcaggtccaggcagaagggtcaggaaaggaatggggcaggcccaggcagaagggtcaggggtgggatggggacccaggcagagggttggggccaggatgaggaagcacaagcagwggggtcagggccaggatagggggccacaagaagctgtgggagccctaagtcggtacctgactcagcccaggaagtcagggaggacttcttggaggaggagctgtgtgagctgagctctgaaggaagagctgggtgggcatrtcgggaagcggacattagtggcagggaaatggcatgcgcagaggcctgaggtgagggtaaggggggatggaacattggargaacaggatgagagtcagcaggtgagagctcagtggagggtggggactaactggggccctgacctcagagtgtgtgcccctgcagagctgatgttcctggagaccagcgctctcacwggcgagaacgtggaggaggcgttcctcaagtgtgcccgcactatcctcaacaagattgactcaggtgaggccccraccggcccgagtgggagcgaagggcaggcccgggggtctccaggcaaccaatgctgacctctccccttccccacaggcgagctagacccggagaggatgggctctggcattcagtacggggatgcgtccctccgccagcttcggcagcctcggagtgcccaggccgtggcccctcagccgtgtggctgctgagctctgtggagccaggtgggacactgggggctttagggaggcagggcggcctcttgggcatgggggagatggtgtggagatagacactgaacatgtgatgacaagagaaacagagtgagagaaagatgcaaaaacacacaagctaaaggaggcatctggctgggcgcagtggctcacgcctgtaatcttagcactttgggagtccgaggcgggcggaggcagttcattgggtgggggtggggagacagacccacttccagacagtgacagctcagaaaggtcagggccaggcctggctcggtggcttatgcctgtaatccctgtactttggaaggccgaggcgggcggatgacctgaggtcaggagttcgagaccagcctggccaacatggtgaagccccctctctactaaacatacaaaaattagctgggcgtggtggcaggtgcctgtaatcccagctactcgggaagttgaggcaggagaatcacttgaacctgggaggtggaggttgcagtgagctgagatcacaccattgcactccagcctgggtgacaagagcaagactttgtctcaaaaaaaaaaaagaaagaaaggtcaggaccagatggggaggcactgggggagaggggtcagagccagcaggggagaggcccaggggggtcagggccagggtcrgggcacaggcagagggatcagggtgggatagggcaggcagaggcagaggggtcaggtgggatgaggggacacaggcagaggggttgcatttgatggggggtatacataaggtcaggagttctagaccagcctggccaacgtggtgaaacccctcctctactaaaaatacaaaaattagccaggcatggtggtacatgcctatagtcccagctacttgggagactgaggcaggagaatcacttgaacccaggaagctgagggtgcagtgagccaagattcagccactgcattccagcctgggcgacagagcaagactctgtctcaaaaaaaaaaaaaaaaaaaaaaaaaagagacatctgccaggccacagggaatccacctgcagccccaggccagcttcctgccctagaccttgaccctcccattcatagttctccagcgatttattgagcgcctgctgtgtgccaggccctgctcaaggcactggggatatggcagggagtacaacagactcccatcctcatggtgctgacattctctttgggggagacaggtgataaacaagagatgtaagtcgactgggcgcagtggctcacacctgtaatcccagcactttggcagggtgagatgggaagatcactttgagaccaggctgggcaacaaagcaaccttatctccacaaaaagttttttaaaattagcgaggcgtggtggtgtgcacctggagtcccagctacttgggaggctgaggtgggaggatggcttgagtccaggtgttcgaggctgcagtgagctgtgaccatgcgccactgcattccagcctgggtgacagagcgagactcttaaaaaaaaaaaaaaaaaaaaaagtaaagtatgtagtagtgagggaggtaagaactatggggaaaaataaaacaggcacagatgagtggatagggtggaggagtgtacttttttttttttctttgagatggggtattgctctgttacccaggatggagtgctgtggcgtgatctcggctcactgaaacctccgcctcctgggttcaagtgattctcctgcctcagcctcccgagtagctgagattacaggcgactaccaccatgcctggctaattttttttaatttttatagagacagggtttctttttttttttttttttttttttgagatggagtcttgctctgttgcccaggctagagtgcagtggcacgatcttggttcactgcaacttctgcctcctgagttcaagttgcctcagcctcctgagtagctggaactacaggcgcccgccaccacgcctggctaatttttatgtatttagtagagatggggttttaccatattggccaggctggtctcgatctcttgaccttgtgatctgcccgcctcggcctctcaaagtgccgggattacagtgtgagccaccgcacctggccgacacagggtttcatcatgttggccaggctggtatcaaactcctgacctcaagtgatccacccactcttggcctactaaaatgttgagattacaggcgtgagccactgcgcccggccaagaatgtacttttttttttttctgagatggagtttcactcttgttgcccaggctggagtgcaatggcgcgatctcagctcaccgcaacctctgcctcctaggttcaagcaattctcctgcctcagtctcctgagtagctgggattacaggcatgtgccaccacacccagctaattttgtatttttagtagagacggggtttctccgtgttggtcaggctggtctggaactcccgacctcaggtgatctgcccgcctcagcctcccaaagtgctgggattacaggcgggagccaccacgcccagcctttttttttttttttttttttgagacagagtctcactctgtcgccatgctagagtgcagtggcacgatctcggctcactgcaacctctgcctcctgggttcaagcaattctcctgcctcagtctcccgagtagctgggactataggtgcgtgccaccatgcccagctaatttttgtatttttagtagagacatttcaccatgttggccaggttggtctcgatctcttgacctcgtgatccgcccacctcagcctcccaaagtgctgggattacaggcgtcagccaccgcacctggccaagagtgtacatttaaacaagatgaggagggaagcctcgctgagaagatgacatttgagtgaaggaagggagatagggaggcctgtggggatctggggcaagagcactgctggagagcacagcaacgcttctagcgaggggtatgcctggtgtcggtgagggtgaccaaagcagccagtgtggtcatcatggaggacctgtgtgtgttttgtgggtacagcatgagatggggtcaggggttggaggaagcagatcagttagggcctgtgggccctggggaggsctctggcttataccctgtgtgggagccatgggaggcttctgaacagaggaaggacaggatcagattcaggggtgcagagagttcctctggctgcataaagggaaggggctgtgagggacagaggaggtcascaggacaccagagaggaagctgctgcaaagtccagggaagatggtggaggacaggacaagggggcgggaagaggagtggctgagaagggaatagggttcatgtcctccctagactctctgtcttccagtcttggcctctctcttttttttttttttggttcctgtctttttattttgagacagagtctcgctctgtcacccaggctggagtgcagtggcgcgatcttggcttactgcaagctccgcctcctgggttcatgccattctcctgcctcagcctcctgagtagctgggactacaggcacccgtcaccatgcccggctaattttttgtattttttttagtagagatggggtttcacggtgttagccaggatggtctcgatctcctgacctcgtgatcctcctgcctcggcctcccaaagtgctgggattacaggcatgagcctttcctttttttttttttttttttttaattttagagagaatctcactctgctcactctgtcacccaggctagagtgcagtggcgccatcttggctcactgcgacctccgcctcccgggttcaagtgagtctcctgcctcagcctcccaagtagctgggattacaggcatgtactgccacaaccagctaatttttgtattttttttttttttttggagatggagtctcgctttgttgcccaggctggagtgcagtggtgcagtctcggctcactgcaacctccgcctcctgggttcaggtgattcttctgcctcagcctcccgagtagctgggactacaggtgcgtgccaccacgtctggctaattttctgtatttttagtagagatggggtttcaccatgttagccaggatggtctcgatctcctgacctcgtgatccacctgcctcggcctcccaaagtgctgggatgacaggcgtgagacattgcgcccggccaatttttgtatttttaatacagacagggttttgccatgctcgtgaggctggtcttgaactcctgacttcaggtgattcacccgccttggcctcccaaagtgctgggattacaggcctgagccactgtgccctgccaatcctgtctccttttgatgcagccactgggtctttctaacacacatatctgctcctgtygctccctttttcaaaaccatccatgcatctcagggccccaggacacarmtgaactcctcagcctggtgtttgaccctctgcagggactggcccctgccagcccagccttaccggcctcagccacttgtcggtctccctacctctcaggccactccagccacactgaagttcttcccattcctctgggcccttgctcatgctgggcctctgcttggaacattcctaccctcttttccctggcaacctccttcctccaggcagcactacttgttcctccaggcttggtccaaacttttgtttttttttgagatagagtctctgtcactcaggctggagtgcagtggcgtgatttcggctcaccgcaacctccgcttccaggttcaagcaattctggtgccccagcctcctgagtagctgggactatgggcatgggccaccaacgcctggcaaagtttttatatttttagtagagacagggtttcaccacgttggccagctgctcacaaactcctggcctcaagtgatccacccacctcagcatccaaagtgctggaattataggcatgagccactgcacccggccccaaacttcttgacaggctttcaaaaccctgcaggatttggtcccatccctccttctctgggggatgtgtatgtcttgccagttctcccttctatacttcatgctaaatcccctcccagsccttggcagctccagggtgggacaggtggggaacaagtggttagaccttggatctacttggaaggcagagccaacgtgatttcctgatggaatggatgtgtaatctgaaagagagagaggaatcaaggatgatgtcttcagacagtgctctcttgtctttccaggactttgcacctgctgtgcctgagcctaagtttgctcatctgtaaaatgaggctaataatagcacctgcttctatagatgttgagaagaagaaatacattaattcacgaaagtgctcagaatggggcctgatggtcaagacttgatcgatgagggctgtttttaaagttttcttcttatccatctttgggctgagctcaaatgaatgggtgtgtcttcttcacctcagggcttagcagagactctgtcctagagagtttgccctcagtaggtgaaatgtaacaaggcaaggcaaggcyttttcacactttgctgactgcaatctacaggaggaaatatattttatgtgttaatcaaggactgactgtagcagatcccacccacatataaaactcaaacacacattttcctaccaccagtattctttcgtttcttggcactaaaatgaaagtcacataacatacatttacgtgacttttcaaagtgtacaattcagtggcattcagtacattcacagggttgtgcaatcaccacttctgtgttgttccagaatgttttctttttttttcttttcttttttttggagacagagtctcgctctgttacccaggctggagtgcagtggtgcgatcttggctcattgcaagctccacttccagggttcaagcaattctcctgcctcaacctctggagtagctggaattacaggcatgcaccaccacacccggctaattttcgtatttttagtggaaacggcatttgaccgtggccaggctggcttgaactcctgacctcaggtgatccacccgcctcggtctcccaaagtgctgggattacaggtgtgagccactgcgcccggcctcagaacgttttcattactctcagaggtgccatrcttatactgctttgtaccttatacctttgtacccatatttattaagcagtcactctccatttcccccaacccctagcaaccaccaatttgttttctgtctcttttggccaatatgatattcttttccttttccttttttttttgagaagggtctcactttgtcacccaggctggagtgcagtggcaccatctcagctcactgcagccttgacctcctgggctcaagtgtttctcccacctcagccccccaagtaactgggactactggtgtgcaccaccacgcccagctaatttttatatttgtattttttgaagagatggggtttcaccatgttgctcaggctggtctcgaactcctgagctcaagtgatccacccacctcagcctcccaaagtgctggaattacaggtgggagccaccatgcctggcctcttttccttttttcttttcttttcttttttgtttttttttttttttttttttttagatatggtctcactgtgttagcggggttggtcttaagctcctggccttgccgggcgcagtggctcacgcctgtaatcccaccactttgggaggctgaggcgggcagatcacgaggtcaggagttcgagaccagggtgaccaacatggtaaaaccccacctctactaaaaatacaaaagttagccaggcgtggtggtgtgctcctgtaatcccagctactcagggggctgaggcagaggaatagcttgatccctggaatcagaggttttagtgagccgagatcgcaccactgcactccagcctgggcgacagagctagactccgtctcacaaaaacaaaaacaaacaaaccaaaaaaaccaaamcaaaacaaaaaaactcctggcctcaagcaatcctccacctcagcctcccaaagtgctaagattacaggcatgagccaccgagcccagccaaccaatataatatatctttttaaattattattattattttttgagatggagtttcgcttatgttgcccaagctggagtgcaatggtgtggtctcggctcactgaaatctccgcctctcaagttcaagcgattctcttgcctcagcctccctagtagctgggattacaggcgcccgccaccacgcccagctaatttctttgtatttttagtagagacagggtttcaacatgttggccaggctggtctcaaactcctgacctcaggtgatccgtctgtcagcctcccaaagtgttgggattataggcatgagccactgcgcccggcctatttacaaaatttttttttttaaataatgttttaattttgtagagatggtgtctatgttgcccaggctggtcttgaactcctgggcccaagtgatcctctcttgcccttgcctcccaaagtgctaggattataggtgtgagccactgtgcctgcccaaccaatagaatattcttattatatatgatgcactctggtatttgccgttctgtgctattctgtttgaatttaaaaattggtcaagacccaccaaactgatttccccaccaaggcagtgacayacattagaatgacctggagaattttaaaagatactgatgcccaggcctcaccctagagattctgaagtggtttcaggactttttcttaattaaaagataaatagagatgaggtctcactatgttgcccaggctggtctcaaactcctggcctcaaacgatttctcccaccttggcctcccaaagtgctgggattaaagacgtgtgccaggctgggcatggtggctcacgcctgtgatcccagcactttggggggctgaggcaggcggatcacaaggtcaggagatgaagaccatcctggcttgatctgtagatcaagtgaaaccccgtctctactaaaaatacaaaaaaaaaaaaaaaaaaaaaattagccaggcgtggtggcaagtgcctgtagttccagctactcaggaggctgaggcaggagaatggcgtgaacgcaggaggcggagcttgcagtgagcctagatcgcgccactgcacttcagcccaggcaatagagcgaggctccatctccaaaaaaaaaaaaaaaaaaaaaagatgtgagccagccagttgcaggatttctggaagctcccaggtaatgctatatacaaccaaagtgagaaccactaacctaacgttgtctccccagcttggggaacagtgaaatgagacttagagccagggtgatccaggaacatagagggacacagaaagatacaaaggcaggttcattttatttatttatttatttatttatttatttatttatttaaattttttgagatggagtgtccctctgttgcccgggctggagtgcagtggtgtgatcttggctcactgcaacctccgcctcctgggttcaagtgattctcctgcctcagcctcccaagtagctgggactacaggcacctaccaccacgcctggctaatttttgtatttttagtagagacggggtttcaccattggccagggcggtctgaactcctgaccttgtgatctgcctgtctcggcctcccaaagtgctgggattacaggcgtgagccaccgtgcctggccgatttatttatttatttatttatttattttgagatggagtttcgctcttgttgcccaggttggagtgcaatagtgcaatgtcagctcaccgtaacttctgcctcctgggtttacaagattctcctgcctcagcctactgagtagctgggattacaggcatgtgccaccacacctggctaattttgtatttttagtggagatgaggtttctccatgttggtcaggctggtctggaactcccgacttcaggtgatctgcccgcctcggcctcccaaagtgctgggattacaggcatgagccaccgcgcccggcctatttatttttttgagacagtctcactctgttgcctaggctggagtgcagtggcacaatcttggctcactgcaatctccacctctcaggctcaagcgatgttcccacctcagccccccaggtagctgggactactggtgcatgccactacacctggctaatgtttgtatgtttttgtagagacggggtttcgtggtgttgcctaagctggtctcaaactcctgggctcaagcattcctcctgccttggcttcccacagtgctgggattacaggcgtgagccactgcgtccatccagattcatgatatttagatgttgaaatgtggctttacagactcagacagctctctgaggcaaacaaagagggagatgcaggtaccctcagcacaagccccaaattacctgcaggggagaggcggaaaatcagacaatgtagaaaccgggagaagaaaggtatggacagaycgatgcagataggaggggaaggaaatacctggaaatgagatagagaccggctggacagaccccggggaccctgcaggtcaccacacccttctctttcagctcacctgttctccaggaccagccctrctggggcccaggcccaggctytgagaggccgtgtcctaacctgccctggccccggagaagctacgttgccacctgtcccccttccctggcctggtggggcctggctttggggcaagactgagccacgggggaagggggaatcccgtacctgctgctgcttcctctgtcttggctaacgtctgtccccctgaacccctaaccataycccaagagctcccaaagcctgagaccagggtcatttgtccccaactccccatctggccctgctgttgctagtacctgttatttattacctggaggcctgtccagcacccaccctacccccataaagcattgtttacacctgtgtcttggcctccattattgtgagatggcagggagatggaagaggtccctgatggaagaatcatgtgtcatggtgtttgggggccttgtttctgttttttttttgttgttgttgagatggagtttccttcttgttgcccaggctggagtgcagtggcgtgatcttggctcaccacaacctccacctcccgggttcaagctattctcctgcctcagcctcccgagtagctgggattacaggcatgtgccaccacacttggctaattttgtatttttagtagagatggagtttctccatgttggtcaaggttggtctcgaactcccaacctcaggtgattcgcccgcgctggcctcccaaagtgctggaattacaggtgtgagccactgggcctggccttgggggccttgtttcctgattggacgtggtgtggggtataccaagcatgatgactcaggtgcctgttgcggagggagggaatttgttactgtgtggacagtttgtgacaatctgtgttctaagctcacgtgtgtaaacacgctgatgtccctgtgtttgtgacatgtgtacatgtttccagtacctgcatatgggatgatgtctataggatataatgtgtgctggttgtgtgtgatgctgacagccgtaactgctctgtggccttggtcattgtattggtgaggctggtattgtttgggacatcaaggccaggggatgggaatttggacctataggtgggcctccggtgtgtgcatgtctgatgcctgagagtcagaggcagtgactcactactgcgtgtgtgcctgtgcatgtgtaccccgaggtctgtgtgtgttttggtgtgaatttggctccttttaaacacccatgtgtggccaggcgtggtggctcatgcctgtaatcccagcacttcgggaggccaaggcagatggatcacttgagcccaggagttggagactatagcctgggcaacacagagagaccctatctacaaaaataaaaaacagaaaaagttagccaggtgtcgtggtacacacctgaagtcccagctattccggaggctgaggtgtgaggatcactttagttgggaggttgggcctgcagtgaactatgatcatgccacagcacttcagcctgggcaaaagggtaagaccccatctcaaaaacaaaactaaactagaaacacccttgtgtggccatgaaccctgtgtgtgccctgaggactgcgggcttttgtgcaatcctcacgcatgtgtggataccagtatgcatgcccttgtgctcacgcgaaccgccctacgccctcaggtggcctgcaggggactggtgcagccccgaggacactcccagttgctcgtcgccctcccatctccacgtcggccttcaccgacccggcgggagccttgagtcccagctctccagagcaatggtggagcgggcagggcattcaaaatgaccttatctccttagtctcctaaagtgttcccagctggccatgcaaatgtcttctctgtgtagcgttccgtggatttttttttgtttcattttttaattttgtgtaaagataaggtctcactccgttgcccagactttccctggttctttattctgattcccacaatcgtcccgagggggcaggccggagcgggtcttgaaaatacacatttgcacatcccttctagtccgcgttcccttttctcaagggcaacccgcacttttttgcctccgttataaaagatacttatgtaaattactgacgtgcgaatttacatacatttctcaactaactgcgtagccatttctccgtctctcacctccgttcctggacggcgagaaggaggaggagctgaccatgtaaatgaagtcacgcgcaccgcgctgccgaactcggtgccccgcgctgggcggggggcgggtaggcctgtccatgtaaatcacatcatttgcgtgccccgccccgccgacgccacttgattccaacatgcaagaaacgccccctcccagacccggcccctcacactgcgttccccctcccgcgcaaagggggcggggcggaggatgcaaatgaacctcgtgtaggccacggaccgctgtttcctttctccttggtaggggggttgtcccgaacttcctcgccccgctccgccccgccccgcgcggctcgggcctgcgcaggcgccgtcccctccgcggggcgcggtcacgtgcccaccgggcgaggcggggcggggcgtcgcgcgcggtgggggcggggtatggcgcgctgtgcggcgcagggcggctggcacaaacggcggcgccggggccggaggaaaaagctcggtgaggaggtcgcggggcgagaagggagcgggaggagactaagccggagccggggcgccggcgcgaaccgggcggggtgtgggggcgcgcgccggggcctgccggggcgaccccgggaagggggatgtgggtgcggcgcgggggaggggacgcgcgccggttacgttgggtgccggccgttgtgggggttggggtgggggcggggagcgcgcgccgggcggaggccgagtggagggggaggggagggggtccgagcggcccttaggccctgcccctgtcgcctactgcgctcagaaggggcctcagggcctgccccgggttgggggcgttggggtgccctggatgggggcacctttatctctcgtcctgtctccgggtgcgtgcaccctcctccgtcctttcctctgtcgccgcggaccctctccccgagggcccctcccgtcggtcagtctcgggacctcccttccgtctgggcgtgtgtccgcccccggccggcttcctcccgtcgggctcgggtcgaccccaccgtcccgctccgccccgggtcctccctcccagcttccctccggtctatttttctgtctctgggcccctcgttctctttgtttttggactccccagtttcctctgtcttttgacccccccgcccccaccctgactctccctggaacccccacgtttctcgttgtctttctggaacgccgaggcaggtccctcctattttccaaaccccctcctttcccactcctccacaccacccttttctactccagccctccttcttctgtctttggttaccgcgtcccacaacctgcaccacagtcctctgtcttagggtcatctacccagcccctggcctccagcctctccctatcactgcctcttatctgtcagcggactcccgcacctccagattctcagggtcctctccccgacttggcctcaggttttggggggcctctatagtcaagtctgtcctggtcgtcttccccactcctgcccataccatcccggctttcccctgcctgcctgtctctagtttctctcacatccctttttttttttcctttctctagccaccctgaagggtcccttcccaagcccttagggaccgcagaggacttggggaccagcaagcaacccccagggcacgagaagagctcttgctgtctgccctgcctcaccctgccccacgccaggcccggtggcccccagctgcatcaagtggaggcggaggaggaggcggaggagggtggcaccatgggcccgggcggtgccctccatgcccgggggatgaagacactgctgccatggacagcccgtgccagccgcagcccctaagtcaggctctccctcagttaccagggtcttcgtcagagcccttggagcctgagcctggccgggccaggatgggagtggagagttacctgccctgtcccctgctcccctcctaccactgtccaggagtgcctagtgaggcctcggcagggagtgggacccccagagccacagccacctctaccactgccagccctcttcgggacggttttggcgggcaggatggtggtgagctgcggccgctgcagagtgaaggcgctgcagcgctggtcaccaaggggtgccagcgattggcagcccagggcgcacggcctgaggcccccaaacggaaatgggccgaggatggtggggatgccccttcacccagcaaacggccctgggccaggcaagagaaccaggaggcagagcgggagggtggcatgagctgcagctgcagcagtggcagtggtgaggccagtgctgggctgatggaggaggcgctgccctctgcgcccgagcgcctggccctggactatatcgtgccctgcatgcggtactacggcatctgcgtcaaggacagcttcctgggggcagcactgggcggtcgcgtgctggccgaggtggaggccctcaaacggggtgggcgcctgcgagacgggcagctagtgagccagagggcgatcccgccgcgcagcatccgtggggaccagattgcctgggtggaaggccatgaaccaggctgtcgaagcattggtgccctcatggcccatgtggacgccgtcatccgccactgcgcagggcggctgggcagctatgtcatcaacgggcgcaccaaggtaaggctaggtgggggcctctttggaggggctttgcagcaccctggtttgcagcattcagtgctctgagcacagtgggtttggagacaggcttctgggaggtcacagaaggtttaggcagttcagtggagtgggtatgcttacttgtggggacttgggggggtctttatcctccctacgggccttaatgtgtgcacctgataagctaggagtttgtcctggagccacagtggttcttttttttttttttttttttttcttttctttttttattgatcattcttgggtgtttctcgcagagggggatttggcagggtcacaggacaatagtggagggaaggtcagcagataaacaagtgaacagaggtctctggttttcctaggcagaggaccctgcggccttctgcgtgtttgtgtccctgggtacttgagattagggagtggtgatgactcttaacgagcatgctgccttcaagcatcgccacagtggttcttgactttgccaggaaccctcttaaactcatgagagctgctgacattcacagcgtggaccttggtggggttcatggcctcctggtgtcagtctgtggccccagaccaagcacggggatgtagataggcacacagttcacctggccgttctctgttgctgtctgtccctgtccacatccttccctgtgctcctgtcgtccatccctgtttgctggcccatgtttctagtccatccatcctgtctccaaggcaggagaagcagaagggggagggtggctgtgatgagtgagccctgggctgagggaaggaaaggggtgctgcccgctgggccgagtgcttggccctggactgcattgtgccctgggtccccactgtggcatctgcatcgaggacagtctcctgggggtggtactgggtggctgcctgttggcccaggtggagctcatccccatgtctcccacccttcactgtcccagtccctgccctccattccccctgtcctgtgtgtcacttcctccctacccatgtctgtctcttcctctgcctttatgtgtttgttcttagtccctttttctttttgctttagaacaatagttcttaatggtattttggagcctgggtctttttgagaatctgtcagaggccacagatcctctcttaagacaaatgctcatttgcttggagtttccgggcagttgtcaaggcctcatggcctccagctgcctgttcaggaacctggggtcaggagcccagcacaggacagtggtccatagggcctttccgggctgctgacaggatcattgtcttcatgggtggtgtgggggcctggccttgagtccaaggcttggtgtcctttggacaaggccctgtggggagtgcccactgctcaacacagtgatgcctggctggctgatggcacgggcagtgttgtgccctgcaggcgtgaggctgagctcctgatgtcctctgcctcctcctgcagatcccatcttgggttctgcttctgtgtggctttcctctcaggctggagctggct

SEQ ID NO: 5740 - DNA, 24446 bp, Homo sapiens
tgacctcaggtgatctgcccgcctcggcctcccaaagtgctgggattacaggcgtgagccaccacgcctggctgatctttctttctttcttttttttttttttttaatttttgagatggcatctcactctattgcacaggctggagtggagtgatctcatctcactgcaacctctgcctcccgagttcaagcgattcttgtgcctcagcctcctgagtagctgggattacaggcgtgcaccatcatgcccagctaatttttgtattttttggggagatggcatttcaccatgttggccaggctggtctcgaactgctgacctcagatgatccgcccgcctcagcctcccaaagtgctgggattacaggcgtgagccactgcccccagcccaacacagatcttttttccctcccagagctcacagtggggcatggtaattataaataacatttcaagtacaaattcagtaagtgccctgagggggaagtacagctaggtatgtccgtgtaacaggaattcctgatccactggggaaacctgaaggcttccgggaaaaagaggaattcatggaatgaataaaaactcttactccaggcaagaaaagggggcaggggaaagggagacccaggtagagggaacagcatgtgccataaccccggagtcagagggatgcctgggtcttaatctccacttgtcctacctcctaccccacagcctggagggacctccctcctacaagccaccgaccccaaaagcgaagctggaggcacaggagatggtgagcactttccctggagcccaagctatccccacctccacacccaccccagggctgggaggggcctggcagggagaagctggctgggtggtgggggcagttcctgacctccccgcccctctcccactacagccctcccagctcttcactctgggggcctcggagcacagcccactcaagaccccctactttgatgctggcgcctcatgcactgagcaggtaggagctcatgggaagacaaaggtgggttgggggtctgggttgaagggccaggggtcaggcctggcaaaagaggtcaaagactaaaggtcataactcaaggtcaagggtgtgtccccggttggtgcttaatgcattgagatgtgttcaggattccatgggggaggtcaggggtgaaaaggcccaaggtcacaaggttagaatttaaagtcacttgggggctgggcacggtggctcacgcctataatcccagcactttgggaggccaaggcaggaggatcacttggggtcaggagttcgagaccagcctgtgcaacatggtgaaaccccgtctctactcaaaacacaaaaaattagttgggtgtggtggtgcgagcctgtaatcttagctacccggggcgctgaggaggaagaatcgcctgaacccaggaggccgaggttacagtgagctaagatcacaccactgcactccagcctgggcaacagagcaagattccgtctcaaaaaaataaataaaaccaaataaataaaatcacctgggccgggcatggtggctctggtctataatcccagtactttgggaggccaaggtagctggaccccttgagcctaggagctcgagaccagcgtgggcaacatgggctacccagcaacattttgcgtctacaaaaatactgaatttacctggatgtggtggcaaatgcctgtaggctgaggtgggcggattgcttaagcccaggtggttggggctgtgccactacactccagcctgggcatcagggtgagaccctatctcaaaaaaaaaaaaaaagaggaaaagtcattaggtcaatgaaaattgattatctggtcaggcatggtggctcacacctgtaatcccagcactttgggaggctgagacgggcagatcacctgacgtcaggagttccagaccaccctggctaacaaggtgaaaccccttctctactaaaaacaaaaataagccaggcatgggtgacatgctcctgtaatcccagctattcaggaggctgaagcaggagaatcgcttggacccaggaggcagaagttgcaatgagctgagaccacgccactgcactccagcctaggcaacagagcaagactccgtctcaaaaaagaaaaaggccgggtgcggttgctcacgcctgtaatcccagcactttgggaggccaaggcaggtggatcacctgaggtcaggagttccaagaccagcctggccaacatggtgaaaccctgtctctactaaaaattacaaaaattagctgggcgtggtggcgggcgcctgtaatcccagctacttgggaggctgaggcaggagaatcgcttggacccgggaggcagaggttgcagtgagcccagattgcaccattgcacaacagcctgggagacaagagcaaaactccgtctcaacaacaaaaaaaaacagaatgaaagaaaattgattatctacatttgctggatactgtgcctgaagctgggacaagacaaatcaagtcactcccctcagtggtctactggaggtcaggggtcagacactgaggttgcgctcaaggttcaaaggactgtttagagcccaaggttaagtatttgaggtcaagactgaggtgaaaggttcatggggaaagatttgcagagatcgagtgtcaaaagtgagtcccaggattaacagggtgagttgcacgagctgggctttgggttaaggaagggctgaatgaatgtcccagtgcaatatggcctcaggggacaaggagtgaggtggcatcttgttggcatggggagagagcggtcaggattttggggtcaagagcagattggtaatctgtgtcgtgcgtaggaagtgatcttgagttcctgtcctctctctacctccaggaaatgcctcgataccatgagctgcccaccttggaagaacggtcaggacccttgcaccctggagccacaagcctggggtcccccatcccggtgcctccagggccacctgctgtggaagacgtttccctggatctagaggatgaggagggggaggaggaggaagagtatctggacaagatcaaccccatctatgatgctctgtcctatagcagcccctctgattcctaccagggcaaaggctttgtcatgtcccgggccatgtatgtgtgagctgccatgcgcctggcgtctcacatctcacctgttgatcccttagctttcttgccaaggatctagtgccccctgacctctggccaggccactgtcagttaacacatatgcattccatttgtgatgtctaccttggtggctccactatgacccctaacccatgagcccagagaaattcaccgtgataatggaatcctggcaaccttatctcatgaggcaggaggtggggaaggtgcttctgcacaacctctgatcccaaggactcctctcccagactgtgaccttagaccatacctctcaccccccaatgcctcgactcccccaaaatcacaaagaagaccctagacctataatttgtcttcaggtagtaaattcccaataggtctgctggagtgggcgctgagggctccctgctgctcagacctgagccctccaggcagcagggtcccacttaccccctccccaccctgttccccaaaggtgggaaagaggggattccccagcccaaggcagggttttcccagcaccctcctgtaagcagaagtctcagggtccagacccttccctgagcccccacccccaccccaattcctgcctaccaagcaagcagccccagcctagggtcagacagggtgagcctcatacagactgtgccttgatggccccagccttgggagaagaatttactgttaacctggaagactactgaatcattttacccttgcccagtggaataggacctaaacatcccccttccggggaaagtgggtcatctgaattgggggtagcaattgatactgttttgtaaactacatttcctacaaaatatgaatttatactttgaccaggtcttgccttttctgtgggatgtgaaggggatggggtgagacatgaaggggaatgaggaaggagtctaagggcttgagagaatcagtgaactggggtcaagagagttaaagacaaaaacaaagggaccaaagatacaaaataagaattgagagagtaatgagcaaaaatgtatcaatcaaaaacaaaattttttttttttttgaggcggagtctcgctctgtcgcccaggctggagtgcagtggcatgatctcggctcactgcaagctccaccttctgagttaacgccattcctctgcctcagcctcccgagtagctgggactacaggcgcccaccaccacgcccggcttattttttgtatttttagtagagacggggtttcaccgcgttagccaagatggtctcgatctcctgacctcgtgatccacccgtctcggcctcccaaagtgctgggattacaggcgtgagccactgcgcccagccctaaaaacagaatgttgagtaatggaatggggaggggtccagggcatgctgtttaatgaacattcataattgcaacagcagtatgatgaatgggacaaagataaaaatagcaattggccagatgcagtggctcattcctgtaattccagcacttcgggaaactgaggcgggaagctcgactgagtccaggagttaagagaccagcctgggaaacacagtgagaccccgcctctacgaaagttagccgggcgtggtggcacgcacctgtagttcagctactctggaggctgaggtaggaggatcgattgaggccagaagttcaaggctgcagtaagctatgatggcgccactgcactccagcctgagtgacagagtccaaccttgtctttaaaaaaataaaaattaaaaaagcagtaacgaaagtataagaggctcaagtttaatgaataaacggcaagtaaaagtagactaaaggcaaaatcatgaataatgttgtaataggagcccaaggcatgacggataataaacctgaatgaatgggccagaggcagagtgatgaataatggaaaaatagggaccgggggcaagggaggtaacggacaggagttcatggatccaaaacatgatggctaattagagaagggccggaagaacgacgaaagtgagcaggcaggctggagctaaaagtagtctgggcaatgaagctcaaatgaatggggcagaggcatgatgggtaatgggagaggaatgaatgggccaaagatagaagccgcagtgacgcgaggaacaagaggcatgatgggtaacgaaaggggtgggtctaaggcaactgtttcgctaagaggtgatgagggcattgtgggtaacgaggagcagcgcagggttcgcagaacagattagaattctcccgaggcactctgggaagggccagcacttccggttttaggtcggctactccgaaccagaggtggggtgggggcccggctgccgcggtgcctggtgggacgcgaggcctgaccttgctgcctagccgcctctgccgcgcaacccacctttacctgtccttcgaccctggaacgttagccaatgagagtaccaagctgatacgccaccaaggtcgaccccgtacacgctggagccaatcaaaatgctgcaagggtcaaagccgaccaattatcacagcaacctcgccgcggggcggaatcaaaagagggcctcctccaggagagaggcggggcgatgcctcagcgggcgtggcaaaatgctcagcacagaccaatggcgggttagcaccggaacccgcggcgacgcgagccaataggcgcaggcgctgcgagccaatgggaagggtgggaggggcgccgtggctaccctgcgagtgagaaccaatacaaaaggacatttcagggaaagtgggcgggactttatgcacaagtccaatgggaagaccgagtcttgacgctggtgggcgggcctcagggcacactaaaccaatgggctaggtggggcggggcgacggtggtggcggcggcggcagcgggttcggttgcgcgtggcgcacggggtgggagcggagcccaggccgggagcaggcgccgccgccagtgagaaccggggccggagccgggtgcggatttgctggggctgagtcgggggcgcgcgggccctgacctctgccctctgacctctcccctagcaggcgaccatggggaacgtgttggctgccagctcgccgcccgcagggccgccaccgccgcctgcgccggccctcgtggggctgccgccacctccgccctcgccgccgggcttcacgctgccgccgctgggaggcagcctgggcgccggcaccagtacgagtcgaagttcggaacggacccccggggctgcaaccgccagcgcctcaggggccgccgaggatggggcctgcggctgcctgcccaacccgggcacattcgaggagtgccaccggaagtgcaagggtgaggggcgaggggcccccgckgggctgcgatggcctggatctcgggggaagggggaggacactggggactctgggatttggcgcgcaccattggaattatttaacagcactaggaggtgatgttgggatcgaatggtggaacgttggacttggggcttagaatgatggaatcaaatgctggaaacgggatggaatgtcatagcagtagagaaaagcctttagggacctgaggagccccgggatcagccaagccagacttctcttgtgatcgggaaggcaactgaggcccaaggtcacggtgtcagcaaggtgtcagcraggttccttgggtatgggacccaaagcctccggatcccagcctggagcaattagagtagtagtrgtggtggagatttatggagttctgttctggtgttcattatacgttaactcattagatccttgggacaattctgtgtggtgagggtcccatctttcagatgatgagtttgacctaaagttgctcagcttggtggcagtgagatttgagcaagcaaaggccctggccctgtctaactaggctgtactgcctctttacaggtggaatcctttgtgagatgttctgctgtgggtctctggagagagctgggggtggtagggaaggaagagatgagagttggtgtggggttggrgtggagtgtgacagcgtttctcttctccagagctgttwcccattcagatggagggtgtcaagctcacagtcaacaaagggttgagtaaccatttycaggtgagccttcctggtgtccttacccaccagagatcgtccccgccgtccccctccctgcatctgcacactcggcccaattactcctccctcaagagctgggctccctgatacttgaaaagactcggaratatagtgccagactgactactcagtttggggacctagaatccagaggtactgtctccccatagsagctaggctggagtgaaggaacaggtctgtgggcctaccggcagcacctcctttctctgagtctcttagtcaggccgtgcctcccagtcttcatcccctgcccagcccagagaccttgtccttgccctcttcagtgggcaagcctatctgtccagtatcgtcacagctctcgctttccttccaggtcaaccacacagtagccctcagcacaatcggggagtccaactaccacttyggggtcacatatgtggggacaaagcagctgagtcccacagaggtgagcttcctttttcatccattcattgtatcyttctaataacaaatttgtagccaaatgtcaagctaagacggcctcatcaggaaaagrtcacagctaccgagagcctggagatggggattgcatctctccgaggtgcactgggacacaaataattccttcatccagcaaacatccgccaaacccctgctctctgcctggccccatgctgagcagtgctggggatgtggccacagccaccctgtcaccagacagcgatgacccagggtggaaagggctggactgtagatcatgcagaactttgaatgccagactaggctttggactttctctagggggttgtggagagtcatggcatggtttggtcaagggaaagacgtggtccacaggttcccgctgtagaaatctctggggcatctctggggtggccatgtgggggctagttattaggaagggcaaaactggaggcccagacagggttgggggkactgaatgaggtctctgcttctgtcatttcccttcagcaaatgtgtttattctgcaaaccttcattgcacaacacattctgtgcccagccctgtgctggcacacatgactgaaacagcatgggactcacccgtggggcaggggacagactgttcccagagagtaacaagccaggatgggcaaggctgacatgggggaacccaaaggtcggggagcctaactcagcytaggtggtcagagagcacttcgtggaggaggggacccccatccgaggctttctgaccctaggcttctcaccccggcccatctcacatacttgcacagtgcaccacctctgaccccttccgttctctctgcctcacaggcgttccctgtactggtgggtgacatggacaacagtggcagtctcaacgctcaggtcattcaccagctgggccccggtctcaggtccaagatggccatccaggtgagtggggcacggaggctgctgctcccctcggccaccgtgagcagggagccgccctcacaccccctcctctccacagacccagcagtcraagtttgtgaactggcaggtggacggggagtatcggggctctgacttcacagcagccgtcaccctggggaacccagacgtcctcgtgggttcaggtaagaggcggagggcttggagggtggtcacaaaactgcagttctggctttgccagcaaatccaccccatttgtgaacctccttttctgccactggagaagtggctcagcaggagtgattttgaaacatcaggcaacatactacagtgggtgagacggtcacccactgaccatgagtgggtgagtcagmgcagtcttttttttttttttttttgagatggagtcttgctttatcacccaggttggagtgccgtggcacgatcttggctcactgcaacctccatctcctgggttcatgcaattctcctgcctcagcctcccgagtagctgggattacaggcatgcgctaccacgcctggctaatttttgtatttttagtagagacagggtttcaccacattggtcaggctggtcttgaactcctgacctcaagggatccacccacctcagcctcccaaagtgctgggattacaggtgtgagccaccacgcccagccagtcagcgcaattttaactgagattttcttttgtattaaaaaatgttttaagatggggtcttgctgtattggccaggctggtcttggaactcctggcttcaagcartcctcccaccttgaccttccaaagtgctgggatgacaggcgtgagccacctcgcctggccagggaaacagcttttcagcctgcaagtagtgcagtcgggactcgtgaaaggaacttgagggaggatggtcccctggttgcataaggctttgcagagccttggccttcgctctgagtgagtctggggctttcggaaaccaaggcatagcttctcacaggaccctgcagctggcgtagagagcagactccaaagggggtaccactgggagggagtggacggggrgaggaggttggattctggatgttgtttgaaggcagagctgccaggatttgttgagacyggatggaggcgatgactctgtagtttttggctggaactggaaggatggagtttcrgattgccagctttgtgtctttgtgcagccatccactgtgtcgtggagagcaggctcttgagcgctgagtcctgagtgaatgactcgtgcaggcggggaggggagctagggttggccttggacccctgggagtgcctagggagagtcaccacttctcgctgcaggagcccagggagactcaaaagtgttgacttttgagctgccagaggaggagaaggggctaccccggctgggggacaggagcaagaagattccaggcagggagaagcaggaacaggggtgagggaagggaagggccatggcagaaaacccagsagacagggaagctggaggtgcagcaggtgcagagaggcctcctaggtgaggctgatctgtaggggccccatgaggaagaaacmtttcctgtccccaactcacctggtgacatcaccccatcttctcatacactacagttgaaccacatgagccttttttgttggtttgtttttgtttttgagayggagtcttgctctgttgcccaggctggagtgctgtggtgcaatctcggctcactgcaacctctgcctccctggttcaagcgattctcctgcctcaggctccctagtatccctagtagctgggactacaggcgcgcgccaccatgcctggctaatttttgtatttttagtagagacaggttttcgccatgtcggccaggctgatctcgaacttcttacctcaagtgatccacccgccccggcctcccaaagtgctgggattacaggtgtgagccaccgcgcccggccgaccatgcaagcttttctgacggttcctgaaaccaccgagttggttctaccccaggaccgacgcacactctgtccctgctgcatggaattcttccctctggtcttgacatgactgggaaggcttgcgtgcgcatgtcgccctctgtcgtccaccattgtccccatcttgcaaggccaagaggaggttctccactaagggcacatggccagtgggactccagtgtccctgctcttcacggcgccagcaaccccgttccctgtgccgcctcgctcgcctggtcctttcgtgctccccagcactggcctcctggagcccagggccaccagtgacgctttggtctctagtcctttccagtgcctcttccttcccccagacaccagtgagaacagggcctgccgtgtgccggtcagggctgagctctcgagtctcttgccaccaacagctccgacttgacccagggtgtctctacctccaggcggctctgtgacctccggcaagtggttccagcccttctgggcttcagtctcctcatctgtcacttgggcacaatagaagcaactacctcccagtgaaggagtccatgagagggcccgacttctcggcctcagcactgggccacatgcacagtcaccacttgctccactctggcatctccatggggacaatgcccgcaggcacccccatttcacagataaggaaagcgaggcccaggggtgaaatcagttgcccagggtgacacagccaggaagcagaggagctgggatttgaatggaagcttaattcaggagcccgtgagcctccccagcccctcccaatggtgacagctccttttctgcttcactctgagcacctcatgtgtgcccagccctgggctgggacacagcagtgaccgagacagcccattcctgccctcatgggggtcccaggtcaggcacagtggctcacacctgtaatcccagcactttgggaggctgaggtgggcggatcgcttgagatcgggagttcaagatcagcctgggcaacatagcaataccctgtctctacaaaaaaaattagaaattaggcatatggtggtacatgcctgtagtcccaactactggggacgctgagctggcagggcacatgcctatagtcccagctacttgggagcctgggaagggggagtggttctattctgaagctgaggccaagccatccaaggccttgcaggtgtgctgaggaacccatatcttctcagggcacgagggagccatggcaggttctgggcagggggtcaacagggtcaggtttgtgctttaacatgatccctctgtctgctgtctgtgaggtcacttgaagttggggcatgagactagagaggaggctgtgggtagagaaactgggggggtggcccaggagatgggaaggatggttagaaagatacttgagggtctcatggcctcagttccaacagtccctggaactcagaggccagagattctaagtcactcactctagatggctgcttttccctctgggcttcagtctcccccttgattgaatgaggggataacactgaccagagtggtaatggtagtgattttttttttcttttcttcccctgccccacctcacatacctctgccctgagacgcagtctctgttgcccaggccagagtgcagtggcacagkgtcagctcacctcaacctccaccttctgggttcaagtgattctcctgtctcagcctcccaagtagctgggattacaggcacgcactgccacacccggctaatttttgtatttttgcgtcgtggcacatgcgtgtaatcccaggtactcgggaggctgaggcaggagagtcgcttgaacccgggaggcagaggttgcagtgagccgagatgacgcctttgcactccagcctgggcaacaagagcaaaacgccccatctcaaaaaaaaaaaaaaaagagagagagagggagagatgggggtctcgccatgttgccccagctggtctcagactcctgggctcaaacaaccctcctgcctcagcctcccaaagtgccaggattacaggcgtgagctactgtgccccgcccgtgtgatggtgattcaacaaccagtggggggttcggggattcatttgcttcatctcctctgggaaggagagtcacacagtcgcttgcccgagcccatggggaccagctgcagcctacttctgatctcagcctccccagaagatgccaccagggcactggccatgaactcacggcctctctcacacccaccaggctcatcttgggggttgccgcctaacactcagcccctctgagagctccacccagccatgcctgcaggtatgaaaggcccctattcctgcagctccagagagctggctccaggctggctccatgctagcaggccagcctgctcccactgtggggcccctagtctgcccctctggtcatcttggtctgggaagcatcttcgcacctgctttgctctgtgctgtctcagcttctctgtgtgccctcagtctcgtggcccccaacctcccttcccttctccacgtgtcttcctctccrgggctgcaccctaggagattgctcgatcgtggtggatttctcaactgtgaatcttcagtccctcttcccccttcatttctgtctctgcagatgtgttgtttctttttttttttttcttttttttttttttttgtctttttgagatgaagtcttgcactgtctcccaggctggagtgcagtggcacaatcacaatctcagcttactgcaacttccgcctcccgggttcaagcgatyctcctgcctcagcctcctgagtagctgggactacaggtgtgcaccaccacactcagctaatgtttgtatttttagtagagacagggtttcaccatgttggccaggctggtctcgaacctccgacctcagacgatccacccacctcagcctcccaaagtgctggaattacaggtgtgagccaccgtgcccagcctctttttttctttaaaaattttttaggccgggcgcggtggctcatgcttgtaatcccagcactttgggaggccgaggcaggcggatcacgaggtcaggagatcgagaccacggtgaaaccccttctctactaaaaatacaaaaaattagccaggcatggtggcgggctcctgtagtcccagctactcggagaggctgaggcaggagaatggcgtgaacccgggaggtggagcttgcagtgagccgagatagtgccactgcactccagcctgggygacagagcgagactccatctcaaaaaaaaaaaaaaaaaattaaatttcttattttttgaaacaggatctctgttgcccacgttggagtgcagtggcgtgatyatagctyagtgtaaccttgaccttctgagctcaagtgatcctcctgcctcagcctcccaagtagctgggactataagcatgtgccatcatgcctggctacgtttttaaatttatttatttgttgtttgtttgcttattgggacagattctcactctgtcactcaggctggagtgcagtggcactatcatggctcactgcagcctccacctcctgggcttaagcaatcctcccacgtccacccccttastacctgggactacaggtgtgcaccacctcacccaactaatttttgtattcgctatgtttcccaagctggtttcgaattcctgggctcaaatgaacccactttggcctcccaaactgctgggattacaacaagcatgagccactgtgcctggccttgatttttttttttttttatgataatctgtagttagatgaagtttttaaattttttgtagagatggggtctcactatgtcacctaggcttgtctccaactgctgacctcaagctgtcctcttgccccagccctccaaagcattgggattactggcatgagccattgcatctggctttttttttttttttgagatggggtctcaccatgttgcccgggctggcttygaatgcctaggctcaagcaatcctcccttctcagcctcccaaatagctgggattacaggcacgtgccaccacgccaggcttgttttctttccctgtccctccctctctatttcccactctcttcctccccaattcttctggccctataaaatcacatttgtggcctgtaccctgctaggctcgaaagacaccaaagtgaatccatctccatcctgaggcttgaaaaggcagcccaaaggtggcagttctcttgttcagcaagcactccctacggtggagggacacaggaacgyagacttggacctcagtgcagcaagtcccagccacagctgagcactcgattcctcacaaccccaagaggcagttaggttcacagagagatgatgccagcgtccatggtcaccagccagcctgtggcagggctgggattcgaacccaggctgtgcatatttacccactctacccaatggcctctcagcagcagagtggctcagagcctgggtttgggaggtgtggaggcttggattctgcccttgacacattttgtgagcatgagtgagtgacttaccctgtaagcttctataagtggtggtgaccccctctgtaagtgggggtggataaatgctgaccacatgggcttgtgtcgaccagatgaggtccttcaggtaatgcagtcatagcagggcctgggacgctgacctcagcggtagggaacccctgggcgatgggttaggagaarggagcccttgagggaggcctgagagcaagcccaagcctccagccggggtgagcctagagggcttcytggaggtggagtctagcctggcactcagggtgggtggaaactgatcgtcattttgcccacaggaatcctcgtagcycactacctccagagcatcacgccttgcctggccctgggtggagagctggtctaccaccggcggcctggagaggagggcactgtcatgtctctagctgggaaatacacatgtgagcctggcrcctgggtccgagggtggaggggctgggcccctggactcctcctgggtctgagggaggacgggctagggccctggacactcaggtctgagggaggaggcctgggttcccagatgcccaaatccccttggtaatgagaccccgcctccaccccactctctgacagtgaacaactggttggcaacggtaacgttgggccaggcgggcatgcacgcaacatactaccacaaagccagtgaccaggtgagtgggtgcagggactagctggtgctgccaggggctgctgggcctggaagtccaggtggggccactygctaattctcatgtgttgctccggcccctccagctgcaggtgggtgtggagtttgaggccagcacaaggatgcaggacaccagcgtctccttcgggtaccagctggacctgcccaaggccaacctcctcttcaaaggtaaaggtctckgttcccctacgcgggaaacaggcaggaggtgactcaactctgagtggatgtgtgggccaccacaggtgctggaggacagtgtgctgccaccctgtgggcctccacattaccrgggaacacttgttaaaaggtaggtggggccgggtgcggtggctcacgcctgtaatcccagcactttgggaggccaaggcgggccgaggtaaggagattgagaccatcctggctaacacggtgaaactccgtctctactaaaaatacaaaaacaaaattagccgggtgtggttgcgggtgcctatagtcccaactactgaggctgaggcgggaaaatggtatgaacccaggaggcggagcttgcggtgagccgagatcgtgccaccgcactccagcctgggygacagagcaagactccatctcaaaaaaaaaaaagtaggtggacaaccctctactatgttttatgcttggaaaaaaaaagtaggtagagcrgccaggcgtggtgactcacgcctgtaatcccagcattttgggaggccaagccaggtagaatacttgaggccaggagttggagaccagcctggccaacgtggtgaaatcccctctctactaaaagtacaaaaattagccaggtgtggtagcgtgctgcaactgtagtccccgctacttaggaggctgaggcacaagaatcacttgaacctgggaggcggaggttgcagggagttgagactgcaccactgcactccagcctgggtgacagagtgagactccatctccaaaaaaaataaaatgaaataaataaataaatgttaaaaaaaatctggtggagcatctgatgggtgtttgggccaagctggagctttgtccatcccctcttatttttctgcacttgactctcttatttttctgagactggtctccctctgtcgcccaggctagagtgcagcagtscaactgcggctcactgcagcctccacctcccgggctcaagcagccttcccacctcagcctcctgagtagctaggaccacaggtgtatgccaccaggcccagctaatttttttgatagttttgggagacatgggggtttcaccatgttgcccaggctggtctcgaactcctggactcaagccttggcctcccaaagtgctgggattataggtgtgagccaccacacccagccagggtagaaggcactttggaagcctcgagcctgccccattcatcttacgttagtggaaactgaggcttccagaggtttcaaggtcacaactaaatccagaacctcatctcaggcacactggtcgtagtcccaatgtccagtcttaagtcttcttggatatctgtggctcacagattttrggtgtttgagcctcctgctgagcactgctggggccacagcggtgaccagccctgtcttcacgggactcagtgagaggaacagattcatccgcagagtgggcaggactaggttgggggaacccaggggtctagagggcttttcagagggcaggggtcactgagcggagagcagaggaggagtgagccatttgctccagcgtgaagttgttggtgtgatggggtttcagggtggcaggmgcwgtgtggttaaaggyctggaagctgtcggcatgtggctggtatccaaggtggccaggaactctgcatggatatggtgggaagctggcacgcctctcacctcagctcttccctgcaggctctgtggatagcaactggatcgtgggtgccacgctggagaagaagctcccacccctgcccctgacactggcccttggggccttcctgaatcaccgcaagaacaagtttcagtgtggctttggcctcaccatcggctgagccctcctggcccccgccttccacgcccttccgattccacctccrcctccacctccccctgccacagaggggagacctgagcccccctcccttccctccccccttgggggtcgggggggacattggaaaggagggaccccgccaccccagcagctgaggaggggattctggaactgaatggcgcttcgggattctgagtagcaggggcagcatgcccagtgggcctggggtcccgggagggattccrgaattgaggggcacrcaggattytgagcaccaggggcagaggcggccagacracctcagggaggagtgtcctggcgtccccatcctccaaagggcctgggmccgccccgagggggcagcgagagsagcttccccatccccggtcagtccaccctgcccygtccactttcccatctcctcggtataaatcatgtttataagttatggaagaaccgggacattttacagaaaaaaaacaaaaaacaacaaaaaatatacgtgggaaaaaaaacgatgggaggcctccgttttctcaagtgtgtctggcctgttttgagcatttcatccggagtctggccgccctgaccttcccccagccgcctgcagggggcgccagagggccggagcacggaaagcagcggatccttgatgctgccttaagtccggctcagaggggcgcagcgtggcctggggtcgctatcttcccatccggaacatctgccctgctgggggacactacgggccttcccttgcctgagggtagggtctcaaggtcacttgcccccagcttgacctggccggagtggctatagaggactttgtccctgcagactgcagcagcagagatgacactgtctctgagtgcagagatgggggcagggagctgggagagggttcaagctactggaacagcttcagaacaactagggtactaggaactgctgtgtcagggagaaggggctcaaggactcgcaggcctgggaggaggggcctaggccagccatgggagttgggtcacctgtgtctgaggacttggtgctgtctggattttgccaacctagggctggggtcagctgatgcccaccacgactcccgagcctccaggaactgaaaccctgtctgcccccagggtctggggaaggaggctgctgagtagaaccaaccccaggttaccaaccccacctcagccaccccttgccagccaaagcaaacaggcccggcccggcactgggggttccttctcgaaccaggagttcagcctcccctgacccgcagaatcttctgatcccacccgctccaggagccaggaatgagtcccagtctctcccagttctcactgtgtggttttgccattcgtcttgctgctgaaccacgggtttctcctctgaaacatctgggatttataacagggcttaggaaagtgacagcgtctgagcgttcactgtggcctgtccattgctagccctaacataggaccgctgtgtgccagggctgtcctccatgctcaatacacgttagcttgtcaccaaacatacccgtgccgctgctttcccagtctgatgagcaaaggaacttgatgctcagagaggacaagtcatttgcccaaggtcacacagctggcaactggcagagccaggattcacgccctggcaatttgactccagaatcctaaccttaacccagaagcacggcttcaagcccctggaaaccacaatacctgtggcagccagggggaggtgctggaatctcatttcacatgtggggagggggctcccctgtgctcaaggtcacaaccaaagaggaagctgtgattaaaacccaggtcccatttgcaaagcctcgacttttagcaggtgcatcatactgttcccacccctcccatcccacttctgtccagccgcctagccccactttcttttttttctttttttgagacagtctccctcttgctgaggctggagtgcagtggcgagatctcggctcactgtaacctccgcctcccgggttcaagcgattctcctgcctcagcctcccaagtagctaggattacaggcgcccgccaccacgcctggctaacttttgtatttttagtagagatggggtttcaccatgttggccaggctggtctcaaactcctgaccttaagtgattcgcccactgtggcctcccaaagtgctgggattacaggcgtgagctaccgcccccagcccctcccatcccacttctgtccagccccctagccctactttctttctgggatccaggagtccagatccccagccccctctccagattacattcatccaggcacaggaaaggacagggtcaggaaaggaggactctgggcggcagcctccacattccccttccacgcttggcccccagaatggaggagggtgtctgtattactgggcgaggtgtcctcccttcctggggactgtggggggtggtcaaaagacctctatgccccacctccttcctccctctgccctgctgtgcctggggcagggggagaacagcccacctcgtgactgggggctggcccagcccgccctatccctgggggagggggcgggacagggggagccctataattggacaagtctgggatccttgagtcctactcagccccagcggaggtgaaggacgtccttccccaggagccggtgagaagcgcagtcgggggcacggggatgagctcaggggcctctagaaagagctgggaccctgggaagccctggcctccaggtagtctcaggagagctactcggggtcgggcttggggagaggaggagcgggggtgaggcaagcagcaggggactggacctgggaagggctgggcagcagagacgacccgacccgctagaaggtggggtggggagagcagctggactgggatgtaagccatagcaggactccacgagttgtcactatcatttatcgagcacctactgggtgtccccagtgtcctcagatctccataactggggagccaggggcagcgacacggtagctagccgtcgattggagaactttaaaatgaggactgaattagctcataaatggaacacggcgcttaactgtgaggttggagcttagaatgtgaagggagaatgaggaatgcgagactgggactgagatggaaccggcggtggggagggggtggggggatggaatttgaaccccgggagaggaagatggaattttctatggaggccgacctggggatggggagataagagaagaccaggagggagttaaatagggaatgggttgggggcggcttggtaaatgtgctgggattaggctgttgcagataatgcaacaaggcttggaaggctaacctggggtgaggccgggttggggccgggctgggggtgggaggagtcctcactggcggttgattgacagtttctccttccccagactggccaatcacaggcaggaagatgaaggttctgtgggctgcgttgctggtcacattcctggcaggtatgggggcggggcttgctcggttccccccgctcctccccctctcatcctcacctcaacctcctggccccattcaggcagaccctgggccccctcttctgaggcttctgtgctgcttcctggctctgaacagcgatttgacgctctctgggcctcggtttcccccatccttgagataggagttagaagttgttttgttgttgttgtttgttgttgttgttttgtttttttgagatgaagtctcgctctgtcgcccaggctggagtgcagtggcgggatctcggctcactgcaagctccgcctcccaggtccacgccattctcctgcctcagcctcccaagtagctgggactacaggcacatgccaccacacccgactaacttttttgtattttcagtagagacggggtttcaccatgttggccaggctggtctggaactcctgacctcaggtgatctgcccgtttcgatctcccaaagtgctgggattacaggcgtgagccaccgcacctggctgggagttagaggtttctaatgcattgcaggcagatagtgaataccagacacggggcagctgtgatctttattctccatcacccccacacagccctgcctggggcacacaaggacactcaatacatgcttttccgctgggcgcggtggctcacccctgtaatcccagcactttgggaggccaaggtgggaggatcacttgagcccaggagttcaacaccagcctgggcaacatagtgagaccctgtctctactaaaaatacaaaaattagccaggcatggtgccacacacctgtgctctcagctactcaggaggctgaggcaggaggatcgcttgagcccagaaggtcaaggttgcagtgaaccatgttcaggccgctgcactccagcctgggtgacagagcaagaccctgtttataaatacataatgctttccaagtgattaaaccgactcccccctcaccctgcccaccatggctccaaagaagcatttgtggagcaccttctgtgtgcccctaggtactagatgcctggacggggtcagaaggaccctgacccaccttgaacttgttccacacaggatgccaggccaaggtggagcaagcggtggagacagagccggagcccgagctgcgccagcagaccgagtggcagagcggccagcgctgggaactggcactgggtcgcttttgggattacctgcgctgggtgcagacactgtctgagcaggtgcaggaggagctgctcagctcccaggtcacccaggaactgaggtgagtgtccccatcctggcccttgaccctcctggtgggcggctatacctccccaggtccaggtttcattctgcccctgtcgctaagtcttggggggcctgggtctctgctggttctagcttcctcttcccatttctgactcctggctttagctctctggaattctctctctcagctttgtctctctctcttcccttctgactcagtctctcacactcgtcctggctctgtctctgtccttccctagctcttttatatagagacagagagatggggtctcactgtgttgcccaggctggtcttgaacttctgggctcaagcgatcctcccgcctcggcctcccaaagtgctgggattagaggcatgagccaccttgcccggcctcctagctccttcttcgtctctgcctctgccctctgcatctgctctctgcatctgtctctgtctccttctctcggcctctgccccgttccttctctccctcttgggtctctctggctcatccccatctcgcccgccccatcccagcccttctccccgcctcccactgtgcgacaccctcccgccctctcggccgcagggcgctgatggacgagaccatgaaggagttgaaggcctacaaatcggaactggaggaacaactgaccccggtggcggaggagacgcgggcacggctgtccaaggagctgcaggcggcgcaggcccggctgggcgcggacatggaggacgtgcgcggccgcctggtgcagtaccgcggcgaggtgcaggccatgctcggccagagcaccgaggagctgcgggtgcgcctcgcctcccacctgcgcaagctgcgtaagcggctcctccgcgatgccgatgacctgcagaagcgcctggcagtgtaccaggccggggcccgcgagggcgccgagcgcggcctcagcgccatccgcgagcgcctggggcccctggtggaacagggccgcgtgcgggccgccactgtgggctccctggccggccagccgctacaggagcgggcccaggcctggggcgagcggctgcgcgcgcggatggaggagatgggcagccggacccgcgaccgcctggacgaggtgaaggagcaggtggcggaggtgcgcgccaagctggaggagcaggcccagcagatacgcctgcaggccgaggccttccaggcccgcctcaagagctggttcgagcccctggtggaagacatgcagcgccagtgggccgggctggtggagaaggtgcaggctgccgtgggcaccagcgccgcccctgtgcccagcgacaatcactgaacgccgaagcctgcagccatgcgaccccacgccaccccgtgcctcctgcctccgcgcagcctgcagcgggagaccctgtccccgccccagccgtcctcctggggtggaccctagtttaataaagattcaccaagtttcacgcatctgctggcctccccctgtgatttcctctaagccccagcctcagtttctctttctgcccacatactggccacacaattctcagccccctcctctccatctgtgtctgtgtgtatctttctctctgcccttttttttttttttagacggagtctggctctgtcacccaggctagagtgcagtggcacgatcttggctcactgcaacctctgcctcttgggttcaagcgattctgctgcctcagtagctgggattacaggctcacaccaccacacccggctaatttttgtatttttag

SEQ ID NO: 5741 - DNA, 59247 bp, Homo sapiens
tcccacaccacagataactcctacacataatgtgtatcatgggaaaatacatgcagtaggaatttgctgtacaggaagcttaaaaaccagcaaaactaactgaggtttgttttggggagatatagatatacttattgcacaaatctttgaaggaatacaaaggaatacgtatcagaagactcaggatggagtctcctgccgagaccagctcggtcaggaagaccctaacccagtggtgctagaggacttaaagacacacacacagaaatatagaggtgtgaagtgggaaatcgggggtctcacagtcttcagagctgagagccccaaacagatatttacccacatatttattaacagcaaaccggtcattagtgttgtttctataggtattaaattaactaaaagtatcccttataggaagcaaagggatgggccgaattaaaggaataggttgggctagttaactgcagcaggaacacacccttaagacacagatcgctcatgctattgtttgtggcttaagaatgcctttaagcggttttccgccctgggcaggccaggtgttcctttccctcattcttgtaaacccgcaaccttccagcttggacattagggccattatgaacatgttacggtgctgcagagattttgtttatggccagtcttggggccagtttatggccagattttgggggacttgctcccaacggtctccttctagggggtgactgggtagcagcccagggtagctttacaggcttgtgttttacaccagtgctgggcaccctcgtagatacttgattataattccttaaacagagttttccaaattaaaatatacctgttttttatagaaatgaaaaagaaaagaatttcaaagttcattgcaaagattcttaacaagaactacttacattggaagaaaaccacagagaattgtaaggagccatgtgacagagaggaccaggatgccatgaaaatggcattggctacaaataggtcatttgatccttggctccctggcatctctctagattttcaatgatacaatgttcaatctgctgtgcaagataatttcatcttccaaagatttgatgttacattttaccacacattaaactgaaataaacttttacagattggaaatgcacatcattgatcaaaataaatgaaacatgaaaagagtagggaggaatacccagtgatggaatagcaaatatgaatggaaaacagaataggactgctaaaaagaaaaaaaaattcagaagcatgtaatagcagcgctatttagaatcatagtggtgtccaaatcacttctatcacatctcattcaataccacaacaaaagatgttaagtttattatagaatgcccatcaaatagccagtttttgaaaaaaacttgtttctcaattagaactaaccatttcgggctacagcatcaagccaaaattattggcatcatgctaataatttttactaaagtaaaataaagttgactgaagtatgagattcacatttttgtaaatgaaaagcaatttgattaggcatttttttctgcacagcaaaagaaactatcatcaatcacagtgaacagacatcctacagaatgggagaaaaattttgcagtctatccatctgacaaaagtctagtattcagaatccacaaagaacttaagcaaatttacatgaaaaaaaaacttcattaaaaagtagacaaagaacttgaacagacacttctaaagaagacatacatgtggccaacaaaaatatgaaaaaaagctcaacatcgctgatcattagagaaatgcaaatcaaaaccacaaatgagataccacctcatgtcagtcagaatggcaattattaaaaagtcaagaaacaacagatgctggcgaggttgcagagaaataggaatgcttttacactgttggtggaaaagtaaatggttaatccattgtggaagacagtgacagtgtggtgattcctcagagatttagaatcagaaataccatttgatccagcaatcgcattacagggtatatacccaaaggaatacaaatcattctattataaagatatatgcatgtttacattcatggcagcactattcacaatagcaaacacatggaatcaacccaaatgcccatcaatgatgaactggataaagaaaatgtggtacatatacaccatggaatattatgcagccataaaaaggaatgagatcaagtcctttgcagggatatggatgaagctggaagccattatcctcagcaaactcacacaggaacggaaaaccaaacaccacatgttctcatttataattgggaactgagtaatgagaacacatggacacagggagaggaacaacacacactggggcctattggggcagggtggtggtgggaggatcattagcaaaaatagctaatgcatgccagggttaatacctaggtgatgagttgacaggtgcagcaaaccaacatggcacatgtttacctatgtaacaaacctgcacatcctgcacgtgtaccctggaacttaaaaaaaattaaattaaaagacaagcttaaagaaaaagacaagctgaaagagttaatgaaaaataattagataaaagaagtctttgattttcaaaaacctgaaacaatagttataattttgcttttaacatatattcaaaacatttgatactgttcccttccagaggtgcatcttaattccctctcctgagtgtggcttggacttaatgaggcacttctgatatggcctggttctgtgttcccacccaaatctcatcttgaattgttatgcgaattgtaatcgctacctattgggggagggaccacatgggaggtgattggataatgggggcggtgcccccatgctgttctcgtgatactgagggaattctcatgagatctgatggttttataaggggcttttccctgcttcattctgcacttctctctcctgtcatcatgtgaagaaggatgtgtttgcttccacttctgtcatgactgtaagtttcctggggcaggctcctcagccatgcagaactgtgagtcaattaaacctctttcctttataaattacccagtctcaggtatttcttcatagcagtgtgagaatggactaatataacttctaacttatagaataatgctgacataatggtttgtaactctgggtgtagaacctaaaactcactgcggcttccaccttctctctctctgtctctgggatcatgagctctgggggaagccagctgctgtgccacaagcagccctgcaggaaggtccatgtggctgagaactgaggccttccgggaccagacaacaaagaactaggccttttccaacagccatgtgactgatccatgtttcatgtgaatcctcagccccagtgaagccctcagatgatgcagcccttggctgacaattggactgcaaccttgtgagaggcccggagcaagaagcactcagggaaacctctcctggactcctgaccattggaaactgtggcagatgaggaatatttgttgttttaagctaagttttacataatttgttatgcaatagtaaataaataacacattttcacaagagaggatgtattattacacattaaattgcatttgctttaaatgtatcatcgtcatcattattatttttgagacatggtctcgctctgtcacccaggctggagtgcagtggcatgatcaccatgcactgcagtgtcgacctcctgggttcaagggacccactgatctcagcctcctgagtagctgggactaccatcatgaactactatgcctggctaattttctaattttttgtatagatgggggttttgcccaggctgatcttgaacttctggagtcaacaaatctgccttcctctgccttccacagtgctaggatggcaggcgtgagccaccatacctggcgtaaattaattataagatattaaacatgtaacttagttttaaaaggtaaggagaatttccatggctgaagaggatgtattttatgaccattcacaatgatcactttacttgaacttcaatttccaactgtgtccgaagtaaacacaaaaggaagatccaacccttgctaggctgattctattatgccctcaacaaccagctcctggtcattcaccatcctccagttattcaatcaactctaatgtaggtgctgctgtgaagggagttagtggatataattaagggtctcaattagttgactttaggctgggtttatcctgcttggactgtcctaatcaggtgagaccttgaaaggactgggttcttcctgagcatagagactcacagtgtgagagggactcagcatgaggggtttcctccagcatgggctttgaaaatgaaagggctgtgggccgggtgcggtgcctcacgcctgtaatcccagcactttgggaggctgaggcgggcggatcatgaggtcaggagatcgagaccatcctggctaacatggtgaaaccctgtctctactaagaatacaaaaaaaaaaaaaaaaattagccaagcgtagtggcgggtgcctgtagtcccagctgcttgggaggctgagacaggagaatggcgtgaacctgggagccatagctggcagtgagccgagatccggccactgcacccaagcctgggctacagagcaagactccatctccaaaaaataaataaataaaataaaaaatgaaggggctgtgtaggaaagaatgctggtgaggaccaggaatcgagcacagccctccctgttctctacattgacagccagcaaggaacagggacctcagtcttacaactgccagaaactgcattctgccacctctgtataagcctgaaggaggattcaaaatgaaaacacagcttttggaagcccagaagagagattccatccacaattttgcccagatttctgatcaaggaactataagcagataaatgggtgttgtttcgccaggcatggtagtgcacgaatgaattgatgaattgatatgcacactagttacataaaataaaaattttctgaactttttccgtgttttgcactttataattatctgtaatgcaatttaatacactcatatttcattcattcagtcgacaaaaattaatttagtccctacgataaaccagatatcccctcatatgctcacgtgcctgacactccagaagtttctcaagaccgaggtggagacactggagtgttttaagtggagagatgacacactccgactcccaggagcaggaccactgtgaaaagaacagtcacgtaacaggtcatgggacagtgctagtgtcacaactcacaagtgacagtgtggtggggactaaggggacaggagggcctgaaggatgaaaaggacggagagaagggctggagaagcaggaggtgaagaaaaggagcagaggaaagaattcgaaagcagcagaattcttaggtttaaatacattgttttatggattttaatacatccatctacagagcctagcagggtgtccttggcagttggcctttaatacctcatgtgggtctgcctaaaaactaattttttaatgttaatcaggtttaaaaattactaagtgttcctataaaatatacacaacacttagcagtggatacttcctaaaaacaggcagtgcatgagcactagtgaggggcattgtgactacattgaacagttgcaactttgaggtgaataaagcctgtactgactcctggttgcaacgtacctggttgcaaagtacacagtgtgctactttgtattgaggagatatcctggactcacacagaaactcagagctatggaatgatggcaaatttaaaatatgacaagcgggagtcacaggtacactgcaaaagtgaaacttagaagctttgtgagtcctgttgtaacgcttttgggcacatttatacatcatggggccaaagtcacattttttaccgattagattcctgatcattcaggggttaccaaggttctgctatccaatgtatttaataaacaaataaataaataaactggtctctattctgtctcatgcactcagdcacaacttttcccaataaaaaaaaaaaaaaaaaggaaaacaaaaaacagtttctacacctccattcccadagcaagctcactctctgtcaccaaactccgtgggtgdsttttcttctagaagagtccaggtggacagggagtccagttcagggacggagattcckggatgaaaagtgaagggagagggacagggcccatgccgagggtttcttcctggtttctcagacagctcctgggccaagactcagggaaacactgagacagagcgcttggcacaggaggagcggggtcagggcgaagtcccagggccccaggcgtggctctcagggtctcaggccccgaaggcggtgtatggattggggakgccccgccttggggattcgccacctccgcagtttctcttcttctcacaacctgcgacgggtccttyttcctkgatactcasgaagcgggcacagttctcattcccactaggtgtcgggtttctagagaagccaatcggtgccgccgcggtcccggttctaaagtccccacgcacccaccgggactcagattctccccagacgccgaggatggtgctcatggcgccccgaaccctcctcctgctgctctcaggggccctggccctgrcccwgacctgggcgcgtgagtgcagggtctgcagggaaatggtcgggaggagcgaggggcccgcccggcgggggcgcaggacccrgggagccgcgcagggaggagggtcgggcgggtctcagctcctcctcgctcccaggctcccactccatgaggtatttctacaccaccatgtcccggcccggccgcggggagccccgcttcatctccgtcggctacgtggackatacgcagttcgtgcggttcgacagcgacgmcgcgagycagaggatggagccgcgggcgccgtggatggagcgggaggggccrgagtattgggaccggrasacacagatctgcaaggcccargcacrgactgaacgagagaacctgcggatcgcgctccgctactacaaccagagcgagggcggtgagtgaccccggcccgggrcgcaggtcacgacccctccccatcccccacggagggccgggtcgcctcgagtctctgggtccgagatcctccccgaaaccgcgggaccccgagacccttgacctgggagaggcccaggcgcctttacccggtttcattttcagtttaggccaaaatccccgcgggttggtcsgggcagggcggggctcgggggaccgggctgaccgcgggggcggggccaggttcycacaccatgcaggtgatgtatggctgcgacgtggggcccgacgggcgcttcctcygcgggtatgaacagcacgcctacgacrgcaaggattacatcgctctgaacgaggacctgcgctcctggaccgcggcggacatggcagctcagatcaccaagcgcaagtgggaggcggcccgtsdggcggagcagckgagagyctacctggagggcgagttcgtggagtggctccgcagatacctggagaacgggaaggagacgctgcagcgcgcgggtaccaggggccacagggcgcctcccggatsgcctgtagatctccggggctggcctcccacaagaaagggagacaaatgggaccaacactataatatcgccctccctctggtcctgagggagaagaatcctcctgggtttccagagagtgactctgagggtccgccgtgctctytgacacaattaagggatgaaatctctgaggaaatgaagggaagacaatccctggaatactgatgagtggttcyctttgacrctggcagcagccttgggccccgtgacttttcctctcaggccttgttctctgcttcacactcaatgtgystgggggtctgagtccagctcttctgagtccctcagcctccactcaggtcaggaccagaagtcgctgttccctcctcagggactagarttttccacggaataggagattatcccaggtgcctgtgtccaggctgttgtctgggttctgtgctcccttccccaccccaggcgtcctgtccattctcaagatggccacatgcgtgctggtggagtgtcccatgacagatgcaaaatgcctgaattttctgactcttccygtcagacccccccaagacacatatgacccacyaccccatctctgaccatgaggccaccctgaggtgctgggccctgggyttctaccctgcggagatcacactgacctggcagcgggatggggaggaccagacccacacacggagctcrtggagaccaggcctgcaggggatggaaccttccagaagtgggyggctgtggtggtgccttctggagaggagcagagatacacctgccatgtgcagcatgagggtctgccmgagcccctcaccctgagatggggtaaggagggagatgggggtgtcatgtcycttaggraaagccrgagcctctctggagagctttagcagggtcagggtccctcaccttccccccttttcccagagccatcttcccagcccamcrtccccatcgtgggcatcrttgctggcctggttctacttgtagctgtggtcactggagctgtggtcrctgctgtaatgtggaggaagaagagctcaggtaaggaaggggtgaggagtgtggtctgagatttcttgtctcactgagagttccaagccccaggtagaagkgccctgcctggttactgggaagcaccatccacactcatgggcctacccagcctgggccstgtgtgccagcacttactcttttgtaaagcacctgttacaaygagggacagatttatcaccttgatgactgtggtgatgggacctgatcccagcagtcacaagtcacaggggaaggtccccgaggacagacctcagaagggcggttggtccaggacccacatctgctttcctcatgtttcctgatcccgccctgggtctgcagttgcacatttctggaaacttctctggggtccaagacttggaggttcctctaggaccttatggccctggcttctttctggcatctcacaggacattttcttcccacagatagaaaaggagggagctactctcaggctgcaagtaagtatgaaggaggctgatccctgaaatcctttggatattgtgtttgggagcccatgggggagctcacccaccccacaattcttcctctagccacatctactgtgggatctgaccaggtcctgtttttattctactccaggcggcaacagtgcccagggctctgatgtgtctctcacrgcgtgaaaggtgagaccttggggggcctgatgtgtggggggtgttgggggggaacagtggacacagctgtgctatggggttctttgaatttgatgttttgagcatgcgatgggctgccaaagtgtcatccattactgggacagatatgaatttgttcatgaatattttttctatagtgtgagacagctgccttgtgtgggactgagaggcaagakttgttcacaccttccctttgtgacttgaagaaccctgactttctgcaaaggcacctgaatgtgtctgtgttcctgtaggcataatgtgtggaggaggggagaccaacccaccctcatgtccaccatgaccctcttccccacgctgatctgtgttccctccccaatcatctttcctgttccagagaggmggggctgagatgtctccatctttttctcaactttatgtgcactgagctgtaacttcttacttccctcttaaaattagaatctgagtaaacatttactttttcaaattcttgccatgagaggttgatgacttaattaaaggagaagattcctaaaatttgagagacaaaataaatggaacmcatgagaaccttccagagtccatgtgtttcttgtgctgatttgttgcaggggaggagaatagatggggctgtgcctagtgggtgctcaggccagtatggactttatgtggtcactgctcagctgggtcatctttgctccttcattctccttggcccttcagtagaaccttgtcccaccaccacctgtgatcacagggacttggatgtcacctacggtggtccctgcatacaaatctcattgtggtatcaagagactaattttcagacctgtccagctcttgccctcctcccagggctctttcctggattgtagttttcatcttgtctccaatctttttaaaggaagcagattctgaaatttgcagagaggaggggtcccatagtttctcatcatagtgaactttctgttggagctcctcttctgctctcctactcttcttcctgccctgagttgtagtaatcctagtgctggctccaatccaaactcatggatttacaaagcagagtctaatttagattcatacgtggttggaaaattgtacccataagcctagggttatctttcctgaagagaaaaatatggttgtgtgctgcagtgtgcaggagggttggtgtgggaggaggtagggagggagggaggacacacaagcactcctggtgagaaaagcactggcggcatcgatgtccacatgagatgatgttgttctttagctgccacaaaacagcatttgccctgaggctaccttaacaaagatattggctttagaatagagaagtgctctacagtgatcattcattcaactgacatttgttgtctgctagggatatgactgcttttgcgtttagaaagcatcattaaggtgaaaacagaaaaatttctggtgttgtggtacatatgttctagatgctagcttgtctaacccgtagctcgcaggctgaatgtggcccaggacagttttgaatgtgaggagtttttgcttttctgtggcggacctgagacctggagtgagtgcacccacctccctcaggatcaggagtgaatgctttaggaaccctcctttgcagtgacctgcaaaagatagagggcacggttactgtgagaacccagagtagcagccaaaggggctcaaccttcatggagttttgggaaaggttagtaaaaggtggtgtcccagcgtcagaacagatgggcagccagcgagggcactgcttcatatctatgatgggaatgcaagaattgaggagcaggagactgagggtgtttgatcaaatacaaagtcatgatcccagtctcaattcctagacttcagccaagcttcagattcagaatctacagtggggcttaaggaggccaggaaataaacctggacacattatggcccactgtgggaccactgggttcataaacccagtcctggttatctccccattctccacatgcataattggccttgatgcactggcaaagggagtcacccccacactacatccctagtctggagagtaagggctatcattgtgctgaagcccaaagggaatcatctaaaacttccctcatcccagccaagccagaagcaatattgcgccccaggtgggacttcaggagggtactgcaggtattgtaggggtggcactgccattagagagctgaaggatggggggtggtgttgggattgcctattatctccatataattcagcagtctgtccctgaagaagcctgataaagaatgaatggaattactccagacttgaccaagtaggagtcctgattgcagctgccatgctggctggatatcactgcttggggagattaataaggcctcaggcacatggcaaacagccatgcatttggtgagtgcattctttcccattccatttagaaaatggatatggaatgattcacattcacatgggatttataatacatttattgatagcttgcctcagggctactttaactcctcaaccttctataaatatcaccttaagagatctggacaaatcagacatctcacagaatactaaatctcttcatttcattggcaatatcacatagattgggatggatgagtaagaggaggaaagtacgctgaattctttggcaaaacgtgtgcactacagaaggtgaagattaaccttacagagcttcaagagtggccactgcagtgaagtgttatgggtccagtggttaggggcatgcagggctgtcccctccaaagtaaaagacaaacttgcatcttgcatcctcaacagaaggaaggaagcacactatttggtgagcttctctgggtcctggcaacaccacattccacatctaagtatattgtttggcccactgtctgggtataatataggaagaggtcagctttgagtgcggactagacaggaaaggacactgcagcagatccaggcggtggtgtaccaggtcatcaactctcagtcccctggtgctgggggtgacagcgtggggaaagatgctagatggagctgaaccaagcagctgagatcaagtgagctgagatcccgcccctacactccagcctgagcaacaagagtgaaactccatctcaaaaagaaaaaaaaattaaaaggataagcaccctcccacatcagagataactccccaacacataatatacatgcggtgtgagttctctgtatggggaagttaaaaaaatacaggtcaaactgtgatttgggtattattgtaaaaatcttcagtgacaatgccaaggaatagcaaatacaagactcaagacataggttccttttaggggataggattggacaacagcctagggtggcttcataggttctgtttcttatgccaggaggggatatccaggtagttagttacttgatcataaaactttatttatttatttatttatatattttgagtctcgctcttgttgcccaggctggagtacagtggcatgatctcagttcactgcaacctccgcctcccaggttcaagggattctcctgcctcagcctcctgagcagctgggattgcaggcaaatgccaccactcccagctaatttttgtatttttagtagagacgggcttcaccatgttgaccaggttggtctggaactcctgacctcaggtgatccacccacttcagcctaccaaattgctgagattacaggcatgagccaccactcctggcccacaaatctttaaagtggtatttttcaaaatgcaccttgtgtgccattcctgattgattatttggaaatgaaagagaaaagaaaatgccaaagttcatcacaagcatcctttgcgataactactcgtagtaaaacaaagccgcagctggccgggcacggtggctcacttctgtgatcctagcactttgggaagtcgaggcctgtggatcacgagatcaggagttcgagaccagcctgaccaacatggtgaaacctcgtctttactaaaaatacaaaaattagctgggcgtgttggtgcgtgtctgtaatccaagctactcagaaggctgatgcaggagaatcgcttgaacctggaaggcagaagttgcagtgagctgagatcctgccatcgcactccagcctgggtgacagagccatactccatctcaaaacaaacaaacaaacaaccacaaaaaacaagccacagccaattttaaggagccatgtgagaggaccaggatgccatgaaaaacagccttggctacaaataggtcatttgatccttggctagttggcaactctctacattttctgatacacagtgttcaatctgataggtaaggcaatagtatcttgcaaagaatttgagaatttgatatgttgctcacattttaccacacatacaagtgaattaaacttttacagaatagaaaaaaagcattgttgagcaaaataaattaaatgaaaagacataaatgaataactagtgatgaaatagcaataagaatggaaaacacgaaagagctgcttttaaagcaacattagaagcacaaaataacagtgtttttcagaatcatactggagtccaaatcacttctaccacatctaattaaaaaccacagtgaaagatgttaaactgatcacaggatgcccactgaatagccagttactgaaaaatcttgttcctagattgaatttaaccatttccacctaccacatcaaaccaaatcattgtcatgatgctaagccagttgtacagacaaagatgtgagactcacatttttctaattgcaaagcaccctgattaggcaaatatttttgtagatgcttgagtcagaaaattgtcattttgggcattctttttttttttttttttttttttgccttcaagcatctgtttaacaaagcacatcttgcaccgcccttaatccatttaaccctgagtggacacagcacatgtttcagagagcacggggttgcgggtaaggttatagattaacagcatcccaaggcagaagaatttttcttagtacagaacaaaatggagtctcctatgtctgcttctttctacacagacacagcaacaatctgatttctctgtcttttccccacatttcccccctttctattcgacaaaaccgccatcgtcatcatggccccttctcaatgagctgttgggtacacctcccagacggggtggcggccgggcagaggggctcctcacttcccagacggggtggccgggcagaggcgccccccacctcctggacgaggtggctggccgggcgggggctgccccccacctccctcctggacggggcggctgccgggcagagacactcctcacttcccagacggggtggctgctgggcggaggggctcctcacctctcagacggggcggccggggagagacgctccttacctcccagacggggtggctgctgggcggaggggctcctcacatcccagacagggcggcggggcagaggcgctccccacatctcagatgatgggcggccgggcagagacgctcctcacttcctagaccggatggcggccgggcagaggctgcgatcttggcactttgggaggccaaggcaggcagctgggaggcagaggttgtagcgagccgagatcacgccactgcactccagcctgggcaacattgagcactgagtgagagagactccgtctgcaatcccggcacctcaggaggccaaggctggcagatcactcccagttaggagctggagaccagcctggccaacacagtgaaaccccgtctccaccaaaaaaatacgaaaaccagtcaggcatggtggtgcgcgcctgcaatcccaggcactctgcagactctaaattattcaacgcctcagacactaactttccaaggaataggagattatcccaggtgcctgtggccaggaggtgtctgggttctgtgctcccttccccaccccagatgtcctatccattctcaggatggtcacatgggtgctgctggagtgtcccatgaggaatgcaaagtgcctcaattttcttactcttcccttcagaatcccagaatacatgtgtgatccactaccccatctcggaccatgaggccgccctgaggtgctgggtcccgggcttctaccatgtggaaatcacagtgacccaactgtgggatggggaggaccaaatttaggacgcagagcttgtggggaccagacctgcagggtatagaaccttccagaagtgggcagctgtgatgctgtcttctagagacaagtagagatacacatgccatgtgcagcaggaggcactgccagagcccctcacactgagatgggctaaggagatgaatgaggggccatgtctcttctcagggaaagcaggagcccttctggaggccttcagcagggtcagggctgaggcctgggggtcaggacccctcacgttcccctcctttcttagggccatcttcccagcccacattcctcatcatgggcatcgttaccgtcctggttgttctaggtgctgtggtcactgctgtgatgtggaagaataagaccccaggtaggaaaggggtgagttccaagatttcttcttccattcgtggatttcaagctccagatggaagttggctcatttcctgcctagttgtgagacaccatctccacacacatttaccctgttcagatgccctgtcaactctcactcttttgtaaagcacctgtgaaattgaaggacaaatttatcaccttgattgtgatcatgggaacctgactcccagcagtcacaagtcaggagaatgttcctgctgaggacagatgtcaaaaggacatttggttcagcttcaacacatcctcttccctcgggttttctgatcctgacctgggtctgcagtcacagttctggaaactcctctaggatctcatggccctgcctcttccctggcctctcacagtttgttttctttcctcatatggaaaaggagtcagctatgctcaggcttcaagtaagtgtggtaggggtgggagagtgattcctgagatccttggaatagtgtagacaggagcccatgggggaggtcaccaccccacaattcctcctttagtcacatcacctgtgggctctgaccagactttgtttttgttccaccccaaacaggaacagtacccagggctctgatgtgtctctcaagtcttgtaaaagtgacaccttagagggcctgaagtgaaggaggagttggggcagatgggacacaactaggctctagagagtctttgatttggaatttttcaatgtgtggtgggctgttcagtgtcaccacttaccatgactgacttgaatttgttcacgactattttctttccaagactgccttgtgagggactgagatgcaagatttgttcatggctccactttgagacttcaagggcctctgttttctctttctgccaaggcatctgaatgtgtctatgtccctggtaacatgtgagaagtggagagaccagcccaccctcatgtccaccatgacccctgatattgtttggatctgtgtccccacccaaatctcatgctcacttgtaatccctaatgttggaggtggtgcttggtgggacgtgattggctcatgaggatggatgattcatgaatggtttagaatcatctctttcatgctgttcttgtgatagttcttggaggcattgtgccacctccctagggatctgtggaactttaaacttgagagtgatgattaagggtatctgatggaagaaatttctcagtagcatagaattcaggatttggtctggctgcctgtaatagcctatgtgcatatgtgtgagcaaagaaatgacccgaaactggaactgatatttaaatggggaaatttaatacccaggaaaattcttagcggagctgcagcaacaggacccctgccaggactactaaatggtagagccactggctatgtgcaacctcagcctggaaaagccataggcattcaattttctcccatgacagcagctatatgggttatgttcagcaaagccataaatgtggagctgcaaatggcattaggagcccagcagttgcaccagccactgtgctctggattcaaaatatagagtcaaaggagattcttttagacctttaagttttaatgtctgccatgatgagtttcaatcttatgaggaaactgcattcatttcttttggcccatttatataccttttggaatggaaatgtacaagaaatgtctcttccactgttttattaatattttagatgcaaataacattttttaaaaaaattttacaggctcaaagctataagaatttaccttgcgtctcagatgagactctagaattttgagttgatgctggaacaacctaacacatttgggacaattgggagtagattattatattttgcaatgtgagaagaacatgacctttggctggctagggaggggatgcaatgatataaacatttatcccctgatacctcatgttaaaatctaacgcccactgtgggacttggggcctaatggccaccatttgggtcatggtgaccaatcttttatgaatcgagagatactgccctctctcgggaatgaatgaattgttgctctattattttccaagagagctagttgttaaaaagaccctggcaacttcctactctctgtgttcctctgttaccatgtgatctctgcatataccagctcccctttgtcttctgccatgagtggaagcagcctgaggccctcactaaatgcgcaaacatttccagacatcagaatcttgagccacatgaacctcgtttatataaattagtcagtctcagacatttctttatagcaacacaaaatggaaaaagataaccctcgcatcacaggtatgtgtctctggcagctagccaccgttcttaagatatccaggatccactcagccaagagtcttctcatcagtactctaaagacactcttatcactcaagagagtctaaggtttttaggagaaaccagggacaaagactaaatgtttttgtgataactcagattgcccacttttctttgaccacatatcttttacaggaaaaaggattgtaacagtaaagaggtattggcatattatcagagtctcatccattcattcaaaattaggccagtttatcatcctcttgtatgaatatgtctcccagaatgaaatcactcagctttgctgacaacactcaatcttaccaggttccaaaaacaaggatggtctcagggacatacagcttcactcttttaggcatcccgtataattgacctaagtgacaatatcttctcttgctcacaccacctttgaggagttaagctaatattgaatttttctcattatataaccctttgatttattcacttaccctcagccactattcctccctctgtccctttatatcagttgtttccaggtttgggagtgacattaggtttgtctgctgggctggcctagactgcaggcagcaatagtattctagcatgtcttccctcagtctagtcttgatcatagagggtaggttatataggtaaggaactagtgggggctatcagaccaccaggctatataactctacttactgttaatcctaacttttcagatgaaatgaatacttgagaattcttacataaaggtgtaaaaatatagttatggtttttcgcttagggataattcctgtttctggcacttttatttacatccctattcctggtactatggcataacatatgaaaaaataaatttgaggtgaagtgtagtctttattccagcatcctctccccttcagaagaattgtatgtatcgtcgtaacagcatcgtcctgatccatcaggtaaaagagaggatgctacctagtggagttattcttgcagccccactcatgttgacagcgagcacattcatgaagatataaaagccagtccttcatgtttatattgcccaacaattagattggcagtttttagacaaacaatgtttcaattgaccatttcaattttctatcaaattttcccctgaggaggacatgtccctctgcattgttggccgtttgaggctgtaaagtgtgttttcttgtgtaaagaagtgtgactcggcagtccaaattggtgcaacctcttcttttctggtccttgtatagcccttgaagcattgacatctacccctggttgagcatagcccaatccagagtcagtgattttcctgtcaagatccattggcagctcctttggggttgctggcatcattctggcttgccaggtattatgatcaaagccttcccactagagaatctgtcacatctccatctgctgcctctgtctgttttcttgaccaacagtgaaaaaagagattatgagaaataagataaattaccaaaattgtgaacaaaagagattatcactaatgacccttaggaagttaaaaaacattataagtgaatactctgaaaaacctgaagccaataagttagaccacttagataaaaaggaccaattcgtgcagagatagaaattgccaaaactgacccaaattaactggaaaacctgaagagaactgtgaactaagtcagaaattgaaaaaccttctcaaaaagaaatgccaaagcccagatatcttcactggtgaattctatcaaatattttgaaagctctttcagacaagaagagaggagggaagactttccagcccatttacagaactggcattaccctcatatcaaagtcacagcaagactcacaggaaaagagtgccatacaccagtgtcaccaataaacataaatgaaaacatccttaacaaacattggcagataatacaaagccacataaaaaaggattacactccatgaccaatgggattcatcccaggaacatatggttggattaacatttgaaaatcaattcatggaatgcactgtattaatggaaaaaaagacataattatctcaaaagatgcagaagaaacagttgacaaaaatgttaacatcactcatgttcataagtttcaacaaaataggaatggaggagaccttcttcactctgataaagggcatctataaaaaacccacagctaaaatcaaacttaatgaagaaagactgaagactgaatgcttttctcctaagatggggatcaatgcaaggatgtccaatcccaccacttttatttaatattatactggagattgtagccagtgcaataaggcagaaaattaaaaattaaaggcatccagataaaaaggaaaacatacaattctattcacagataacatgaccctgtctgtagaattcacaagcagataaaaactggctagcactaataaatgaatccagaagggcccataggatatcaaatcaatataaaaattaattattaacatatttctctatagaagcaatgaaaatctcaactttcctatcacagtagttaccagaagagcgaaataggaataaatttaggaagacagcagtgtttgttcactgaaaataaaaaaacattcctcagagaaattaaaggtctaaataaatggagagatgcgagttggaaagctcgataatactgttaagatggcaattctcccccagtagatctataggttcaacacaatccctatcaaaatcccagcagggattttatagaaaattgacaaaataggccgggcgcggtggctcatgccggtaatcccagcactttgggaggctgaggcaggcggatcatgaggtcaggagatccagaccatcctggctaacacggtgaaaccccatctctactaaaaatacaaaaaactagccgggcgtggtggcgggctcctcgggaggctgaggcagaaaaatggcatgaacccggtaggcggaggttgcagtgagcggagatcatgccactgcactccagcctgggtgacagagcgagactccgtctcaaaaaaaaaaaaaaaaagaaaaaaagaaaagaaaattgacaaaataatcctaaaaatgtatattaaaatgcagaggatgcagaagggccaacacaaatttgaaaaaaaaaatggaatgtcatatgaaactacaataatccagacagtgtgaaactgagagacatagagatcaatgaacagaagtgagaatctagaaagatattcttactttctttgtcaattgattttcaatgaagttgcataggtaacacaatgttacatttaacaccatataaaatatcagctcaaacaaattagagacctaaacagctaaaatttatgagttaaaactataaaatttctaaaagaaaacacaggagaaaatttttattactttgggtagttaggcaaaagattcttagataaaataccaaaagcatgatctacaaataaaaaaaaaagagagagagaaattgggcttagttaaaatttaaaacttgagtgctccaaaagacattgagagaatgagaagacaagccatagacagggagaaaatatttcacaatttatcacaaattacatttgtgttgaagaacatgtttccagaataatgtggcaagttcttaaactcaatgtgtaagaagatgagcaactcaactgaaaatgagcaaaacacacaaatatgctcaactgacatttacaaaagcacaaacacaattcaatgaaggaaggagagctttcccaacaaatggtgctggagcaactggacaaccacagtggaaaaaaaataggctgagcccaaacctcacgctttatacaaaaaaaaaaaaactcaaaatgaatcacaggctttaatgtaaaacacacagttaaaattacaaacattgagccaggtgtggtgtcacaggcctgtactctcacctactcaggagactgaggtgggaggatcccttgagcccaggagttcaaggccagcctaggcaagatttttttttaaataaataacaaatacattaaaaaattaaaattacaaatcttttaacaaaaagccatcagaactaagactagacaaagagttcttacacataacaccaaaagtatgatctgtaaaagaaaaagttactaaactggatcttatcaaaattaaaactgttgctctgtgagagacctatgaagagcataaaaagacaagctacagaatgagagaagatatttgcaaaccacatattcaataaagacttgcattcacaatatatgaagaaatgtaaaaactcaacagtaaaaatgaaatccaaataaacaataggcaatgagcaagacatgaacagacgtttcactgaagaggataaacaccaggctaacaagcagatgaaaagacactcaacatcactatccagtaggaaaatacaaattaaaactgcagtgatgagaatggctgaaatacaaaataaaggtagcaacagatgctggcaaggttacagagaaactggatcattcatattgctggtaggaatggattttaaaatggtacagccactctggaaatggatattgcagttttcttcaaactgaacatgcaatttaccatatgactagaaattgccctcctaggcacttatttcaaacaagggaaaactttatgttcatgaaaaacctgtatacaaatactcttgcagctttattcataatactcctggaagtaattattcataattacttccataaactggaaataatgcaattgtctttcagtgggtgaaggagatctgctggttgaactcataactgagtctacacaagtgccctttctcaagactactatcctgcttctctttgcatatctcccattttctcacaaagaatattaaagacatgtactcaaggatcaaaatttaatgaacataaatattttactgctccatcaaaggcattcttaaatgggactgcagtttggagccactgccttggttctgctaaggtgctgggtgtgctaccgaccttggcatttgcagcattaatggaaaagtcaacataatgaaacaggcaaatggcatcttggtattactgtgaaaacaggtttccctccaggactctctgaaggcagctcagggggccacactttcaaaatggcagagatcaattatagttcctagtgagacccaacccctagcctattcagattcagcactctctctcgctcttttttttccctcattcttccaacttataattgtatatattttcaaatgtgcaaagaagctgaaagaatagtgcagtaaaattcaagttatcactctgatatatctgattaatatctctttatatgcatgaaagcagcgtgtggaatgatagacaatagagacccagaagggtaagagtggttggcagtgggtgtatcgtagaggagtttcttgttggggtcaatgtatctgtctccagtggtggatgcactgaaggccctgactttaccacaactcaatatagcaatgtagcaaaactgcacctgtgccccatgaatatatacgaatttaaaaatttaaaaataaaataacatctctctttgtagatacaggtagacatgtttgcatagcatgtgtgtgaatgtgtgtgtatgtgtgtgtagagaggcagcaggaatgaagagattaagattttgtgactgagccattctaaagtaacaaacataaaacacgcatggataaatgtctatgtgacaacaaacctgaatataaacatgaaagaacatgtctataaacatatctctggctagataacctatgaaagaattccctaccccagctcccttactggttaccctgcgaacacaggcaggcagggaacaggacccaactaggttccctcatcctcttgcttccaggcaggtcctgcatccactcctgctgcacagagggctcccatctctgccttggtcggtttcacaggtgctcccctaactctctctgccaccactgccttacctgggtggagctgaggctgccttgaccaagaacagcaccacccatctgtgtgccccaagaccaggaagttaggaggaaccacgcaacagagtcaataactatcccacctccccagtcagtctgaactgatggcgggagatgctgatgcttgcttatcctcattccccgtttatttattcttcgttaattcagtccaaactcccctcagtctgaactgatggcgggagatgctgatgcttgcttatactcattccctgtttatttattcttcattaattcaatccaaactcccctcagtctgaactgatggtgggagatgctgatgcttgcttatcctcattccccgtttatttattcttcattaattcaatccaatctccccagcagtcacttcacccaggaagcagactgacctctgctcttcataatcaggaaaccccaaagcactctccatcacctccctgatatcacccttcagctctacatcatcacatgtgggctctaactctgaaggcaggtgtcctcccacagggtcaacccctgaacattggccccagatgtctccccatctcttcccagccctttcagtactgctgtgaatctgtccctcactgagaactggcggggcgatgtgggggaggaggggaaatttcttggtgctgtgtcaaagcatcaagacagacctctccttctctcctgaacctcacactctatctcttcccagacacttgaaataaaacgcagaccagaaatgtctatttaagagtcaacacaatttctttttctagacaagtttctcttattctcagggctcagctatgactgtgggtgaccaaacaactattcacaaaggacagaactcgcttcaatgccagcttatgaatccacaccttgccacctgcagaggtggaaaaaggcacctaaatccacgatccaatagttcttcctgcccttaactcctcacacacatctggacacttggagagtgtggagggcacccagggtgcagggtggcagtggaggccttgggaaaactggccaggaagccaagatatgcacctcaggtgactaaatttttttactgttctgcacttgctggagaatgaccccaaaagataagatcaatttgttgactaccaacttatttggctgagccatggacatggagcagatgagcattgcctttacctatgacatgcatgaggattctgagacctacctgcagcagttaagccccacacccagagggacacccactctcccacctccttactttctgtatcttttcacactttacatcctcatccttccctctgagagtcttccctctttgggtcttctagtcctatcctaccctctatccccttccaggtggcacagggcttgaccatcacatttgtgtcaggtgacaataatgccaggatcctcagtatgggcagcatcgctttgaggtcagtgatagtgagctgcctgatgagacagacatctcctccacagtgagtgctgatgtcatgaagccctttagttcttcctagttccttaatatgtttgtcttcaatcctgtcatgggcacctgatgcataatggacacttggctgcttcatgcaccctggtctttgatgccgtgttgggatgtttttctgaccgttatgtggggtatctgttttctttcatcatattacatctcttcccccactcccaagtctgtcctctgaacccacacagtacaccagcatctgcatgtgtgccgtgtgctcctgcctcactttttccttttcatgccttattctcaccatgccacattttccccttagttgaacagacacagtaggggactagcccattctggcatgtgaccacgcttcaggaggagactgcaggttgggggtgaaggagactctactgaccccacccctgacatcctcttcccccaccccctggcttctgtcctctgcctcagcaccactcctgaacccccattcctgattgtcagaatttttaacataactaaaaatgaaacacaagtgcatctgcattatgtgtgggtgctctctccctttattttatttggggtgaggttattttagggcatggcccagggtaaattcctgtaaggccttggtgccctgctgtgaggtcaaagagggatgggactaagactgcagagccctggctcccccactacctgccaattgccagccctttgtggggtctcttctgctttctctggcctgggagatgctggggtgtttctgatcctggggctcctgggggtggtgcacattagttccaggcatggagggtgctgtgggcactgctgggaagcttgggtgtcccctcccaggctctctcctcccaggctctctcagtgcctcctcatctgtttctttagcttttggatcttgagcaccagggcctgggcccccaccgactccttcccttccaggagggcctggtccagctccagctgctgtgcaagcaactcctcagcttgggccagctcagctgtgtggggggctcagggccctggtcagagggagtggaggagggagcatcagccagggtagaggggttgaggcccttggaacctgtgttgcaagatctcatggtaagtgaggaattcgacctcgttttctctttttccagcccattagcttaagtccacctgtagtgagaatcccagggagcaacctgtcttgggcataggcctctggagggcagatacagatccctggctcaggggctatatctggatgccttgaatgaggatatggggtcaccggaaagagacaaccagatgtctgtccccactaataaatgattaactgttagatgagggggaattcctgttcaaggactctggactgtgctgctctgggcagagggagggctggagagagggagccctgagggctgggctggggtgggggtggaaggagctgagagttggaaataggcaaaaagctgcagaggtgagggtaatgcagggtgggattgagagaatttcccccgactactgtactgatcccttcatctcctccacccgagcacttggagccacatagcgggtggcctcatcttcccactgtcccagaagctgttctgcccttccatacttgccttggagttttgggagcagcatgtttatgagccctggggtgccagggaccaggagggcaggaggaggtgaagaaaacagcaccgagagagccaggggagtgggaggactgtggcaggtgaggcaaggagctgtctgagccgctcagcagccttcaggaggctctctccaggcctgtcttcactccagtgcctggccctacccaggcccccactcccgctctgctctcaagctggccccagacaggatcccaaacaactcctgttcctaatgtgaaaaatgtttctgccgctttaggcagaacttgctttagagcactggcacagccttccgcaggtcgtgtgtctgattctcttggcactgtgccttttttcacttattcttctgcaaggaaggaattatatcactggttgggtgaggcaactggctcagaggggttcactgagcactcacccactgggcaagtgtctgtcagggccagctatggccaagatgtgtccaaggctctatagctagctggtggaaaggcctggagggttcatattcaggtccacctaacttgaaaacttatattgaccttacttaagtactgattccccctttataatccatgccgcaaacttcattgtcttattttaagaagttgccataagagcctttagcaaccaccctcctgatcagccagcagtcatcaacattgaggcaagaccctgccccagcaaaaagattaagattagctgaagcctcagatgatccttagcatttttgagcaatagagtaattttaaattaaggtatatacatagttcttttatacataatgctatcatacacttaataggctacagtagagtgtgaatataacttttctatgcactggaaaaacaaaaatttgtgtgacttgtttgttgccatggtctgaaaccaaatctgcagtgtctctgaggtacgtctgtagtttccctttccctcttcctgctggcccggaatgaccttgtttcttgcccctgtctagccctgcatgctgcaggggtttgccttctctggtaggtctgggaactttgcatccttgtaaccttggctcctggcatatgacactggtaccaagctctgttggactagtgagcctcctccccacacacctcctgaactagaaccaaagctctgtgcatgcaccgtgcatgtgtgagccaatgacaagatgttgtcttcctgcgagtgttctgaaggagtgttctgttgtgactggaggacacagccacgggccccccaggcagaggtggctcagaagggagtggatggccccggttttgatcatctggggacaagaaggtcctgagataaaaacccatgttttggaaaacaaaactgcccgagactgaaaagtggctaaccaattcgctatctgggacatcactgcacactgggagggaagatggcttctgccatggtgtagggtcccggacctagacaaagaggccttcctatggctcagtgcttctgaagcacctttaaatgaggccaaagacctcatgttcatgattagctgactagttcccactcagtggaaaaaaaaacccagaacttttgcaaaattttaggagagagggatttccctcttgtctcttagtgctacggttatgcatgactcatacttgaattgcagtgtgtacacagcttaaggacttaactattagaatacaagaggcccaaactactgttgttatagatatgtaaaactatatggtataaggttaaacaacccacaactaattaacagtgaagataaattaactacattgcaaatttaaaacaagattagcagccctttagaaaaaaaacaaaacacatgggaggttgcaaaggcaatctaaatgatactctaataaaaatccttcatgaaaatgacatttcaaccatctgagtttctgctttaagttatgaactccaaaatggactaacacccaataatttacagtagggaggtctaagccaccaagaaaggtgtcagggcagacctgaaacctggaatgaacacgccccctctctcagggtaatgagtaaatcctctaagacccgttctatctcagacagaccatccactcataaggaggtcaaaagaaagttccacacagcactgagacccaaccacctcattgtcctcacctccacggacagagcccaggtgagagccacccctgctcctcctccctcatctcccacagcctcagcaccattgtctgcgccgagtccaccaggactcagctcatcatgtcctttccctgtttgtgtcagtgacactgggtcccccacatactctgcactcacatccccacaaggctctgcacaccactattctgtctccccaacctcccgaaccacagaaatcttcccagtgcaccccctggaatctcagtcaatgatcaacaaaacctccacaccctctctcaggatgttcctgcacctcccagctccagcagcaacctggtctccctgaggacatgaccccctctgaagtcctcccacataggggagtttcccccatggacttgtacccctgggttcagaggtgaggtggggaccttgctcctcactgtggttctcagaactttctgcctccctcctccctaaaacccctaggctgtcatcagattagacccccattcccctcattgtagccattccctgtgggcccctggcctttcctctcaatcctgactcttgtagctcttggttcactgtcaccctctccagcagtctccttgactgttggtgacttcaacatgtggtgggctgagtaatggtcccgaaagaggtccagtcttagtccttggaacctgtgaacaggttgcattacatggcaaaagggactttactcatgtaatgatgattaaggaccttaaaatagggagattctcctggacaatctgtgtggccccattcaaatcaaatgagccactaaaagcagagaacctgccctggctggagtcagattctgcagaggaggaaggcagaggagacatagaagaggggaggtcagacgttccaagcaggaggattggatgtgccttaggcaccatgtgtgagtagctgaaagaagattctaggagctaagcgtggctcttaacaaggaagtggaaacctctgttctatgtgcaaggaagtgaattcagacaagaacctgaatgagcttggaaatggattcttccccagagtctccaggagggaacacagacctgcccataccttgatcttagccccataagactgtgtggacttgcaacctacaggactgtaacatgataattaggtgctgtttaaagccacttggtttgtggtaattcttatggcagcaatagacacctatacagcagagaagatgcccttgctccctggactctcagatcctggaactcctctcctccatgaccttctcctctctctgcctgaatctcatgcccctgtcatcccctaggcctcatcatgcccaagaaccccagcccttccatactctcaatttcacacttcccactctctggccatctttccactcatcccatgcaaggtggccacaggctctgaggacacagactctatcattttatcatatgctgtgaggtaatatcagtgactactcattgcatatgtgcctgcattccaggcttgaagtccaccctttagcacatcaattccaacaatccttcgacccccaccctgggaataccaatccagtgattccaccatctactcactgtccctcatcgttggtgtcttctctaacttcatgacccaaaccacatggggagcccccaccagggccagcaatcaccctctccctgcatggctcaccctcagcctcctcctggcctgggtgacccttacacaccttctctctgtgctcacacatccaaccctccttccccattcttatctcagctgacaaccttggttcctacctcactgagaaaactgaacacattagaagacagattccatcaccatctgctcatgcatttgcagctgcaacacatgtcaggtgttttaccatgttggggactgttgtgggtaaaccattctgctcccatcagagccagtccctcttctggtgcccaaaatgtcatcccttatcatctacttaaaggtgtcagttcatcaattaatacctttttttctctttatcatcaacctttttcctctctccccactggatcattgtggcagtcatgagaatgcacatcccagcccctcagctagagtaagcagaattgatagtggcctcaacttttgaatcctgaaacctattgccacatttgctctgagaccacacctgccccctgtcttttcctgccaatgactgaggaaagcagggcagaaactaaggcaggaacatttcttctctgaaggctgactgaagctctagggcttcctgccacgcttactgaacttctgttagcctgcacagggtctaggatgcttccagctgaccttcctgcactgtttacctcactggggctcagagttgctttgtggtctgatgacattcccagcattttccgtctgtgtcctgaatttctctcataactatttcctctaataaatccttgcacattgaatactgtattggggtccgctcctcaggggaccctaactaacacaagtagtatgaagggtgatccatgaaaacaggcaaaaatgagaatttgaaaaaagcttgcccactgcctggcaggccaagaggatgccaccagggttgtgggagacacagaaattccatagcacaagatgcagccgagctgctatgggtctcaccagtgctgagctgagaggatgccctggttaggggaagctatggcaggtggggtgatagaatgccctgcacaataatgacggggttagggggaaacctacaaagacagtggagttggctggttactgctcagctgcaatgatgccctgtgaaagtatcatgagaatctgcagattgttaacagctgtcactggctacatgtgacagcctctgcagtgtctcatgcacaggtctttatctcttgtagcgaaagggcagataccgtggaatggtagctgaagacatcactatgagggccacagtgctccagagaggtttgccactcagccaaggcaggcctgttacaggaaagtcaggaccctggtggggaaacctgagattctgcaaacaggaacagggttatccgatgggtgccctccaggatcctctgggcatgcataggaggctcacccttctctagtaatggttcccacttcctatgctggaagatgctacagaagtctcacccccatgatacagcaggaatcccactgaagagctttgcaggaactagctggcacgtccccataggaggccgaggagcacttctgggattggaatttgagggtgtttgatcaaggaaccagaatttcaagctggaagaataaaaatcctttggcttggaggcactttctcaaggcatgggtttatcaaacaccccaggactttgataaggggggggccaaacccaccgctggggtgaatccatatagactagaaaaaatgatgcctaactctcaacaaggtagacgtgacttagttgccctggaacttgcacaggatggaataacaaggctgagggaagtgggcatggtgaaggcccaccagtaccatgctccacaagacggtccaaaggaaacaccttccaccagagcctcagaaacgtgatggtgagagggacctgcatcattaagaaatgtcggggtgttgtcctctgcaggctggatgtgatggtagtaaagatgacccagagttgcatttattaatatccctggggagagtgtggccctgaagagacaaagaccaaatggtggcagtgacctgaaaaagccagagggcagagttactatggcaaactaaaaggagtagccaataggactcaagctgcagggaatgtggggaaggatagtagagggtggtgtcccaggattaggacaggaagccaacaagggcgctgcttgatatctatgataagaaagcaagaattgagaagcaggagggtgaaggtgtttgacccaatacaaagtcatgatcccatcctcaatgcctagacctcagccaaagttcagattcagatcccagtgacagaggaggagtccatatccctaggaggaataccctgcaactccgtggaagtaaatgctggcacaattccctcagtccttcagcaaaggaacctatagccatttactcaggagattgtacactggcgaaaggaaagatgcagaactggtcagattattgacactgagtgagagctgacattgatgcccagatgcccacagcactatcatgtctcccatcacagtggggcttacggaggtcagggagtaaacctggacacattacggcccacaatggaactactggatccatagacccagccctggttatcttccaattccctgagtgcataattaacactgatgcactgttaagtggagtcacccccacactgggtccctagtctgtggagtcaggactctcattgtgctgaaagccaaagggaaacctctgacgctgcccacatcctggcaaaaaaaaaaaaaaaaaaaatcatagtgtgtcccagggtgtgtcttgaggaagacactgaaagtaatgtgggggtcacaccaccattagagagctgaaggatgtgggatggtgttggggttgtctattgtctctacataatccagcaacctgtccctgaggaagcctgatgaggactaaagaatgaatgagattactccaggcctggccaagcaggaattataattgcagcttttatgttgtctggatatcactgcagagcagaataataaagcctcgggcacacagcgtgcagctatggatttggtgagtgcatttctttccactccaattagaaaggggatatggagcgattcacatccatgtgggatccacaacacatttatttatagttttttctcagggctattgtaactcccctgccctatatagtatggtctaaagacaatactagacatactggatattctataggatattaaatcagctcatttcactgacaacttcatgttgactgcggtgaatgagcagcaggtagaaagtgcactggagtcattggcaaaacacacgcactccagtatgtgaagataaaccttacagagcttcaagagtggccactgaagtgaagttttatgggttaacaagtgccaagtgtttaggggaatgcaggtgtgttccccccaaggtaaaagacaaactgtttcatcttgcatcctcaccagaaggaaggaagcacactgcctgatgagcctctttgagttctgacaacaccacattccacatctaggtacgtgctttggcaaacactctaggtgacataggaggaggccagcttcaagtagggcctacacaggaaaggaccctgcagcagatccaggccatggtgcaagcagccagcgtccctcagaccccctggggctggtggtgccagtggtggggaaagatgcaggatggagcagaaccaagcaccagtgggagagtcacagtgaagggcctgggattctggagtaagatcatgtcatccacagcagagacatatgccccctgttagaagcaacttttagtgttccttgtactgatttgatagaaagcttgaccacaggacaccaggcaactatgtggttccaagtgcctttgtgacccacaacatcataaattgcacaggcccaacagcattcatcatgaagtgaaaatggtccacctggattgagcttgaatcccacgtttacacccacagaaaacacccaagtctgatgtggcactgaacaaccaaacagacaaatggcagttagccagccttcaccatgggtcagcccaggcctggtaggatgagtgcatgaatggagcaaccacagtggcaggcatgagtgccagcagcactgacttccccctaccaaggcagatccagctgctgccacctctgaatgtccaactcatcagcattttaggcccatgatgtgccctagtggggcactatttctttaggtgactagtcattaactaagaagttgactacatttacctacttccatcctggaaggaccagaggttcatcttcacagggttaggtacctattctagggggggttttctgtcctgctctcagacacagccagtaccactctctgggtgctgttgacattcctggtctgcaggctaggcagtgctcctagcccattatctgcctgaaggatccacttggcaagggaaagattcagtgtttccatggctgttgcttccactaaccctatcaccagctactctccccaggggctgccagccacaaggaatgccccatatgtagcctcacacctgccactgtggttgttccattcatgtgcccatcctatcatgcatgggctgacccatagtgaaggctggctagcttccatttgtctgtttcgttgtttaatgacacttcagacttggctgttttctgtgggtgtcaacatgggattcaagctcaacccaggtggatcattttcacctcatgatgaatgctgtttggcctgtgcaatctatgactttctgggtcacacaggcacttggaaccacatagttgcttggagtcccgtgatcttccacaggcacaactaagtgccagcctggaggaagcactctgagggttgcgtgccatctttcaggacatggtgcgttgtttaaatcagagtcgtctctacagttctgtgttcgcaagaggaagaacatgtgggtccagaaatcaaacggtggaagcaggtatggctccatgtctaatctcttagattcacctaatggggtatttgacatgttttatctcagaacactgggctgtgcagggtacgaggtcctggtttgcaaaggagggtacccttaaaagcagacaaaagacagcccactgaactacacattaagtttgtcaccagagaagtgtggacagtatatgcccagagaccacctggtgagaagaggagtctcctcctctccaggcccaggtaatagatcctcatccccaggaggaggcatggctactttcacacaataaaggcagaagtgtggaaaccagagatccacctgggggccttctgttttccctcaccccattgcaagtgagagtagaattatccagcaattcagcctgagaggatttgatttccaagggcccagacccatcagggcagaaggtttgagtcacactcctgggtaatcctccaaggccgtgctcctgtgctctgacatcctcagtggcattggtgctgaggccctgcttcccatggactattcccaaccagtgatgggtcacaccagtgacactaaggcaggacattcctggaagacaggggactcctctgatggccagctgtggctggaggactcctccatagccttgctcaactctccttagattgcctgtggtctaggacatgttaagtaatccttccttccttctttccatcactgggggtcacacttgcatcttattctattgcctttcccagggtaacctacctccctcaccatatcgtctgacaggtgtgtcccctaataaaatgctgtaactttaatcctatgatggcacttgctttttggagcatttggactacaaaatcattttcgtctgcacaccagtgacctcttacttattccaacgtgtaaaatctttttgtttattcaacttcttctacctgcattggctccattttgctggtatttgtattatgtttttgagttcaccaatgtttgttgctgtaagtcactaaatttgggggtagtgttttacacagcaacagataactaatgaagccttcttacatttccgttattcgatagaggttaactacgtctattttatttcctcctattttgataatattagccatacagagggtttccagttcccaacgcctattcttttctttattttagtttcttttctcctttgttccttctttttctctttccttctgtccctccttccctctttaattccattcaatctctcgccctccttctcccttcctcctttccgtcctttttcttccccttccccttccttcttttcttctttcactccttcctcaattcctccttctttctctcccttcctccattttttcctttttattatgaaattttcctaacatattaaataacccctacgtgattgtgttatcagtaagcattttctgaatctatatgtcaaaagtataataccatggtatatgagaaacaagtaaacaacaggaagttattaacagagtctgaataaaaatgcctgctataattctgcagccaagacagtggcttttaactcaattccttcaactaggtgttttcagaacacatgagtttaagttgacacaatcaccttggaaatcatattatcattatctagtatggttaaagtccatacaacatatcgtccaaccctcccactcctaaccatacactctagcgggctttcttgcctatgtgcccaggagacaggcacactgatgtttatggcaaaaactggaatcagccacatatacatcaataggaaatatacatcaataggaaattgtggcataaaatgtaaaccttcagcagtgaaaatgaatgaatgacagcctcccacaccacagataactcctgtacgtaatgtgcatcatgggaaaataaatgcagtaggaatttgctgtacaggaagcttaaaaaccagcagaagtaaataattttttttggatatatatgtgtgtatatatatatatatatacacacacacacacacacacacacacacacacacacacacacatatatatatatatatatatatatatatatatatatatactcattgtgcaaatctttaaagaaatacaaaggaataaggatcacaagactcaggatggagtctctctctgggggatgtgactgggcagcagcccaggggagctttacaggtttgtgttttacaccagtgctgggcatctttttagttacatgattgtaatttgttaaacagagttttcaaattaaaatatacctggtatttataaaaatgaaagagaaaagaataccaaagttcattgcaaggatccttaacaagaactacttacattgaaagaaaaccacagagaaatgtaagcagccatgtgacagagaggaccaggatgtgatgaaaatggccttggttaataataggtcatttgatccttagctcactggcatctctctggattttcaagtatacaatgttcaatctgatgtgcaaggtaattccttcttgcaaaggatttggtgttacattttaccacacatacaactgaattaaactttcacagaattggaaatacacatcactgatcaaaataaatgaaacaagaaaagagtagaaaggaacaaccagtgatggaatagcaaatatgaatggaaagcaaaataagacagctaaaaaaaaaaaaaaaagaaagcttcagaagcacataatagcagtgctatttagaactgtagtagtgtccaaatcacttctaccacatctcatgcaataccacacccaaaaatgttaagtttacaatagaatgcccctgagccgtttttggaaaaaatttgattctcaattcgagttaagcattttgggctactgcatcaaaccaaagttactggcattatgctaagctagatgtgttgactgaagtatgagattcccatttttgtaaatgagaagcaatctgattatgcaattttttctaagtgaaagcaagtttattagagaagtaaagaaacaaaagaatggctactccatagacagagcagtgtgtgtgtattttttttttaagtgtaggcaaatgttttctgaagatgatatgtcaataagaaaattggcacttggggcatacttccactaaatttgagacatcttagacaaaacaaagacttattttcaaggcatcattcttatggcactgaagtcttggaactatttgatctagttactctatgttctcaactgtgttaacttattgaagaacattgttattaaaggtatttacaagagaaacgcagagatactgttgtttctcctttctctgtctcaaactgttttccctgcagcacccaaggctctgtcatgtctcaaacatttaatcattaatttaaaaagagaagcttatcacagaattagaaaaaaaaatttgaaaattcatatggatccaaaaaagaggttgtgtagccaggagaatgctaagcaaaaagaataaagctggaggcatcaggctatcctacttaaaactatactataaggctaaagtaaccaaaacagcatggtactggtagaaaaacaagcatatagaccaacagaacagaatagaaaactcagaaataagacctcacatctacaaccatgtgatcttcaacaaacctgacaaaaacaagcaatggggaaaggaaacgctatttaataaatggtgctgggaaaactggctagccatatgcagaaaattgaaactggaccccttctttacaccttacacaaaaattaactcaagatggattaaagacttaaatgtaaaacccaaaactagaaaaaccctgaaagaaaatctaggcaataccattcaggacataggcatgggcaaagattttatgatgaaattgccaaaagcaactgccacagaagcaaaaattgacaaatgggatctaattaaacaaaagagcttctgcacaggaaaagaaactatcatcagagcgaaaaggagacaacctacagaatgggagaaaatttatgcaatctattgatctgacaaaggtctaatattcataatctaaaaagaacttaagcaaatttacatgaaaaaaacaacttcattaagaagtggacaaagcacatgaacagacacttctcaaaagaagacatacaggtggccaaaaaacatattttaaaaagctcaatatcactgatcgttagagaaatgcaaatcaaaaccacaataagataccatctcatgccagtcagaatggcaattattaaaaagttaagaaacaacagattctggcgaggttgtaaagaaataggaatgcttttacactgttggtggaaatgtaaattggttcaaccaatgaggaaggcagtgtggtgattcctcaaagatttagaaccagaaataccatttgacccagcaatcccattgcagggtatatacccaaaggaatataaatcattctattataaagatatgtgcatgtgtttgttcattgcagcacaattcacaacagcaaagacatggaatcaacccaaatgcccaccaatgagggactagataaagaaaatatgatacatatatgccatggaatattatgcagccataaaaaggaatgagatcaaatcctttgcagggatatggatgaagctggaagccattatcctcagcaaactaacacaggaacagaaaaccaaacaccgcatgttctcacttataattgtgagctgaacaatgagaacacatggacacagggagaggaacaacacacactggggcctgttgggggagggcggtggtggggggagcattaggaaaaatggctaatgcatgcaggggttaatacctaggttatgggttgattggtgcagcaaactgccgtggaacccgtttacctgtgtaacaaacctgcacatcctgcatatgtaccctggaacttaaaattaaactaaattaaattaaaggacaagattaaaatgttaaggaaaaataattagattaaaagcctttaacttaaaaatcctgaaataatagtttgaattttgcttttaacatatatgcaaatcctttaatactgctcccttccagaggtgcagcttaattccctctcttgagtgtggcttggacttaatgatgcacttctgatatggcctggttctgtgttcccacccaaatctcatcttcaattgtcatgcgaattgtaatccccagtattgaaggagggacctcatgggaggtgattggatcatgctgttctaatgatagtgagtgaattctcatgagatctgatggttttataaggggcttttccccgcttccctctgcatttctctctcctgccaccatgtgaagaaggacaggttttcttccacttctgccatgattgtaagtttcctggggcggcctcctcagccatgcagaactgggagtcagttaaacctctttcctttataaattacccagtctcaggtatttctttatagcagtgtgagaacagactaatacaacttctaactgatagagcaatgccgacgtaacagcttgtgactctgggtgtagaacctaaaactccctgtggcttccaccttctctctctctgtctctgggatcatgagctctggggaaagtcagctgctgtgccatgagcagccctgcaggaaggtccatctggctaagaactgaggccttctgggactcaattacaacgaactaggccttttccaacagccatgtgactgatccatgtttcatgtgaatcctcagccccagtgaagccctcagatgatgcaggcctagactgacaactggactgcaaccttgtgagaggcccttagcaagaagcactcagggaaacttctcctggattcctgacaattggaaactgtgggagatgatcaatatttgttgttttgaaatggtacattttacataatttgttatgcaatagtaaataactaatacattttcacaagacaggatgtattattacatgttaatttgcatttgctctaaatttatcatcatcattattattatttttgagacagggtctcactctgtcacccaggctggagtgcagtggcatgatcaccatgcactgcagtgtagacctcctgggctcaagggaccctctgacctcagcctcttgagtagctgggagtacaatcatgaaccaccatgcctggctaattttctaattttttgtagagatgggggtttccccatgttgcccaggctgatcttgaacttctggagtcaacaaatctgccttcctctgccttccacaatgctaggattgcaggtgcgagccaccaaatctggcctaaattaattaaaagatataaatatgtaacttagttttaaaaggtaaggagaattttcgtggctgaaaaggatgtattttattaccgttcacaatgattactttacttgaacttcaatttgcaactgtgtcccaagtgaacacaaaaagaagatccagcccttgctaggctgattctatgatggcctcaacaacaagctcctggtcattcaccttccccccattattcaaccaactctaatataggtgctgctgtgaagggatttagcagatataattaagggcctcaattagttgactttaggctgggtttatgctgcttggactgtcctaatcaggtgagtccttgaaaggactgggttcttcctgagcatagagattcacagtgtgagagggattcagcatgaggggtttcctccactgtgggctttgaaaatgaaggggctgtacagggaagaacgctggtgggcatcaggaattgagcgcagccctccctgttctctacattgacagccagcaaggaacgcggacctcagtcttacaactgcaagaaactgcattctgccacctctgtataagcctgaaggaggattcaaaatgaaaacacagctttgggaagcccggaacagagattccatccacatcatgcccagatttctgactaaggtactataaacagataaatgggtgttgtttggccaggcgtggtaatgcacacctgcaatcctaacatctgaggagttgacacaggaggatcacttgcatccaggagtttgagaccagccaagatcaaacagtgagacactcatctctacaatttctttttaattagctgggagtggtggcacttgcctgcagtcctagctactctgaagactgaggcaggaagatcccttgagcccaggagtttgaggctgcagtgagccatgatcatgtgactgcacttcaccctggatgacagagggagactctgtctctaaaaacaaataaatcaacaataattgggtgttgtttaaagtcaatgtttgtgataatttgttatgcaatcttataaaattcatacacaggctcaacagactcggatgaattgatatgcacactagttacataagataaaatatttcttaatttttcagtgttttacattttataactttctgtgatgcaatttaatacattcatatttcattcattcagtcaacaaaaattaatttagtgcctaagatgaaccaggtatgccctcatatgctcacgtgcctgacattctagaagcttcacaagaccgaggtggagccactggagtgttttaggtgaggaaatgacacactctgactcacaggagcaggaccactgtggagagaacagtcacgtagcaggtaatgggacaatgctagagccacaatttagaagtgacagggtggtggggactaaggggagaggagggcctgagggatgaaagggacagagggaagggctggagaagcaggaggttaggaaaaggagcagagggaaggaattggaaagcagtagaattcttaggtttaaacacattgttttatagatttttattacatccatctacagagcctcgctcagtgttctttgcagttggcctttaatacctaatgtaggactgcctaaaaactaatgttttttatgttaataaggtttaaaaaatacttagtgttccttctttgcagttggcctttaatactatatttgggactgcctagaaactaattttttttaattaatcaggttttaaaaatactaagtgttcctataagatatacacaccacttagacgtgaatacttcctaaaaacaggcagcacatgagcactgctgaggggcattgtgactgcattgaacacttgcaactgtgaggtgaataaagtctgtactggctcccggttgcaacatatagtaacgcagtgtgctactttatattgaggagatgtcttggactcacccagtaactcagggctgtggaatgaaggtaaatgtaaaaaacaagcgggagtcacagatacattgtctgcgaaagtcaaacttagtagctttgtgagtcctgttgtaatgctttcagacacatttatatatcaaggggccaaagttacattttttaccgattagattcctgatcatttaggggttgccaagattctgctacccactgtagttaataaacaaagagaaaacttgtctctatgctgtctcatgtactcaggcacaacttttccggatttaaagaaaaaaaaaacaaaaacctgtctctacgcctccattcccagggcgagctctgcctctctggcggcgagctccctctctgtcaccaagctccctggggtgagtttttttctagaagagttcagggaaataggtaaggagtgggaggcagggagtccagttctgggacggggattccgggatgaaaaatgaagagggacggggcccatgacgagggtttctccctggtttctcagacagctcttgggccaagactcagggagacattgagacagagcgcttggcacaggaggagcggggtcagggcgaagtcctatggccccaggcgtggctctcagggtttcaggccccgaaggcgatgtattgattggggaggcccagggttggggattccccatctccgcagtttctcttctccctctcccaacttatgtagggtccttcttcctggacactcaggatgtggactcagttctcacccccatttggtgtcgggtttctagcgaagccaatcggcgtcgctggggtccctgttccagaagtccccgcgaacccattgggactcagattctccccagacgccgaggatggggtcatggcgwcccraaccctcctcctgcygctcttgggggccctggccctgaccgagacctgggcgggtgagtgcgggatccggagggaaatgrcctctgcggggaggagstaggggcccgcgcactggggcgcaggacccggggagcmgckcaaggaggagggtcggaygggtctcagcccctcctcgcccccaggtwcccactccataaggtakttcagcaccgccgtgtcccggccgggtcgcggggagccccggtacatcgcagtgggctacgtggacgacacgcagttcgtgcggttcgacagcgacgcggcgactccgaggatgtagccgcagkcgcmgtggttggagcaggakggaccggagtattgggaccggagcacacsgaacatcaggcccgcgcacagactgacaagagtgaacctgcccatgccgcgccgctactaccaccagagctaggccggtgaatgaccccggcctggggcgaaggtcacgacccctcctcatcccccacggacgycccgggtcccccccgcgagtctccggctccragayccaccccgaggctgcgggacccgccagatcctcgacccgggagaggcccaggmgcctttaccaggtttcattttcmgtttaggccaaaatccccgcgggttggtcggggcgggggcggggctcggtgggcggggctgacmgcgggggcggggccagggtctaacaccctccagataatgtatggctgcgactyggggctggaasggcgcctcctccgcgggtatgaacagcacsccaacgatggcaaggattacatagcccggaactaggacctgcgctcctggaccgcggcggacatggmggctcagatcaccaagcgcaagtgggaggcagaagaatttgcagagcagatcagggcctacctggagggcacgtgcgtggagaggctcgcagacacctggagaacgggaaggagaygctgcagctcacgggtaccagggaacacaagacgyctccctgatcgcctgtagatctcctgggctggcttcccacaaagagagaaggaaaatgggaccaacactagaatgtcgtcctctctctggtcctgagggagaggaatcctcctgggtttccagatcctgtacaagagagtgactctgagggtctgccctgctctctgatacaattaagggatgaaatctctgaggaaatgaagggaagacaatccctgraatactgatgaggggttccctttgacacyrgcagcagccttgggccccgttacttttccyctcaggccttgytctctgctttacactcaatgtgtgtgggggtctgagtccagctcttctgagtccctcagcctscactcaggtcaggaccagaagwcactgttccctcctcagggactrgaattttccacggataggagattatcccagrtacctgtgtccaggytggygtctgggttctgtgctcccttccccaccccaggtgtcctgtccattctcaggatggccacatgcgtgctgctggagtgtctcatgagagatgcaaagtgcctgaattttctgacwcttcctgttagacccccccascaagacacatatgatccaccattccrtctctgactataaggccaccctgaggtgctgggccctgggcttctaccctgtggagatcacactgacctggcagcaggatggagaggaccagactcrggacatggagcttgtagagaccaggcctgcaggggatggaaacttccagaagtgggcagctgtggtggtgccttctggagaggaacagagatacatgtgccatgtgcagcatgaggggttgcccaagcccctcaccctgagatggrgtwaggyargagatkagtggagggggggtcatgtctcttagggaaagcaggagcctctctggagaacttcagcagggtcggtgctgggggctgagggtcagggacgctcaccttccccttttttcccagagcagtcttctcagcccaccatccccatcgtgggyatcgttrctggcctggttctccttggagctgtagtcactggagctgtggtttctgctgtgatgtgcaggaagaagaactcaggtaaggaatggatgaggagtggggtctgagatttcttgtcccactgagggtttcaagccccagttagaagtgtgtcctgcctggttactgggaagcaccatccacactcatgggcctacccagcctgsgccctstgtgccagcacttactcttttgtaaagcacctgtgacamtgaaggacagatttatcaccttgatgattatgatgatggggacctgatcccagcagtcacaagtcacaggggaaggtccctgctgaggacagacctcaggagggcagttggtycaggacccacacctgctttcctyatgtttcctgatcctgtcctrgatcagcagttacactttcaggaaacttctctrggatcaaaggctagggggtttgtttagggccgtatggccctgactcctttctggcctctyataggacattttcttcccacagatagagtgagctactctgaagctgcaagtaagtatgaagtgggctgatccctgagatccttgggatattgtggtcgggagcccatgggggagctcacccaaccccagattcctcctctagccgcatctyctstgggctctgaccaagtcctgtttttgttctaccccaggcagcraccatgcgcagggttctgatgtgtctctcayggcttgtaaaggtgagamrctgggggacctgatgtgtggggggtgttgggggcaatagtggaygcagctgtgctatggggtttctttgaattggatgtattgarcatgtgatgggctgtttaaagtgtcayccctcactgtgacggatatgaatttgttcatgaatattttattttatagtgtgagacagctgccttstgtgggactgagaggcaagatttgttcacgccttccctttgtgacttcaaaaaccctgactcwctttctgcaaaggcacctgaatgtgcctgtgttcctgtaggcataatatgaggaggtggggagaccaacccacccccatgtccaccatgaycctcttccctcatgctgacctgtgttccstctccaataattaatcattcctgctccatagasgtgaggctgagatgtctccatctctrtctcaactttatgtgcactgagctgtaacttcttacttccytattaaaattagaatctgagtataaatttactttttcaaattcttgccatgagaggttgatgggytaattaaaggagaagattcctaaaatttgagagacaaaataaatggaagacatgagaaccttccagagtccacawgtttcttatgctgatttgttgcatgagaggagagtagatggggctgtgcccagtgggtgctcaggccaccgtgcrctttatgtggtcactgctcagctgggtcatctttgctgctcygttgtccttggctgtatgatccrkccctacgggrcttagcgggttttctccccgtgtgcggagatgagagattgtaataaataaaagcacaagacaaagagataaagagaaaacagctgggccsgggggaccactaccatcaagatgcggagaccggtagtggccccgaacagctgggctcgctgatatttattgcatacaagacaaggggcagggtaaggaaggtgaatcttctaactgattgacaaggtgaagcaagtcacgtgattacaggatagggggcccttcccttttaggtagcatatgtcaccattttcttttctgcacttaagatcaaagactttaagactttcactatttcttctaccattwtctactaygaaattcaaagaggaaccaggagtacaggaggagcatgaaagtggrcaaggagcatgaccactgaagcacagcaccacagggaggggtttaggcctctggatgactgcgrgtagctctggataatatccagccttctacaagaagctggtggagcagagtgttcccygactcctccaagaaagggagactccctttcrtggtctgctaagtaacaggtgccttcccagacattggcattgccacttgaccaaggatccctcaagcggcccttatgcgggcgtgacagaaggctcatctcttgccttctaggtcacttctcacaatgtcccttcagcacctgaccctatgccygccagttattcctaggttatcttagtaatgcaacaaagagtaatattaaaagctaatgattaataatgtttataataatgattgataatttttcatgatcatctctatatctaatttgtattatgactattcttattctaactattttctttattatactaaaacagtttgtgccttcagtctcttgcctcggcacctgagtaatcctccacccacacttggcccttcagtagaaccttgtcccaccatgacctgtgatcacagggacttggatgtcacctayggcagtccctgcaywccagggtccttgtggtatcaagagacaaattttcagatckttcaagctcttgccstcttcccagggctctttcctcattgtattttccatcttttctgcaatctttttaaaggaaccagattctgaaattygccaagaggcagggtcccrtagtttctcatcataggtaactttctgttggaactcctcttctgcwctcctactcttcttcctgccctgagttgtagtaatcctagtgctggctccaakagaaactcatcaatttataaagcagagtctagtttagattcatatgtggttggaaaattggacccataagcctagggttatctttcctgaagagaaaaatatggttgtgtgctgcagtgtgcagkagagttrgtgtggggggagggagggagggagggaggacacacaagcagccctggtgagaaaagmtcyrgtggcactgatgtcagtgtgagatgatgttgttctgtagctgccacaaaaataaagcatttgtcctgaggctacattaataaagatattgcctctagaatagagtggttctctatgatcattccttcaactgacatttgtttctgctaggtatatractgtttttgcatttagaaagcatcattaaagtaaaaacagaaaaatttcgggccttrtggtgyatatgttctagatgcaagcttrtccaacccgcrgctcgtgggctgcatgtggcccargacaattytgaatgtgaggacttttttgcttatctgtggtgcacctgagtcccggagtgagtgcacccacctccctcagggtcaggagtgaatgctttaggaaccctccttttcagtgacctgaaaaagatagagggcacacttactgtgataacccagagtatcagtcaagggggcttgaccttcaaggagttatgggaaagcttaataaagggtggtgtcccagggtcagaaaagatgggcagacagcaagagcactgcttgatatctatgataagcatgtaagaattgaggagccctctccctctccctctccctctccctctccctctccctctgcctctccctctccctctgccacggtctccctctccctctctttccacggtctccctctgatgccgagccgaagctggactgtactgctgccatctcggctcactgcaacctccctgcccgattctcctgcctcagcctgccgagtgcctgcgattgcaggcgcgcgccgccacgcctgactggttttcatatttttttggtggagaaggggtttcgctgtgttggccgggctggtctccagctcctaaccgcgagcgatccgccagcctcggcctcccgaggtgccaggattgcagacggagtctcgttcactcagtgctcaatggtgcccaggctggagtgcagtggcgtgatctcggctcactacaacctccacctcccagccgcctgccttggcctcccaaagtgccaagattgcagcctctgcccggccgccaccctgtctgggatgtgaggagcccctctgcctgactgcccagtctggaaagtgaggagcatctctgcctggccgccatcccatctaggaagtgaggagcgtttctgcccggccgcccatcatctgagatgtggggagtgcctctgccccgccgccccatctgggatgtgaggagcgcctctgcccggccgtgaccccgtctgggaggtgaggagcgtctctgcccggccgccctgtctgagaagtgaggagcccctccgcccggcagccaccccgtctgggaagtgaggagcgtctccgcccggcagccacccactccgggagggagttggggggtcagccccccgcccagccagcctccccgtccgggaggtgaggggcgcctctgcccggccgcccctactgggaagtgaggagcccctctgcccggccagccgccccatccgggagggaggttggggggtcagccccccgcccggccagcctccccgtccgggaggtgaggggcgcctctgcccggccgcccctactgggaagtgaggagcccctctgcccggccagccgccccgtccgggagggaggtggggggggtcagccccccgcctggccagccgctccatccgggagggaggtgggggggtcagccccccgcccagccagccaccccgtccgggaggtgaggggcacctctgcccggctgcccctactgggaagtgaggagcccctctgcccggccaccaccccgtctgggaggtgtacccaacagctcattgagaacgggccatgatgacaatggcggtttagtggaatagaaaggggggaaaggtggggaaaagattgagaaatcggatggttgccctgtctgtgtagaaagaagtagacatgggagacttttcattttgttctgtactaaggaaaattcttctgccttgggatcctgttgatctgtgaccttacccccaaccctgtgctctctgaaacatgtgctgtgtccactcagggttaaatggattaagggcggtgcaagatgtgctttgttaaacagatgcttgaaggcagcatgctcgttaagagtcatcaccactccctaatctcaagtacccagggacacaaacactgcggaaggccgcagggtcctctgcctaggaaaaccagagacctttgttcacttgtttatctgctgaccttccctccactattgtcccatgaccctgccaaatccccctctgtgagaaacacccaagaatgatcaataaaaaaaaaaaaaagaattgaggagcaagcttcayattcagaatccagtggctgaggaagtatccatatccctaagagaaagaaccttgggacaccatgactgttacatgctgggacaattccatcagcccttctgcaaaggagcctatagccatttaatcaggagatgggataagtgttaacattgggtgtgagctaacattgctgcccagattcccacagcaccattatgtccctatcacagtggggcttacagaggccagggaatwaacctggacaaattatgccccayggtggaatcactgggtccataaatcctgtcctggttatctccccattctctgtaaaaasgattctctgtaaaaagattacatcgccctaaassaggacctgagctcttggacygcggcggccatggcggctcagattacccagcgcaagtgggaggcggcccatgaggcggagcagcagasagcctacctggagggcasgtgcgtggagtggctccgcagatacctggagaacrggaaggagayactgcagcacacctgtaccagggaccacgggcgcctccctgatcgcctgtaatctcccgggctggcctcccacaaggatgggagacagatgggaccaacactagaatatcaccctccctctggtcctgagggagaagaatcctcctcagtttccagatcctgtaccagagagtgactctgaggttccacactgctctctgacacaattaagggataaaatctctgaggcaatgacgggaagacgcaattaagggataaaatctctgagggaatgacgggaacacgatccctcatttagtgatcccaagtcactaaatttgggagtagtttgttacacagcaatggataactaatgaagccctcttacatttccattattctctagaggttaactacatctgttttattttctcctattttgataatattagccacacataggtttctagtttctcaacacctattcttttctttattttagtttcttttctcctttgttccatcctttttttttcttttttcttttcttttctttttttttttttttttttttgagacaaagtctcgttctgtcgcccaggctggagtgcagtggctcgatctcggctcactgcaagctctgcctcccaggttcatgccattctcctgcctcagctttccaagtagctgggactacaggcacctgccaccatgcccggctaattttttgtatttttagtagagacagggtttcaccatgttagccaggatggtctctatctcctgacctcgtgatctgcctgcctcggcctcccaaagactgggattacaggcatgagccactgtgcctgacctcttccttccctttctccttccttctagccctccctccatctctttcttctctatttccattcaaactatcgccttccctccttctttctccctttccttcccctccccttccttcttttcttcttttgctttttcctccattcctccttctttctctctcttcctccattttttcctttttattatgaaattttcctaatatataaaataactctatgtgattgggctgtaagtaagcattttctgaatctatatgtcaaaaatataatgtcatgtatatgagaaacaagtaaacaacaggaagttattaacagagtctgaataaaaatgcctgctataattctacagccaagacagtggcttttaactcaattccttcaacacagtgttttcagaacacatcatcaacatcaagtattacacatttattgtaaaagtttaagtagccacaatcactttggaatttgtattatcattatctagtatggttaaagtccatacaacgtatcatccaaccaacccattcctaatcatccactctggggggctttcttgcctatgtgcacaggagacatgcacactaatatttatggcaaaaactggaatcagccacatatacatcaataggaaactagtgaaattgtggtataaccatatgtaagccttcagcagtaaaaatgaatgaatgacagtctcccacaccacagataactcctacacataatgtgcatcatgggaaaataaaggcagtaggaacttgctgtacaggaagcttaaaaaccagcaaaacaaactgatatttgttttggggatatatatatatacacacatacatatatatatgtgtgtgtgtatatatacacatacatatacacatatatacatatatgtgtatatatacacatatatacatatatggatacatatatgtgtatatatacacatatatacatatatggatacatatatgtgtatatatacacatatatacacatatatgtatatatatacacatatatacacatatatgtgtatatatatacttattgcacaaatctttgaagaaatacaaaggaataagtatcacaagactcagcatggagtcttctgctgagaccagctcggtcagggagatcctaacccagcggtgctagaggaattaaagacacacacacagaaatatagaggtgtgaagtgggaaatcaggggtctcacagccttcagagctgagccccaaacagagatttacccacatatttattacagtcattagcattgtttctataaatattaaattagttaaaatatcccttatgggaaacgaagggatgggccgaattaaaggaataggttgggctagttaactgcagcaggaacatgcccttaagacacagatcactcatgctattgtttgtggcttaagaatgcctttaagtggttttccaccctgggcgggccaggtgtcccttgccctcattcccgtaaacccacaaccttccagcttgggtgctagggccattatgaacatgttatggtgctgcagaaattttgtttatggccagtctcggggccagtttatgaccagattttgggggacttgctcccaacagtctccttctggaggatgactgggtagcagcccagggtagttttacagttttgtgttttacaccagtgctgggccccctggtagttacttgattataattccttaaacagagttttccaaattaaaatatacctgttttttatagaaatgaaaaagaaaagaatttcaaagttcattgcaaagattcttaacaagaactacttacattggaagaaaaccacagagaattgtaaggagctatgtgacagagaggaccaggatgccatgaaaacggccttggctacatataggtcattcgatccttggctcactggcatctctctagattttcaataatacaatgttcaatatgctgtgcaaggtaatttcatcttgcaaagattctatgttacattttaccacacatacaactgaattaaacttttacagaattggaaatgcacatcactgatcaaaataaatgaaacatgaaaagagtaggaaggaatacccagtgatggaatagcaaatatgaatggaaacagaataggactgctaaaaagaaaaaaaattcagaagcacataatagcagtgctatttagaatcatagtggtgtccaaatcacttctatcacatctcattcaataccacaacaaaagatgttaagtgtgttatagaatgcccatcggatagccagtttttgaaaataacttgtctctcaattcgagctaaccatttcgggctacagcatcaagccaaaattattggcatcatgctaagctagatgtgttaactgaagtatgagattctcatttttgtaaatgaaaagcaatcagattaggcaatttttttctgcacagcaaaagaaactatcatcaatcagagtgaacagacatgctacagaatgggagaaaaattttgccatctgttcatctgacaaaagtctagtattcagaatccacaaagaacttaagcaaatttacatgaaaaaaaacttcattaaatagtggacaaagaacatgaacagacacttctaaagaagacatacatgtggccaacaaaaatatgaaaaagaaagctcccatcactgatcattagagaaatgcaaatcaaaacgacaaatgagataccattttatgccagtcagaatggcaattattaaatagtcaagaaacaacagatgctggcaaggttgcagagaaataggaatgcttttacactgttggtggaaaagtaaatggttaatccattgtggaagacagtgacagtgtggcgattcctcaaagatttagaaccagaaataccatttgacccagcaatcccattgcagggtatatacccaaaggaatataaatcattctattataaagacatatgcatgtttacattcatggcagcactattcacaatagcaaagacatggaatcaacccaaatgcccatcaatgatggtctggataaagaaaatatggtacatatacaccatggaatattatgcagccataaaaaggaaggagatcaagtcctttgcagggatatggatgaagctggaagccattatcctcagcaaactcacacaggaacagaaaaccaaacaccacatgttctcatatataactgggaactgagcaatgagaacacatggacacagggagaggaacaacacacactggggcctgttgggggagggtggtgatgggaggatcattagcaaaaatagctaatgcatgccagggttaatacctaggtgatgagttgacaggtgcagcaaaccaacatggcacacatttatgtaacaaacctgcacatcctacacacatgtaccctggaacttaaaaaaaaattaaattaaaagacaagcttaaagagttaatgaaaactaattagatacaagaagactttgattttcagaaacctgaaacaatagttataattttgcttttaacatatattcaaatcctttgatactgttcctttctagaggtgcagcttaattccctctcttgagtgtggcttggacttaatgaggcacttctgaaatggcctggttctgtgctcccacccaaatctcatcttgaattgttatgcaaattgtaatccctacctattgggggagggacctcatgggaggtgattggataatgggggcggtgcccccatgctgttctcctgatgctgagggaattctcatgagatctgatggttttataaggggcttttccctgcttcattgtgcatttctctctcctgtcaccacgtgaagaaggacgggtttgcttccacttctgccatgactgtaagtttcctggggcagccgcctcagtcatgcagaactgtgagtcaattaaacctctttcctttataaattacccagtctcaggtatttctttatggcagtgtgagaatggactaatacttctaacttatagaatagtgccaacataacagtttgtgactctgggtgtagaacataaaactaactgcggcttccaccttctctctctctctgaatctgggatcatgagctctgggggaagccagccactgtgccataagcagccctgcaggaaggtccacatgactgagaactgaggccttctgggaacagacaacaaggaaccaggccttttccaacagccatgtgactgatccatgtttcttgtgaattcccagccccagagaagccctcagatgctgcagcccctggctgacaactggagtgcaaccttgtgagcggccctgagcaggaagcactcagggaaacctctcctggattcctgacgattggaaactgtgggagatgagaaacatttgttgtttcgagctaagttttacgtaatttgttatgcaacagtaaataatatattttcacaagagaggatgtattattacacatcaaattgcatttgctctaaatgtgtcatcatcatcattattatttttgagacagggtcttgctctgtcacccaggctggaatgcagtggcatgatcaccatgcactgcagtgtcgaactcctggggtcaagggactctctgacctcagcctcctgagtagctgcgactaccatcatgaactaccatgcctggctaattttctaattttttgtatagatggaggttttgcccaggctgatcttgaacttctggagtcaacaaatctccattcctctgccttccacagtgctaggatgacagacgtgagccaccacacctggcctaaattaattataagatattaaacatgtaacttagttttaaaaagtaaggacaatttccatggctgaagaggatgtattttatgaccattcacaatgatcacgttacttgaacttcactttccaactgtgtcccaattaaacacaaaaggaagatccaacccttgctaggctgattctatgatggcctcaacaagcagctcctggtcagtcaccttcctccagttattcaaccaactctaatgtaggtgctgctgtgaagggatttagcagatataattaagggtctcaattagttgactttatgctgggtttatcctgcttggactgtcctaatcaggtgagcccttgaaaggactgggttcttcatgagcacagagacttacagtgtgagagggactcagcatgaggggttt

SEQ ID NO: 5742 - DNA, 12600 bp, Homo sapiens
ggaggctggccgggcggggggctgaccccccaacctccctcccggatggggcggctggccgggcagaggggctcctcacttcccagtaggggcggccgggcagaggcgcccctcacctcccggacggggaggctggctgggcggggggctgaccccccaactccctcccggagtgggtggctgccgggcggagacgctcctcacttcccagacggggtggctgccgggcggaggggctcctcacttctcagacagggcggccgggcagagacgctcctcacctcccagacggggtcacggccgggcagaggcgctcctcacatcccagatggggcggcggggcagaggcactccccacatctcagatgatgggcggccgggcagaaacgctcctcacttcctagatgggatggcggccaggcagagatgctcctcactttccagactgggcagtcaggcagaggggctcctcacatcccagacagggtggcggccgggcagaggctgcaatcttggcactttgggaggccaaggcaggcggctgggaggtggaggttgtagtgagccgagatcacgccactgcactccagcctgggcaccattgagcactgagtgaacgagactccgtctgcaatcctggcacctcgggaggccgaggctggcggatcgctcgcggttaggagctggagaccagcccggccaacacagcgaaaccccttctccaccaaaaaaatatgaaaaccagtcaggcgtggcggcgcgcgcctgcaatcgcaggcactcggcaggctgaggcaggagaatcgggcagggaggttgcagtgagccgagatggcagcagtacagtccagcttcggctcggcatcagagggagaccgtggaaagagagggagagggagaccgtggcagagggagagggagaggcagagggagagggagagggagagggagagggagagggagagggctcctcaattcttacatgcttatcatagatatcaagcagtgctcttgctgtctgcccatcttttctgaccctgggacaccaccctttattaagctttcccataactccttgaaggtcaagcccccttgactgatactctgggttatcacagtaagtgtgccctctatctttttcaggtcactgaaaaggagggttcctaaagcattcactcctgaccctgagggaggtgggtgcactcactccgggactcaggtgcaccacagataagcaaaaaagtcctcacattcaaaattgtcctgggccacatgcagcccacgagccgcgggttggacaagcttgcatctagaacatatgcaccacaaggcccgaaatttttctgtttttactttaatgatgctttctaaatgcaaaaacagttatatacctagcagaaacaaatgtcagttgaaggaatgatcatagagaaccactctattctagaggcaatatctttattaatgtagcctcaggacaaatgctttatttttgtggcagctacagaacaacatcatctcacactgacatcagtgccactggagcttttctcaccagggctgcttgtgtgtcctccctccctccctccctccccccacaccaactctcctgcacactgcagcacacaaccatatttttctcttcaggaaagataaccctaggcttatgggtccaattttccaaccacatatgaatctaaactagactctgctttataaattgatgagtttctattggagccagcactaggattactacaactcagggcaggaagaagagtaggagtgcagaagaggagttccaacagaaagttacctatgatgagaaactatgggaccctgcctcttggcaaatttcagaatctggttcctttaaaaagattgcagaaaagatggaaaatacaatgaggaaagagccctgggaagagggcaagagcttgaaagatctgaaaatttgtctcttgataccacaaggaccctggtatgcagggactgccataggtgacatccaagtccctgtgatcacaggtcatggtgggacaaggttctactgaagggccaagtgtgggtggaggattactcaggtgccgaggcaagagactgaaggcacaaactgttttagtataataaagaaaatagttagaataagaatagtcataatacaaattagatatagagatgatcatgaaaaattatcaatcattattataaacattattaatcattagcttttaatattactctttgttgcattactaagataacctaggaataactggcgggcatagggtcaggtgctgaagggacattgtgagaagtgacctagaaggcaagagatgagccttctgtcacgcccgcataagggccgcttgagggatccttggtcaagtggcaatgccaatgtctgggaaggcacctgttacttagcagaccatgaaagggagtctccctttcttggaggagtcggggaacactctgctccaccagcttcttgtagaaggctggatattatccagagctacccgcagtcatccagaggcctaaacccctccctgtggtgctgtgcttcagtggtcatgctccttgtccactttcatgctcctcctgtactcctggttcctctttgaatttcgtagtagataatggtagaagaaatagtgaaagtcttaaagtctttgatcttaagtgcagaaaagaaaatggtgacatatgctacctaaaagggaagggccccctatcctgtaatcacgtgacttgcttcaccttgtcaatcagttagaagattcaccttccttaccctgccccttgtcttgtatgcaataaatatcagcgagcccagctgttcggggccactaccggtctccgcatcttgatggtagtggtcccccgggcccagctgttttctctttatctctttgtcttgtgcttttatttattacaatctctcatctccgcacacggggagaaaacccgctaagccccgtagggctggatcatacagccaaggacaacggagcagcaaagatgacccagctgagcagtgaccacataaagcgcacggtggcctgagcacccactgggcacagccccatctactctcctctcatgcaacaaatcagcataagaaacatgtggactctggaaggttctcatgtcttccatttattttgtctctcaaattttaggaatcttctcctttaattaacccatcaacctctcatggcaagaatttgaaaaagtaaatttatactcagattctaattttaatagggaagtaagaagttacagctcagtgcacataaagttgagacagagatggagacatctcagcctcacctctatggagcaggaatgattaattattggagacggaacacaggtcagcatgagggaagagggtcatggtggacatgggggtgggttggtctccccacctcctcatattatgcctacaggaacacaggcacattcaggtgcctttgcagaaagagagtcagggtttttgaagtcacaaagggaaggcgtgaacaaatcttgcctctcagtcccacacaaggcagctgtctcacactataaaataaaatattcatgaacaaattcatatccgtcacagtgagggatgacactttaaacagcccatcacatgttcaatacatccaattcaaagaaaccccatagcacagctgcatccactattgcccccaacaccccccacacatcaggtcccccagcgtctcacctttacaagccgtgagagacacatcagaaccctgcgcatggtcgctgcctggggtagaacaaaaacaggacttggtcagagcccagaggagatgcggctagaggaggaatctggggttgggtgagctcccccatgggctcccgaccacaatatcccaaggatctcagggatcagcccacttcatacttacttgcagcttcagagtagctcactctatctgtgggaagaaaatgtcctatgagaggccagaaaggagtcagggccatacggccctaaacaaaccccctagcctttgatcccagagaagtttcctgaaagtgtaactgctgatctaggacaggatcaggaaacatgaggaaagcaggtgtgggtcctggaccaactgccctcctgaggtctgtcctcagcagggaccttcccctgtgacttgtgactgctgggatcaggtccccatcatcataatcatcaaggtgataaatctgtccttcattgtcacaggtgctttacaaaagagtaagtgctggcacacagggcccaggctgggtaggcccatgagtgtggatggtgcttcccagtaaccaggcaggacacacttctaactggggcttgaaaccctcagtgggacaagaaatctcagaccccactcctcatccattccttacctgagttcttcttcctgcacatcacagcagaaaccacagctccagtgactacagctccaaggagaaccaggccagcaacgatacccacgatggggatggtgggctgagaagactgctctgggaaaaaaggggaaggtgagcgtccctgaccctcagcccccagcaccgaccctgctgaagttctccagagaggctcctgctttccctaagagacatgaccccccctccactcatctcctgcctaactccatctcagggtgaggggcttgggcaacccctcatgctgcacatggcacatgtatctctgttcctctccagaaggcaccaccacagctgcccacttctggaagtttccatcccctgcaggcctggtctctacaagctccatgtcccgagtctggtcctctccatcctgctgccaggtcagtgtgatctccacagggtagaagcccagggcccagcacctcagggtggccttatagtcagagatggaatggtggatcatatgtgtcttggtgggggggtctaacaggaagagtcagaaaattcaggcactttgcatctctcatgagacactccagcagcacgcatgtggccatcctgagaatggacaggacacctggggtggggaagggagcacagaacccagacgccaacctggacacaggtacctgggataatctcctatccgtggaaaattctagtccctgaggagggaacagtgtcttctggtcctgacctgagtggaggctgagggactcagaagagctggactcagacccccacacacattgagtgtaaagcagagagcaaggcctgagaggaaaagtaacggggcccaaggctgctgccagtgtcaaagggaacccctcatcagtattccagggattgtcttcccttcatttcctcagagatttcatcccttaattgtatcagagagcagggcagaccctcagagtcactctcttgtacaggatctggaaacccaggaggattcctctccctcaggaccagagagaggacgacattctagtgttggtcccattttccttctctctttgtgggaagccagcccaggagatctacaggcgatcagggagacgtcttgtgttccctggtacccgtgagctgcagcatctccttcccgttctccaggtgtctgcgagcctctccacgcacgtgccctccaggtaggccctgatctgctctgcaaattcttctgcctcccacttgcgcttggtgatctgagccgccatgtccgccgcggtccaggagcgcaggtcctagttccgggctatgtaatccttgccatcgttggcgtgctgttcatacccgcggaggaggcgcccttccagccccaagtcgcagccatacattatctggagggtgttagaccctggccccgcccccgctgtcagccccgcccaccgagccccgcccccgccccgaccaacccgcggggattttggcctaaacggaaaatgaaacctggtaaaggcgcctgggcctctcccgggtcgaggatctggcgggtcccgcagcctcggggtggatctcggagccggagactcgcgggggggacccgggacgtccgtgggggatgaggaggggtcgtgaccttcgccccaggccggggtcattcaccggcctagctctggtggtagtagcggcgcggcatgggcaggttcactcttgtcagtctgtgcgcgggcctgatgttcsgtgtgctccggtcccaatactccggtccmtcctgctccaaccackgcgmctgcggctacatcctcggagtcgccgcgtcgctgtcgaaccgcacgaactgcgtgtcgtccacgtagcccactgcgatgtaccggggctccccgcgacccggccgggacacggcggtgctgaamtaccttatggagtgggwacctgggggcgaggaggggctgagacccrtccgaccctcctccttgmgckgctccccgggtcctgcgccccagtgcgcgggcccctasctcctccccgcagaggycatttccctccggatcccgcactcacccgcccaggtctcggtcagggccagggcccccaagagcrgcaggaggagggttygggwcgccatraccccatcctcggcgtmtggggagaatctgartcccartgggttcgcggggacttctggaacagggaccccagcgacgccgattggcttcgctagaaacccgacaccaaatgggggtgagaactgagtccacatcctgagtgtccaggaagaaggaccctacataagttgggagagggagaagagaaactgcggagatggggaatccccaaccctgggcctccccaatcaatacatcgccttcggggcctgaaaccctgagagccacgcctggggccataggacttcgccctgaccccgctcctcctgtgccaagcgctctgtctcaatgtctccctgagtcttggcccaagagctgtctgagaaaccagggagaaaccctcgtcatgggccccgtccctcttcatttttcatcccggaatccccgtcccagaactggactccctgcctcccactccttacctatttccctgaactcttctagaaaaaaactcaccccagggagcttggtgacagagagggagctcgccgccagagaggcagagctcgccctgggaatggaggcgtagagacaggtttttgttttttttttctttaaatccggaaaagttgtgcctgagtacatgagacagcatagagacaagttttctctttgtttattaactacagtgggtagcagaatcttggcaacccctaaatgatcaggaatctaatcggtaaaaaatgtaactttggccccttgatatataaatgtgtctgaaagcattacaacaggactcacaaagctactaagtttgactttcgcagacaatgtatctgtgactcccgcttgttttttacatttaccttcattccacagccctgagttactgggtgagtccaagacatctcctcaatataaagtagcacactgcgttactatatgttgcaaccgggagccagtacagactttattcacctcacagttgcaagtgttcaatgcagtcacaatgcccctcagcagtgctcatgtgctgcctgtttttaggaagtattcacgtctaagtggtgtgtatatcttataggaacacttagtatttttaaaacctgattaattaaaaaaaattagtttctaggcagtcccaaatatagtattaaaggccaactgcaaagaaggaacactaagtattttttaaaccttattaacataaaaaacattagtttttaggcagtcctacattaggtattaaaggccaactgcaaagaacactgagcgaggctctgtagatggatgtaataaaaatctataaaacaatgtgtttaaacctaagaattctactgctttccaattccttccctctgctccttttcctaacctcctgcttctccagcccttccctctgtccctttcatccctcaggccctcctctccccttagtccccaccaccctgtcacttctaaattgtggctctagcattgtcccattacctgctacgtgactgttctctccacagtggtcctgctcctgtgagtcagagtgtgtcatttcctcacctaaaacactccagtggctccacctcggtcttgtgaagcttctagaatgtcaggcacgtgagcatatgagggcatacctggttcatcttaggcactaaattaatttttgttgactgaatgaatgaaatatgaatgtattaaattgcatcacagaaagttataaaatgtaaaacactgaaaaattaagaaatattttatcttatgtaactagtgtgcatatcaattcatccgagtctgttgagcctgtgtatgaattttataagattgcataacaaattatcacaaacattgactttaaacaacacccaattattgttgatttatttgtttttagagacagagtctccctctgtcatccagggtgaagtgcagtcacatgatcatggctcactgcagcctcaaactcctgggctcaagggatcttcctgcctcagtcttcagagtagctaggactgcaggcaagtgccaccactcccagctaattaaaaagaaattgtagagatgagtgtctcactgtttgatcttggctggtctcaaactcctggatgcaagtgatcctcctgtgtcaactcctcagatgttaggattgcaggtgtgcattaccacgcctggccaaacaacacccatttatctgtttatagtaccttagtcagaaatctgggcatgatgtggatggaatctctgttccgggcttcccaaagctgtgttttcattttgaatcctccttcaggcttatacagaggtggcagaatgcagtttcttgcagttgtaagactgaggtccgcgttccttgctggctgtcaatgtagagaacagggagggctgcgctcaattcctgatgcccaccagcgttcttccctgtacagccccttcattttcaaagcccacagtggaggaaacccctcatgctgaatccctctcacactgtgaatctctatgctcaggaagaacccagtcctttcaaggactcacctgattaggacagtccaagcagcataaacccagcctaaagtcaactaattgaggcccttaattatatctgctaaatcccttcacagcagcacctatattagagttggttgaataatggggggaaggtgaatgaccaggagcttgttgttgaggccatcatagaatcagcctagcaagggctggatcttctttttgtgttcacttgggacacagttgcaaattgaagttcaagtaaagtaatcattgtgaacggtaataaaatacatccttttcagccacgaaaattctccttaccttttaaaactaagttacatatttatatcttttaattaatttaggccagatttggtggctcgcacctgcaatcctagcattgtggaaggcagaggaaggcagatttgttgactccagaagttcaagatcagcctgggcaacatggggaaacccccatctctacaaaaaattagaaaattagccaggcatggtggttcatgattgtactcccagctactcaagaggctgaggtcagagggtcccttgagcccaggaggtctacactgcagtgcatggtgatcatgccactgcactccagcctgggtgacagagtgagaccctgtctcaaaaataataataatgatgatgataaatttagagcaaatgcaaattaacatgtaataatacatcctgtcttgtgaaaatgtattagttatttactattgcataacaaattatgtaaaatgtaccatttcaaaacaacaaatattgatcatctcccacagtttccaattgtcaggaatccaggagaagtttccctgagtgcttcttgctaagggcctctcacaaggttgcagtccagttgtcagtctaggcctgcatcatctgagggcttcactggggctgaggattcacatgaaacatggatcagtcacatggctgttggaaaaggcctagttcgttgtaattgagtcccagaaggcctcagttcttagccagatggaccttcctgcagggctgctcatggcacagcagctgactttccccagagctcatgatcccagagacagagagagagaaggtggaagccacagggagttttaggttctacacccagagtcacaagctgttacgtcggcattgctctatcagttagaagttgtattagtctgttctcacactgctataaagaaatacctgagactgggtaatttataaaggaaagaggtttaactgactcccagttctgcatggctgaggaggccgccccaggaaacttacaatcatggcagaagtggaagaaaacctgtccttcttcacatggtggcaggagagagaaatgcagagggaagcggggaaaagccccttataaaaccatcagatctcatgagaattcactcactatcattagaacagcatgatccaatcacctcccatgaggtccctccttcaatactggggattacaattcgcatgacaattgaagatgagatttgggtgggaacacagaaccaggccatatcagaagtgcatcattaagtccaagccacactcaagagagggaattaagctgcacctctggaagggagcagtattaaaggatttgcatatatgttaaaagcaaaattcaaactattatttcaggatttttaagttaaaggcttttaatctaattatttttccttaacattttaatcttgtcctttaatttaatttagtttaattttaagttccagggtacatatgcaggatgtgcaggtttgttacacaggtaaacgggttccacggcagtttgctgcaccaatcaacccataacctaggtattaacccctgcatgcattagccatttttcctaatgctccccccaccaccgccctcccccaacaggccccagtgtgtgttgttcctctccctgtgtccatgtgttctcattgttcagctcacaattataagtgagaacatgcggtgtttggttttctgttcctgtgttagtttgctgaggataatggcttccagcttcatccatatccctgcaaaggatttgatctcattcctttttatggctgcataatattccatggcatatatgtatcatattttctttatctagtccctcattggtgggcatttgggttgattccatgtctttgctgttgtgaattgtgctgcaatgaacaaacacatgcacatatctttataatagaatgatttatattcctttgggtatataccctgcaatgggattgctgggtcaaatggtatttctggttctaaatctttgaggaatcaccacactgccttcctcattggttgaaccaatttacatttccaccaacagtgtaaaagcattcctatttctttacaacctcgccagaatctgttgtttcttaactttttaataattgccattctgactggcatgagatggtatcttattgtggttttgatttgcatttctctaacgatcagtgatattgagctttttaaaatatgttttttggccacctgtatgtcttcttttgagaagtgtctgttcatgtgctttgtccacttcttaatgaagttgtttttttcatgtaaatttgcttaagttctttttagattatgaatattagacctttgtcagatcaatagattgcataaattttctcccattctgtaggttgtctccttttcgctctgatgatagtttcttttcctgtgcagaagctcttttgtttaattagatcccatttgtcaatttttgcttctgtggcagttgcttttggcaatttcatcataaaatctttgcccatgcctatgtcctgaatggtattgcctagattttctttcagggtttttctagttttgggttttacatttaagtctttaatccatcttgagttaatttttgtgtaaggtgtaaagaaggggtccagtttcaattttctgcatatggctagccagttttcccagcaccatttattaaatagcgtttcctttccccattgcttgtttttgtcaggtttgttgaagatcacatggttgtagatgtgaggtcttatttctgagttttctattctgttctgttggtctatatgcttgtttttctaccagtaccatgctgttttggttactttagccttatagtatagttttaagtaggatagcctgatgcctccagctttattctttttgcttagcattctcctggctacacaacctcttttttggatccatatgaattttcaaatttttttttctaattctgtgataagcttctctttttaaattaatgattaaatgtttgagacatgacagagccttgggtgctgcagggaaaacagtttgagacagagaaaggagaaacaacagtatctctgcgtttctcttgtaaatacctttaataacaatgttcttcaataagttaacacagttgagaacatagagtaactagatcaaatagttccaagacttcagtgccataagaatgatgccttgaaaataagtctttgttttgtctaagatgtctcaaatttagtggaagtatgccccaagtgccaattttcttattgacatatcatcttcagaaaacatttgcctacacttaaaa

SEQ ID NO: 5743 - DNA, 13761 bp, Homo sapiens
gaagttgtcaatgatatgagctgatttaatatcctattggatatccagtatgtttagtatagtcttaagactatactatagaggtcaggggagttacaatagccctgagacaaatgataaatcaatgttttgaggatcccacatgaatgtgaatcactccatatccactttctaattggagtggaaagaaatgcagtcaccaaatccacagctgcatgctctgtgtccaagggtttattaatctgctctaccagtgatatccagacagcacaaaagctgcaattataactcctacttggccagacctggagtaatctagttcattctttaggcttcatcaggcttcttcagggacaggttgctggattacgtagagacaatagacagccccaacaccatcccacatccttcagctctgtaatggtgatgtgatccccacaatacttgaagtatcttacacaagacccaccctgggacacactatgatttttgatttggccaggatgggggcagtgtcagaggtttccctttggctttcagcacaatgaaagtccttactccacagactagggacccagggtgggggtaactccacttagcagtgcatcagtgtcaattatgcactcagggtataggaagataaccagggctgggtctatggatccagtagttccattgtgggccataatgtgtccaggtttactccctgagctccataagccccactgtgatgagagacatgatagtgctgtgggcatctgagcatcaatgtcagttcacacccagtgtcaataatccccccagttctgcctgtttcctttccccagtgtacaatctcctgagtaaatggctatatggtcctttgccgaaggactgagggaattgtcccagcatatacttccacggggttgcagagtattccgcctagagatatggactcttcctctgtcactgagatctgaatctgcatcttggctgaggtctaggcattgaggatgggatcatgattttgtattgagtcaaacaccttcaccctcctgcttctcaattcttgctttcttatcatagatatcaaccagctgcctgtcctaaccctgggacaccaccctctattatacttccccacattccctgcagcttgagtcctcttggcttctcctccgaggttgccatagtaaccgtgccctctggcttttgcaagtcactgccaccacttggtctttgtctcttcagggccacactctccccagtgatattagaaatgaaactctgggactatctttactaccatcacccccagcctacaaaggacaataccctgacacttcttagtgatgcaggtccctctcaccatcaagttcctgaggctctggtggaaggtgtgtcctctgggccctcttgtagagcatggttttggtaggccttcaccaagcccactcccctcagcttgttattccatcctctacatgttccagggcaactaagacatgtctaccttgttgagagttgggcatgtttttttctagactatgtggatacaccccagcagtgggtttactccacttatcaaagtcctggagtgtttgataaatccatgccctgagaaagtgtcttcaagccaaaggattatattcatccagcctgaaattctggttccttgatcaaacaccctcaaattccaatcccagaagtagtccctgggctcctatggggacgtgctggctagttcctgcaaacctcctgagtgggattcccgcggcatcataggggtgaggattgtgtagcatcttccagcagtgaaagtgggaaccattactagagaagggtgagcctcctctgcatgcccagaagatcctggagggcacgcatcgcataatcctgttccagtttgcagaatctcaggtttccccaccaaagccctgactttcctgtaacaggcctgccttggctgagtgtcaaacatctctggagcactgtggccctcatagtgatgtagagctaacattccttgctatctgcccttttgctacaggagataaagacctgtccatgagacactgccgagggtgtcaaatgtagccagtcatagctgtcaacaatccgcagattctcattatctttttacacagcatcgatgcagctgagaagtaactagccaaagccactgtctttgtaggtttcttccaaccctgtccttattatgcagggcattctatcactgcatgtgccatagcactccctaaccaaggcaacttctcagctcagcactggtgagacccccagctgctcagctgcaccttgtgccatggactttctgtgtctgccaccaacccgggtggcatcctcttggcctgccaggcagtgggaagcttatttcaaattcccatttttgcctgttttcatggatcacccttcatgccacttgtgttagttagggtcccctgagaagcggaccccaatacagtagtaaacatgtaaggatttattaggggaaatacttgtgagagaaattcatgagacagaaaatgctgggaaagccactggaccacaaagcaactctgagcctcagtgatgtagagagtgcaggaaggtcagctggaagcatcctagaccctgtgcaggctaagggaagttcagtaagggtggcagggagccctggagcttcagtcagccttcagaagaggaatgtcctgccttagtttctgccctactttcctcaatcattggctggaaaaagccaggggtgggcatagtctcagagcaaatgtggcaatagatttcagacttcaagagctggggccatcatcaattctgcttcttctagatgaggggctgggatgtgcattctcatgactgccacaatgatccagtggggagagaggaaaaaggttgacgataaagataaaaatggtattaattgatgaactgacacctttaagtagatgataagggatggcaattggggcaccagaagagggtctggctctggctgggagcagaagggttaacccacaacagtccctcacatggtaaaacgcctgacatgtggtgcagctgcaaatgcatgagcagacagtggtggaatctgtgaagttgtcttctaatgtgttcagttttctcagtgaagtgggaagcaaggtcatcagctgaagtaagaatggggaaggcaggttggatgtgtgagcacaaagaaaaagtgtgtaagagtcacccaggccaggaggaggctgagggtgagccatgcagggagagggtgattgctggccatggtagggacttcctatgtggtttggaatcctaaattttaagagaccagtcagcgtactgtgtgctgctctccagcctcctgcagctcatgggggcaggctcagcataggcagaggtggaacccaccagctgtgtagttttgccaggtgagtgtgacaattcaagggagagggaagggagggatggaaattatttaccatagaattcaaaatgggtgaggagggaggacaggacacccagggtgagggacagtgagtagatggcaggatcactggattgggaatcccaggagggtggaacgattgttggaattgatgtactacagggtagactccaagcgtggaaagcaagcacatatgcaatgagtggtccactgatattacatcacagcatatgataaaatgatagtatctgtgtcctcagagcctgtggccaccttgcaaggggatgagtggaaagatggtcagagagtgggaagtgtgagatagagagtatggaagggctggggttcttagccatgatgaggcctaggggataacaagggcatgagattcaggcagacaggagaagatcatggaggagaggagttccaggatctgagaggccaggaagcgagggcatcttctctgctgtgtgggtgtctattgctgccataaaaattaccacaaaccaaatggctttaaacagcacctatgtatcatggcacagtcgtgtggattgcaagtccacccagtctcatggggctaagatcaacatacgggaaggtctgcattcctttccatagactctggggaagaatccacttccaagctcattcaggttcttgcctgaattcacttccttgcagatagaaaagaggtttccacttccttgttaagagccacccttagctcctagagccttctctcagatactcacacacggtgcctaaggcacattcaatcctcctgcttggaacttctgacctcccctctccagcttctcctctgccttcctcctctgcagaatctgactccaaccagggcaggctctctgcttttaatggctcttgtgatttgattgggcccacacagagagtccagcagaatctccctattttaaggtccttaatcttcattacatgagtaatatcccttttgccacgcaatgcaacctgttcacaggttccaacgattaagactggacatctttggggaccattactcagcccaccacatctgcgtatgttgaagtcaccaagagtcaaggagacagcaatgctggagagggtgacagtgaaccaggagctacaagactcaggattgagaagaacagcctggggcccacagggaatggttacagtgaggcaaatggggctctaatctgatgacagcctaggggttttagggaggagggaggcagaaagttctgagaaccacaatgaggagcaaggaccccacctcacctctgaacccaggggtacaagtccctggggaaactcccccatgtgggaggacttcggagggggtcatgtcctcagggagacccaggttgctgctggagctgcgagatgcaggaacatcctgagagaggctgaggaggttttgctgatgtggactgagaaatccagggggtgcactgggaagatttctgtggctggggaggtcggggagacagaatagaggtgtgcagagccttgtggggatgcaagtgcagagtatgtgggggacccagtgtgactgacacaaacagggacagagcatgatgagctcagtccaggtgcactccaggccgacgatggtgctgagcctgtgggagatgcgggaggaggagcaggggtggctttcacctgggctctgtccatggaggtgaggacagtgaggtggttgggtcttagtgctgtggggaacttttcttgacctcctgatgactggatggagtgtctgagggaggaagggtcttacaggattgactcatgaccctgagggatgtgctcactccaggtctcaggtctgtcctgacacctttatttgtggcttagagctccctactgtaaattattgggagttagttcattttggagtttataacttaaagcagaaattcagatggttgaaatgtcattttcatgaaggtttgttattagtgtatcatttagattgttttgcaaaagtctcattttttttctaaagggttgccaatcttgttttaaatttacaaaggttgttaatttatcttcactgttaattggttgtgggttgtttaaacttatactgtgtagttttacatatctgtaacagcagtagtttgggcctcttatattctaataattaagactttcagctgagtacacactgtaattcaagcacgagtcatgcataaccctagcactaagagacaagaggggaatccctctctctgaaaattttgcaaaattctgggttctttttccactgagtgggcacaagtcggctaatcatgaacatgaggtatttgtcctcatttaaaggtgcttcagaagcactgacccctaggaaggcctccttgtctgggtcaggcaccctacaccatggcagaggccatcttccctcccagtgtacagtgatatcccagatagcttactggttagctgctgtccactcttgggcagttttgtcttctaaaacatgggtttttatctgagaatcttcctgttcccagatgatcaaaactggggccatccattccattctgagccacttctgcccaggggcccatkgctatttcctccagtcacaacagaacaccccttcagaacagcctgcaggaaggcmccgtctcctcacaggctcacacatgcacggtgtgtgcacagagcttttgctctagttcaggaggtgtgtrgggagcctcactagtccaacagagcytggtaccagtgtcatatgccaggaaccaaggttataagggatacmatgtccccagacctaccagagaargcaaactcatacagcttgcaggaccagacaaggacaagaaacaagttcaaaagagggaaagggaaaytacagacrtacctcagagatactgcagatttggtttcagaccatggyaacaaacaagyyacacaaatttttgtttttccagtacatataaaagttatattcacactctactgtagcctaktaagtrtacaatagcattatgtatgaaagaactatgtacataccttaatttaaaattactctattgctaaaaaatgctaacggtcgtctgaggcttcagctaattttaatctttttgctggrsagggtcttgcctcaatgttgatgactrccrgctgttcaagagggtggttgctaaaggctgctgtggcaatttcttaaaataagacaatgaagtttatggcatggattataaagggggaatcagtacttaagtaaggtcaatatgagttttcaagtcaggtggacttgaatatgaaccctccaggcctttccaccaactagctatarakccttgggcacatctggcccagagctggccccgacrgacacttkcccagtgggtgagtgctcaatgaacccatctgagccaattgtctcatccaaccagtgatataattccttccttgcagaagaataagtgagaaaagacacagtgccaagaaattcagacacaagacctgcggaagtctgygccagtgctctaaagcaagttctgcctaaagcggcagaaacatttttcacattaggaacaggagttgtttgggatcctgtctggggccaggttgagagcagagtgggagtgggggcctgggcaggaccaggcactggagtgaagacaggcctggagagagctgactcctggaggctgctgagcggctcagacagctccttgcctcacctgccacagtcctccctctcccctggcctccaagtacccgggagtgcgagcctgggccccgggaaccggcaccttgagrgcdggagagggaccccgcccgctccctgtctccctgacgcgctctctccgcctccccgcgggdacccagcctcccgggctccctcctgcctaccgcccggccctggagccgcttacctgggagcttcttacggtgtagggggagctggggaggggacagagggacagggaccacgggagggtggcgtggggcggcgtacttggagatatgacctgaggagtctgcagacccbagaccggggcagaagmgccgtgggaggagctgctgagctctccaggccgccctttacctcctgcctccccagcccagttcatcttgatcctctcctcactagcccagktctccccaaggtcagggctcatagagcagcaggagttgggttccgggacgcgggatccggcttctctgggaatcttggattccaggaaggatcctggagatctcccactttatgaagcccaatctccastcactstgatggcgtctttagaccccactggaaaccagatacgacgccctcatcggccctggggaaaaaacaagagcaaagtatgagaggtggccatgaggtcagggaaactcctgcagaattctcaggaaaggaaactcttccgagctgggcccttggcttagtttgtcttccctgcccagccacctgtcccagagctggagacgcccaggtttaagccagagactttggatactttccttgatggtgacataatttttgtcttcttctctcctggaagagaagccccagaaccatcagagtgatccagtctgcccactcttcttattattctgtctctccaatcactctccctgagctggactctccacccaccctcacattctggatagtgcagagatgtgagcatggccctggggcaggattgtctgcgtgcaagcccagctccaccacgacttgtaggcgaccttctttcctattgtatcacctgaaaacggaaaattagcaggcacaccccatagttgtatagtgacaattaaatgaattcatattttgaaagtgctaaggacacagattaacacatagcaccatgacagtgtatgatattatcgctgttggttttttttttttttttttttagatggagttttgctctcgttgcccatgctggagtgcagtggcaccatctcggctcactgcaacctccacctcctgagttcaagcgattctcctgcctcagcctccagagtagctgagattacaggcgcccgctactacgcccagctaattttttgtatttttagtagaaacggagtttccccatgttgggcagtctggtcttgaactcctgacctcaggtgatccaccctcttcggcctcccaaagtgctgggattacaggtgtgagccaccatgccccgccgttgttgctatttctttcatcctttttgcttgagcctcttctcttctttctaggttcccagggaaattctctgttggaagattatgcctgcaagaggcctccacctgggaaatgctggcccatggggggatctcccttttattaaatggaatgattgttggtgaagtgacagctagtgagccagtgacagtacggttcatgtaaaaaagaccacatacctaggattacctccattttaataaagacacatcccacacattataagtccaatgtgatttgtgaggagattgctttgatttgctcacgaaaaatattactctactttctttgagagagttttgcaacacatttcaaatctctgcttctcatttcacactatctggctcatgagtgaaggtgataagtgtcgtactatgctctcaggtttgtctgtcagagtcatagtcatgtattacacataaagattattttcttgttatcatttatttatatatattatactcatgggatatagatagatattattacagtgcttaaatggctactactgatatctatacattttctctcttggtatatgatattaacacatagaattgtatactgttactttggtttccagcaattgctgattaggtcatttggaccacttctcccattgagtacaactggaaaaatgggaggaaaatacatatttgaaaagtctggttgaatttatagatgggctagcaaagcagtgaagatttgcttggccaggaaccaggaagaggcagaaatccagaagagcatcttgagctatggggctgcttttttggatcagatgcagtgacacctgcctcccaggcaagaagccaacttctgggattcagaactaaagtgtcccaatatttagaaggtctcttggtctctctagagttcagtgctcattggccagggctatgatactcacactcattccttggaggagccaagcttcgggtttggctgcctctgggacatttcatgctagaaaaaccccaacatgtgtagataaatggtatagaggacaccagccacccttcgatggagctctgcccagtagtgtcccctcacttccactcagagacaacatgcccatttcactaaattcatgaggacatggccaacataagtaagagaacaccgggaggtaccttggacagagttccatgcagtcacagcttttgcgtctctgtgtcttttcccttcatctcaaccagagagcatttgccgaggccgaagaacaaaaaacttcaaatattggagcggaatctaagaccactgatccattgtgatcaggaggctggagccatgtggtccaggaataatgaagtctgtgaggccttggtcaccccaaggctctctcccattaggagctgcctctcactgctatcagggaggacccaggagctggacatggctttttttttttttttttttcatttctgatgagaacctggagaggtcccagagcatatagaccttgattgaaatggggccagagtggagtcaggcaaaaaactctaatgactcagaggcacctaagtataaaataaaatctcaactcagagcttccatcagagcatcaggctcagtatctcctgtgtttgcactgtgagtactggagcttgatgagaagaaaaatagctacatgtgcagaaaaacatatgtagttagaaagctgggtcatggttcaaggtaagagggacccttgtcttttccgtggtagatagtggggctttctgccatcttagttctgatggaccaagtgcagaagataaactttcctgctttcagcttagtgactggtaatagaagctggagttaagagaatcagtggcagcctctctctccatgccccagcccagtaaatctaagccaggacttggggctctggcactttcttctcactgtgcgtcctccttctctggctcaaaagagaaccacatgtaacagaaaccaagggctacaattctcatagaacccagaaaactggactaggggcctagagagtcatgtgcctgccattgttccaccgcttacgtgctgtgtgacctcaggagaagctctctgctctttgaatcatctgtgaatcatggacaaacacctccatgctagcaacattactgaaatgcagggaggaacaagtgattcaattgggaggaaaaaaagcaaagtgatgacatttactcctagacaaaactttttaggaaaatgtatcttaaaagtaggagaaaaacatataatacctgcaatcccctgcaaaagaagcctctttagcttactacttgttcatcgtctttctgtgaaatttgggcaaaactagctccctcattatctcaaataaattaatgcagttggcgattctatgtcagtttaggtctacaacttttgctttgtgtgaaactgaaagggaatgggaacatcttcatttttctgtggtggccaggggacactcagaggcttggaaatgaccctatatcatctattttcaattgcctcactctatcttttgaaatctcaggtaattcatactcctaaaaaaatctcatgttcatacataggacaaggtagaaaaggtaatattcctgttttaatttgctagggctgccataacaaagtaccaaaggctgggtgacttaaataataaatatgtgttgtctcacagttccagaggccacaggtgcaaggtcaaggtgctgcagggttgatctcttctgaggcctctttcctttgcttgtagatggccacttcttctgccttctcaacatagggcttcaacatgtggattttggtggcgtaggaacacaattcctcttgtaacagtctggatcgtctttgacaatggatgttctaaaaaataaaagagagtaatagacagtacaaccctttggctgaaatctttctcttggttttctaaaattttggtcttgcaatagaaaaaacaagaaagagaaccaaagtttagttcttcccggaaggtgaggcctcctccctaagtctgtgtaatcccagacactaagacatggtgctgtgcagttctccaaagtcctactcactccagtgattctgtttctgtctttttaactgagcagaagagtctctttcaggagagcaacttcttctgatgctttatgggctttattctccttaaacttatggaatgaaaaagatcttaataaaaaggaaaatatttgccaaatttttatcatgctcataatttttgtacctttttaaatgccccatattgtgttgtttattttttaaattttttaaaattggtacataatatttgtacatatttatgggatacatgtgacattttgatacatgcatagaatgtgtgtatcagtcaagatatttagggtatccatgacctcaagcatttatcatttctttctgttgagaacattttaaattcactcttttttgttttgttttgttttttgagatggagtctcacaccatcacccagactggagtgcagtggcacgatctcggctcactgcaagcttcgcctcccgggttcacaccattctcctgcctcagcctcccgagtagctgggactacaggcacccaccaccacgcccggctaatttttttttttttttttgtatttttagtagagacggggtttcaccatgttagccaggatggtctcgatctcctgacctcatgatccaccctcctcggcctcccaaagtgctgggatcacaggcatgagccaccacgcccagccaaatccactcttatagctattttgaaatatacatttttgttaactttagtcagtctgctgtgctatcaaacattagaacttattttctctatataattggacatttgcatccattaacctgcatctctatattttcccacccctacattcttcccagtttctgggaactgtcattctactctctctacctccctaagattaacctttttggctcgcacatattagtgacaacatgtggtatttgtctttccttgcttggcttatttcacctaacgtaatgacctttggttacatccatgtttctgcaactgacaggatttcattcttttttatggctgaattgcattccattgtgtatatatataccaccatttattcattcacccattgatgaattcacccattgatttcataacttcgctactgtgaatagtgcttcaataaacctgggggtgcaggtagtcttttgatatattgatttcttttcctttatataaatacccatgagtggagttgttggatccaatagtagttctattttttgttttttgagaaatcattatactgatttccataattgctgtacttactttcccaagagtgtacaacagttcccatttctccacatgctcaccactatccattattttttatttcctattagtagccattctaaataggataagatgatatttcattatagttttgatttgcattttcctgatatttaataaggttgagtgtttttcgtatacctgttgaccatttgtatgtctccttttgagaaacatctattcagacactttgtccattttttaattggattatttgtgtttttactgctgagttttttaagttccttgtatattctagatgttagttccttgctggatgaatacatagcaaatattttctctattcaacaggttgcctcttcattctgttgattgtttcatttgctgtgctgaagctatttagtttaatatagtcccacttgtctattttatttttgttgcctgtgcttttgaggtcttagccataaagtctttgcctagacccatgtctggagtgtttcctgtaagcattcttctagtagttttatagttttgggacttacatttaaatctttaatccattttgagttgatttctgtatatggtgagagacggttctagtggtattcttctgcatctggtagcattttcccagctccatttattctccattgttgcttttgttctttctccattgtatattctcagttcctttaccaaaaatgagttggctatcaatgcatggatttattgtgagttctcttttgtattccattagtctatgtgtctgtttttatgctagcaccatgctgatttggttactataactttatattgtatcctgaattc

SEQ ID NO: 5744 - DNA, 13170 bp, Homo sapiens
accctccaagatcaggaaatgtgtccgtttcttctttgtcagcctcacaaactttttttttaagttcaactatccctgtcattactaactattcccccatgatccctagcctacacttttctgtggatgaaaatgtaatgtattcgagaattttaacaatttcttagttttcccattcacattcactgataatttattttgatcctcataatttattgagcacagcagggaccggggtcctttccccaccttagagagattattttcactgctaaagatcataagcctagtgagagactgggagggagatggacctagctctcctgacacaggtcccaagcccttacctccacggtgtctaccctccctccaggacttcctccgtgtgccagctccagcaaaggatctgattcagctcgcccccaaaaaagacttttaatagttcaataacaataatgaatatgcaaggtttgttctaaggcatttagaaatggtttcagggagtcatgaagccagtcctctcttgggctaggggaggccgagatggtcttgagctccaggggacttgtttcttagtgcccaggcctgggcgcccctcccccaccaagcctcccaggtcttctgtccaaagccctccccctccaccccacctccaaccccgtctgctctaccccatcaactacgttttctccctcagcacttgccttataccccatgcactcacgagcacagaggcgacttccctctctcagactttaggcgccactgcagggtccggaaaagaaagagaaacggcccagcgcggtcgcttacataacccagggcggggctccgctccgcccccgaaagtttttgcgacggagttttccctcttgttgcccaggctgaagtgcaatggcgcgatctcggctcaccgcaacctccgcctccaaggtttaagcgattctcctgcctcagcctcccgactagctgggattacaggcattcaccaccaagcccgtctaattttatatttttagtagagacgggatttccccatgttggtcaggttggtctcgagctcccgacctcaggtgatcgcccgcctcgacctcccaaagtgctgggattacaggcgtgaaccaccgtgcccggccttggccgcatgtgttttgaattttgctgcccggaattcactgcgaggactgggatcacccgtcaccccgccctggtctacggaaaatgaaatgtgtttactgatatagaaacggaataacggcgctgtgggctggggagggccgagctgccttcaggcttctggtctccagctgcagggcactcacacctgcccgttatgaaaatgcagacccgcagggcaggaattccgagtccgggctggagcgcgatctggaatccggctctcttgaaacagcaccgcggaggattcggatccgggtgagtaggaaactgcgcctcagcccctcccacgggccgcccacgtattccaggatccgaaaacgcttcctgctgctccgtcaccccaggaaggcagcgtccgcctctgggcggttctgatggaaaccggctgcgccgcccgcaggaaaacccacaactaaggggccaggaaaaagcctcttagggtcccgccacttcagtgaggatcctaatttacacccttagtttggcctccatgaaagactggagtgaccttcactgaaatgatacaaggggcccagggagctgcggcgctcagaatgcggtgacagcgccgcctcgcgtcccttccctgacctgctcccggcggacgcggagaagtttgttggcctggaggctggaatataccggggatcaaatgcagagaatggagaaaagagggaaggatggggggacgtgttgaagaaatgagggaagagataggaagaaaaggggagagaaaaagtaaaggagagtttttttgttttttgttttttttttttgagacggagtcttgctctgtcgcccaggctggagtgcagtggcgcgatcttggctcactgcaagctccgcctcccgggttcagggcattctgctgcctcagcctctggagtagctgggactacaggctcctgccaccacgcccgactaattttttgtatttttagtagagacggggtttcactgtgttagccaggatggtctcgatctcctgacctcgtgatctgcctgccttggcctctcaaagtgctgggattacaggcgtgagccaccgcacccggccggagagagaaaatttaaaagacgtagtttcattatttcttttatttttgccctttatctagttttacttatgaacatttttaccacaaatttctctctctctaaatctgtaaatatgctgctattattgttatttcagagcctgtgagggtaagttgcagacagcatgaccctctacctccagatgtgtcagggtgtgtctcctgggcacaagaacagggtttttgttttgttttgtttcacataagcaaagtacaagtctcaaagaggataatatttttaaatcatcttattgggacatactttgcatgcaataaactgcatctatttaaaatgttcaacttgttgaattttagctgttgtacacacccacatctccactaccacagtgaagataaagaagattttaatcgtctcccaaagaacagctacacgataaaattctatgttgtcattaaaaagagtaagagcaattttaagtattgctatgaaaagatgtgcccagcatacttttaaccttttttaaaaggttaaggaggctgggcacagtggctcatgcctgtaatcccagaactttgggaggctatggcaggcagataacctgaggtcagaagttcaagatcagcctggccaacatggtgaaaccctgtctctactgaaaatgcaaaaattagccgggcgtggtggtgggtgcctgtagttccagctgtttgggaggctgaggcaggagaatcgcttgaatctgggaggtagaggttagagtgagccgagatcatgccactgcattccagcctgggcgaaaatgccactaatatcacttacataatattaatatatatttgaagtaggggaaaacctggaagattcctcaccaaagttttgacagtgactccagagactgggataactttgtgactttcatttcctcttaaatgttgtgccagggtctgaccggcagacccaggctgcacgatggatgaataatgtactcagacaccgatattcagtgaaagagtgcaccagagggccaggccactcacagaaagggttgtggcagctgcgtgccctgactatctggccctgtgggcctttattcagcacagatttaatgacaaaggctttgagtcaacacacctgtgggtaattaatctggtcgcagtcccccggagagagcagtcctacaaatgatcaaaggtaaacatgctctttagataaactctcttacatgtctttgtacttactcgaagctattaactcaaggtaaggggattaggctgctttcagctataaccctatcctgaggcttttgcaaaactttccaccttccaagaaggtttgtgtctatttcctataactttatctttataattattcccaccacctgaccaatcccctacaatgttggaattttatcttttagtgtaaacttggatttgggtggattgcagtggttcatgactataatcccagctctttgggaatcgaaggcaggaagattgcttaagcccaggagttccaggctgcagtgagctatgattgtgccattgcactccagcctgagtgacaggaggagaccctgtccccaaaacagaaaaataaataaaattttaaaataataaaaattataaacttggatttatgtggaggttaaggaagagaatatttcagtttgaaaatatgaagctaagccccacaacgaaatagttacagagttttaaaaaagaaaatgttcattaaaacccaccaccagaaactctctttcaagaggatccttcatattttcatggcattgaatctttcttaaagtgcatttgaaagagatgttttcagtggaatagagagatgtgtaacaatatttacaaaagcggttggctgtaataaaaaggaaaacgcaaatgagtggggacacaggggaccctgttccatttattctcaaagcacgtttgaaaactgcgttgccatagcgtccttgggtagaggcaaagtcgaggcagatcttgttcctggagtattgatttgattttggaaacggtccaaggctttcagaaatcaggctgactttcagatctaaagtctcaagaatattcgttctagcagtgagcctgtgagaatctagcccatctgggcgatgcacgctctgcttccacctagtggcagtgattggaaggacagggcacagtgttactgcatgggtggggctgaagccaaggtgaaaccgcctttgcaaaattataactaaggaaatgatgacagtgaaagacatcaaacctaactgaccccatcttgcttccaaccgctaaactgcccttcttcatttctaggcgtaggctgaactagccttgggaaggaatttagtttatagtttaaagggaaactgttcttgtaaaacgaagaaaggccaccggccattaagttaggatgagaggggctggaattctgaatattaccagccattattccagaggtcataagatttgcaacttctccagttactcttgaaggtaacatcactattgtgaacctcagagtggccttttgagatgtcttttcaggtttttgtatttttaacagctggagggccccatctggacctgccaaccagtcctgtggcccccacgttcaggaactgactcagcctaagagaatggcctccactcactatgatttcataccggagccaaccagtcagcactcccgattcactggcccccctatccaccaaattatccttaaaaactgatgagagtttttggggagactgatttgagtaataaaactctggtctcccgcacagctggctctgcatgaattactctttctctgttgcaattctcctgtcttgataaatcggcttcgtctaggtagccggcaagatgaacccacttggtggttacaaagggagtccaggccagtgtgcattactgtagtggggtccaggtagcggaggaaaggcgaggacactcagggaataaatggcagaggaagaaggagcacaagggaggacccaaaccctccagacctctccttccttctctccctgttagggttggagggaaccagcgtggtcccaggaggggtggctggtggggtgcagaaaacgccctggttgcaaaggggcctcacgtgcccgacacaagggtcctggctgttagctgctactcatgagttcaaactaggaggaggctcacacgtgtcctttgcaaagtagactccttatctcccactccggctggtttcccaaatccatcctgataaagcagaaaaaccaagagccaaattctgcgggtgacctttctgacagctggaaggtcctccccatccccattccttgcgtgctctcctcttgtcctgccccctctgctttgtctccacttcctcatccttttccctctctggaccctgctcctgagtatctcccaccttcttcagacaacttctcctcatgaagtacagagtcccccacctccaggaaaaagagacaaagaccacgagaaggacctgagaaacgcctgtgaccccgcccctgagtccagcctctccctcagcgctggctctggctgtgtgtgtgtgtatgtatttttgttttgtttgtttgtttttgagacagggtctcactctgacagtctgcagtgtcctgatcacagcttactgcaggctccaactcctggactcaggcaatcctcccacctcagcttctcgagtagctgggactacagactggagccaccacacccagtgtgtgtgtgtgtgtgtgtgtgtgtgtgtgtgtgtgtgtttgtgtatatatataccctttttttttttttttttttttgtagagactgggtcttgctttgttacccatgctggtcttgaacttctggcttcaaacaattctcatgcctcagcctcccaaagtgmtgagattacaggcataaaccacaatgcctggcccctgtgtgtgtacatasaaagtcaaagtgctaaacctggcgcctaggaaacatccccacctaggcattgcttgcaacagtmggtattttgtgcacctgtgcttttatttcaggagctgggacagttatattcatcagaacagcacggtgtcaaggccctcacccccagaaagcttargagacactgttttatggaggagagtgagattggaggaasccctgactccaggtctcctgatccttcctacacaaagcgaagctgaaaaaaagtgcaggacactccatttcctcctgggaccagacagggaagccagagccaccatggatgtcaaattccrgcaaggaaacaccagtatagcaaaatctccacatcacattttaaagctcacacaatggctcaaagagaacccacatcaaaaaaccgaattcctagctcaggtgagatcaccaaagttgcctgtgaggcttcgtggaacctgcaggtagaaaggacatctttatttygagctgcagcccagttgctyctgcgtcttggagccccttgaaaggaccctctcccttcaacagtacatagggaggccatttctggggagaaatgtagactgtccttagactcctgaggtttttacacttgcttgctgactctgtggactttgactwcatcattaaacatcttataatgatgtaatttgctttgactgtaagtgtagaacaggacgctgttcctgaatcaggaaacaagggactggtgacctgaactgccaccmccctcystggtgctcagatgyaatgaaatygtgaggcaacaaatctatggctaggtaaagggtcaactccatttcagcaaatgtttcagatgttccttcctgcctagtaatgttccagctttaccccagccttratcttttaaaatgtatattttccttrgygttgattttaaagtaattcgtatgtatttattacactgggtttgttgcagtaagccacctcgaatgttgctgtagaattaaagtaagcaaataaatgtgtggttctccaaggagttattgctaacaccatcttaaaaatgtattaaccccaaatccaatcacttctcactcctctactgcctcctccccagggccatcctctccaagatagtaaaccagaaggccttccagctgggctgcctgctgactctcacacccgctgtccatcacccacacaatagtcagagtgagcatttcaaatgggaattagagctcatcctcgcctccgcgtcccacagacatgccagcctcttcccttcttagcacagtgaaaccccagtctctcactatgttttacagcccctcatccctcatcacaggatccttctggccactctggcctcatcccacccctctcggcccagctcattcatctccactaacactgctcaatcctgtctcaggcacctcccactggaactccccaagtgcacctgctccccagggatccaaagggatccaaaggcccctcacaccattcaggtctctgctcagacgtccagtgttcaaattcccaggaacatcttgatcaacagactatatctcctaccatcctcaccaccatcaaccttctagctcaagcatattttctccataacaattatcaccggtattagaattgttttcatttgtttcattggttgtcatgttcttcgaggcagggaccttgtctagtcaccacttggatttccagcatctagaaatccaaggacagagaaggggctcaataaatatgggttgagtaaatgggtgaatataattggtacactgcttttttttttttttttttttttttttttgagacagagtctctctctgtcacccaggctggagtgcagtggcatgatctcggctcactgcaagctctgcctcctgggttcacaccattctcctgcctcagcctccagagtagctgggattacaggcgtccgccaccacgcttggctaattttttgtatttttagtagagatggggtttcactgtgttagccagaatggtctggatctcctgacctcgtgatctgcccgcctgggcctcccaaagtgctgggattacaggcgtgagcctctgcgcccagccggtacactgcttttgagaagtaatttgataatatgtatgagaaggcttaaaaatgttcatgcggccgggcatgatggctcacgcctgtaatcccagcactttgggaggccgaggcgggtggatcatgaggtcaggagttcgagaccagcatggccaatatggtgaaactctgtctctactaaaaatacaaaaagtagccaggtgtggtgacgtgtgcctgtaatcccagctacttaggaggttgaggaaggagaatctcttgaacccaggaggtggaggttgcagtgagctgagatctcgccactgcactccatcctgtgtgacaaagcgagattccgtctcaaaaaaaaaaaaaaatttcatgccttttgacccagtaacttttattgagaaatctgtgattttaaaacaaaatccaatatatagaaagatctttaggtataaggatattaattacaataatgaaaaaaacatgcaaaagaagagtggctaggtcctctgtttggaaacagcctacagctggtgaaagctgtgtgtaagaagattttgtaatatgatagaaagttgtgtattgataataaagttttgaaaagcaagattcaaaataactcataagcatgacgacactaagtcatcctgcacagtcacccgcatgcacaaaaaccaggagtggaaactcaggggcagctgcaaagcacagctccaggccccttccctctgaagtctgaggctctgccaggcaacgtttcatcccgatcctcccagtggagacactggcagtttccatccttctgcttctttatacctttttatattttctgtacttgagattttacttcctaagaagataaaatacctattagaaagttttaaaaatttgaaataaaattttaaagaagtccaaatgtctggccaggcgcattggctcatgcctgtaatccctgcactttgggaggccgaggcgggcagatcacgaggtgaggagttcgagaccagcctggccaacatagcgaaaccctgtctctactaaaaatacaaaaaattagctggatgtggtggtgggtgtctgtaattccagctactcaggagactgaggcaggagaatcgctggaactcgagacgcagagcttgcagtgagccaaaatcgtgccactacactccagcctgggtgataagagcaaaactctgtctcaaaaaaaaaaaaaaaaaaaagtccaaatgtccattcccaactcagcttcaaggaaagtctcctctagactccacagggtagaaattcctgttgatggcaccttcagaaggtaagaaaggaactcgtcctccaccatgcctgacccgtctttgggttttaggcattggccgactgataaaggcaatactgagagtgtgatcaatgtgtagacgaccgattgtcatataatatgaatctcaccacacctgagagagtgggatagattctctcattttcatagtttgggcatctgagtccctgagagcctgaatgcctgacatggattctccaagaatgttggccttcagactctaaagggccccgggtctcctgtgaagccccctgtgcatgcaccacacccgcagaggctccacaacggcgggaagggcacccagggtcagagcccaggcgagttcacactcggggaccatccacatccagggcgtgcaggggaggggccgaggtgagagcccaacccctgcctaggctgtggtgactggtggctgcacgggggtcccagcgctcctggagctatcattctttatctcctgaagaccccggacccgcacataccaaaattctgcatttctggtggagcggtcttctcttttgagatgtaaacactacttctcgaatcttaaagccagccattgccactcctaagggataagcctctaactccactgaaattagcctcagaatttcagctgagcatttggagccacaggcaggaagtctgtgggatttgcacctggctgatctggaaggtggtcctgaaaggtagtgtgtgactaggggggctttgaggggcatggatgtccctgatgaaaggagaacaagacagatgggaaggttccaaaagtgaactttagggggccctgtgcccatcactaggatttggaaaatcttttcccagccacttttggcctgtgggttttcattctgctttcctgtctgccaagccattccaggcaatcccttcatttggtaaacatttatcaaatacctactgtgtgcagggcattgttttaagaggagctgggactgagataagaggaaataaaccctccttgccctcaaggcgtgcccagtcttgctcaggcagagatcagtaaggaaatcataacacaaattgagagaggaaaaaggaagaaactggtcaggcgggcagttatggtgggtcctcagttgaattatttcaaacaaaagaacggcctgcaggcacaaagaagggaacttgcacaggggggcttgcctaagacatgcccacagctgcacaaataagaaaggctgcacaggagacttgcccagacatgcccgcaatggaaaattctgtcccccgatacgtgggcagtcagggaaacaaagcaatatggagtaactcaagctaagggcctgcatgggcactaggaggatggggtggagctaccggaaattcgtgccttatgcaaatgagacacccagccctcatcagtttcttataaaaggctttgcattcagctgtaaaaatggcaaccatcttccaagccccctctccgtgggggagagctttcttcttttgcttattaaacttttgctccaacctcaccctttgtatccatgctccttaattctcttggtggtgagacaaagaactccaggtaacacctcacaaggagagactgagaggctgctacgttgtggtgcattggcaagactaacaaactggctagtgggacatgcacacttgcttggtagacatatatgtagatcttcagctctgactaatgaaggaataccaaaaatctcataaaagaaaataatattatttgagctttgttttgtggtgtaagtgggagccccacaggcacccagggtaggagagctttgctcagaatccaggaagtgaacatctttccctgggccaggccaagaatgagactaagctgattgaggagcctggtgcctcctggcaagaaagggtgtctgacacctgactatccagaagtcacagctactcaatattgagacttgaaacagagagagagacagagagagagagagagacagagagagagagagagacagagagagagagagagacagagagagagagagagagagagagagagagatctgatttgaaaagcagaattctgctgggggcttgttaaatgcagagtttctgatacagtaggtccaggccaggccctgaagattgcatatctaagttcccaggtgatgccaatgctgcttcccccaggaccacactttgagaaccaccaccctaaggcaatctgtgttggtttctaatatcagaagagggctgggagtgggctgggaggcagaggtgtaggatcagtgagaccacacctgacccaccctggacagctccccaccccattcttgcagcattttatttcctgggagtcctgggaatggaagacacccaggaagggaccaaatgtggggtcacagggtgatccagaggctcggcttcatacagcacctggggctcccgccactccacaactggcccccacaccctcagtcttcccacccctcacgacactgacctccagaccttcctcgactaatctcagcaggttgggcctgggatgtgacactaggagctctgagtgtaccttctgatccaaagatagggtgaccgcgtatgacaagtactcagatgggccattaataggaccttgaacatttggcaaatggcttcagtcacgtgtgcttgagaattccagtgttttctagatatggcatccatgagcccacacaaacactggagggcgtcgtgagcatactgaaacccataactgctgcactggatcccctagaatccctttcccacttagaccaagatttgaacaaaatttccttcaccaaacaaactgcatttaattaatcatgctgttattttaccttgtaatggaaaaaagacagatgtaaagaaagatcatgcaattaaaaagaaaacaacgtactgaattaaaatggcggtaaacctccttgttaaaggaataacataatatttagaaaatttttaaattttatttcgataaaggttaaaaaattccattagtttttaaaaagtttttcattttgaattttttgggggtttgtttggtctccttaggaattatcttttatttcttgatatagttcaaaattcaaaattcaaaatgttcaaaaggtaaaatgtctctctcttaccctgtctcatccccaacaggcaaccaaggatattaacttcttgcttattcttccaaatatattttatgcatatgcaagcaaatataaatgtgtacatatatatcctttgtcccttttcacacaaattttagcagactctatatgttattctacaccttgctttatttcttcatgagggaatatcaagagttttctatgtctttcttcttttgtgttaaatgtttgtagactctgccgtgtagctatgcagtgcttgtttgggttttcttaagaagggaggcctccttatgttacccagagtggagtagagtgtattcacaggtgaatgctactgtgcccagcttgcaatgcttttttaaccagtcccctagtgacagacatttggattattttttcttttatctgtcattttctttcttcttttctttttgcttttacaaacagggttgcaacatataa

SEQ ID NO: 5745 - DNA, 13242 bp, Homo sapiens
aggaccatcccagtcagtgaggaccatcccagggagtgaggaccatcccaggcagtgaggaccatcccagggagtgacgaccatcccaggcagtgaggaccatctcaggcagggaggaccatcccaggcagggaggaccatctcaggcagggaggaccatcccagggagtgaggaccatcccaggcagtgaggaccatctcaggcagggaggaccatctcaggcagggaggatcatctcaggcagggaggatcatcccaggcagggaggatcatctcaggcagggaggaccatcccaggcagggaggatcatctcaggcagggaggaccatcccaggcagggaggaccatctcaggcagggaggactatctcaggcagggagggccgtcccaggcagggagggccgtcccaggcagtgaggaccatctcaggcagggaggaccatcccaggcagggaggaccatcccatggaagtaagggccatctcaggcaatgaggaccatcccagggtggtgaggataattctggggcagtgaggattattccagggcagtgaggaccatcctggaccagtgagtactatcccagggcagtgagaatcattcgagagcagtgaggagtatcccagggcagtgaggactatcccggagcagtgaggaccattctagagctgtgaggactatcccagggcagtgaggattatcctggggcagtagggactatcctatgacaatgaggaccatcccagtgctgtgaggaccatcctggggcagtaaggaccatctcagtcagtgaggatcatttcagtcagtgaggatcatcctgtggctgggaggaccaccctggggccgtgagactcataaaatacctgtgaagatcattgcaggaaaggaagaaaccattctgtgacaggtggaggggtccctgggataaagtggagcgatgggtcccaggagtggtgagggcagggcaggccttccaagcatcctggctgtgctcatgcaggcaggagatgtcacagcactgcttctcctcccccagaagtctagctcagaacttggcctccggcctgggcactgcctcatacctgccagaattgatctcaatggagctgcacaatgagaggttttgcatgttgtctagaggactttggttgagttcagagctgagcacacttgccttcagactctcctgggactcccaggtaactgattcaatgcttttgatactgggctcggggccgtaggtaagtgatgggagcacattgacaatggcccaggcttggaagttgggggttggaacacttaaatgggcagtctcggttgttgacaggtagttttggtcatgatctttgttgctggggataattgatgattagtcagggggtgagagccttggatactgaagcagcgagtttggaaaattggtgaagcacctcgcatactgaaatcgtggctgtaggtaatggctggtgtttctgggatactgatctgttgactgctgatagctggtgtagggtcttggatactgacctggtgattgtgaataattggcaaggggtcttggatactgaccaggcgattgctgctggctggtggaggctgttggatactgaccccgtgactgttcctggctggtggagggtcttggatactgacccgggaattgtaggtaattggcaccaccgtgcctggctaatttttttgtaattttagcacagatggggtttcaccatgttggtcaggcgggtctcgaactcttaacctcaggtgatccacctgcctcagcctcccaaagttctgggattacaggcataagccactgcgcctggcccttattattattttttaaggtatagaaatctagaatttttttttttttttctgagacaaagtctggctctatcacccaggctggagtgcagtggcatgagatctcggctcactgcaacctccgcctcccaggttcaagccatcctctcacctctgcctcccacgtagttgggactacaggggagtgctactattcctagctataattttgtattttttggtagaggtagagttttgccatgtttcccaggctggtctcgaacttgtaagctcaagcaatctgcccaccccagcctcccaaagagctgggattacaggcatgagccactgtgcccagccttagaatttttaggtagtttaatttcttcacctttgtctctgtgactttattaattgcttcttggcttcgggaggttctccctccagatttttgatgaacattcagttctgtttttttaaattctcattacttatttttaggttttgattgtgattttggagttggtatgcagggaacattgaattctgtgctccctgctgtcctaaggaagggacttgaattagtcaggagtttttgggtcacaagtgacacaaactctttttttttaaattttttttattttttacttttttaaatttgagatggagtttcactctttcacccaggctggagtgcagtggcgtgatcttggttcactgcaaccttcaccccccgggtttgagcgattctcctgcctcagcctccggagtagctgggattacaggcgcccgctgccatgcccggctaacttttatctttttagtagagacggagtttcaccatgttggccaggctggtctcaaactcctgacctcaggtgatccacctgcctcggcctcccaaagtgctgggattacaggtgtgagccatcgtgcccagccacaagtgacacaaactctaacttgaactagcttgagtgaactagttgtattagcttgagtgaactaacttgaactagctaggggatcctttatgggatcacctgagtgaaaaatggtaatggtaggaatgccttcaggcatgggtggatccaggggcccaagtgatagtatcagatattactgttttttggctatgggattggcttcattctcaaggctctgtgtagtggcaagtcagaatccagtaaggaaaataaatcattccagattcttcagaaggaagtaaatacagggaatttgttcgtgagtaacagaggagctgagaagccaataggaaatagtgaggcaaaccaggagttaggaactacaggatgctgctacttggccagaaggacaaagggaggaggtggtattactacagtccagaaactgcagccctctggaacgcataggttcatggttggattgctcagaagtggctagaatcagagaatagatacaactactacggaagacccaccacatgcagagatagagaggctaataaataccctggcttgccctctcctcccagaaccagtcttctgccagtgcctcccattagtcaaacacagtgataagatggtgagcaaaggaggctgggaaatgtggtccttgcagtgcagaacaggacagggcgggaaatggatctgagagcagacagacaaaaaactggcagagttgttagcaacttggcagagttggtaataactgccgagtccggtagaaaaaagttatcaacagttcttgcaagaatcctgtgtggcttggggcacatgagcaccccgagccaattatatggccagtggagtacagttggctgattggcttaagactggggctgagaatggggaatgggcaggaggtgaaatgcatggtggggaggtaagctgcaaatatccactcattctgaccaaatcacagagtgggctgctctctgggatgacgagagccagggacttcagtgtcagctcaatgctctttcgcttgtctgttttccttcttagttttactctccccatgaagctaggtccaaggcttaggcagcttcaggcttgtaatccttgaggagagactgcttttccttgacagcttcctaataaaaagtcttggggcagagcttgattggttgggctttggtcatgtgtccatctttgggccaattgcagggtctgcagctggggtactgtgattggctcagccagaatcacatgattacctctgtggcccagaggccagcatatgccaggagaatccctcatccagggttatgtgagttgggtggagggtgtccccaagagatgtcaggctgctgttctgggcagaccaaattcaccattcaaggtcttggtttctggcttggtgccttctccctgacctctgcttcttgactcttcaatgagcagaaagaactaagggaactggctgggcatggtggctcacacgtgtaatcccagcactttgagaggccaaggagggaggattgcttgagctcagtaatctgagaccagcctgggtaacagtgagaccccatctctatgaacaaaacaaaacaaaaacaaaaaaccaaggggtctgatatttcccccacttcccagagtgctgttgctcttctgtatatatgatgatcctttatctttcttgttgggtattagagatgtgcagtttgccagaaacaaagcagatgaggtcttggcctatttggctaaaacaattttgcactgttgaaaagtagacaaagtagaaaaagggctaaaaggaggagatgtagcatctcggaaacaggtaaacctctcttctgctggaagtctaagttggataaatatccactgtaaactggaactaagcttttgggcacattggttttagagtatttgacttgaaagtttttcttgtgtgcaaatctgtatgtgttttgtgggggctctcaggtgtgaacaagagatgacattaggatgtctgaggagattctcggcatgtgaatggggccactaggggaccttggggggtgactagcagagactagagcagaagtagggtgactttggagaggactggggtgaccgtggtgtcttggataactttgagggtgctgttgagggtgtctgggagtgaaactgaggatactaacatgagttgttatgagacaccttttaggagttcaagtagggtgaccaggggtgtctgtgggggtggttctagaaatgatcgaggctgggctcagtggctcacgcttgtaatcccagcactttgggaagccgatcacctgaggtcaggagtttgagaccagcctggccaacatggtgaaaccatgtctctactaaaaatacaaaaattaggctggcgtggcagcagctgcgtgtagtatcagctaatcgggaggctgaggcaggagaattgcttgagcccaaaggcagaggttggagtgagccgagatcacaccactgcactccagcctgggcaacagagcaagactccatcttaaaaaaaaaaaaaaaaaaagaagaagaaagaaagaaatgattgaggtgattctgtggggtaaccttgaggatgagtgggatgacctttggggggtcctctgtggggtgaccttggggggtgtgtgggattatgagagtgtctgagaattgagttttaggttaagtaggggtgatttgggacaactctaagggtgtgactgggggatgactttaggggtccctgggggtgaccttgtgagtgagattggagtttctttggggtttctaggaggtgactttggggaggtgagtaggggtgattttgaggatgtgccagactttggggttgtctgttgggctgcttgtgggtatcagcagagatgactttggagggtgaccaagaggggtatctggggttgactctggggcccctgtccccctctccccagttctcatccatatgagcaagggcttcatgttactggccgtggccctgtgctgagtcctcctcccgcccatggccctctcctcctggccagtggtcctccgcctgaacatggccgactttgtcttcagtttcctctgcctcggcattggtaggtgttggcttggggggcgggggccctccctaaccccagccctgctctctggctttctggaggtgtatctagacttccgtgctgctcccctcggggcctctgtcttagcatgtctctggggagctctgactcagttctactctatctgtgggatgtctctctcccccactctctgtttccctttctttttttgtcccctctctccaggtatctttctgtctgttgtgagggcgtgtgtgtgtgtgtgtgtgtgtgtgtgtgtgtgtgtctgcttgtcacggagggtgggagaggatgtctcagtccctcttttcttactgggggtcatagggctcactgtccagccttctgtctctggccccaccccattgcagggctcctgatttctcttcagcctgacgctcttttcagttaacggcaaggcggtgcacccaagtccggtggtgtcctacctggtgacctcctacctgtgctgggacgccagcgacttgatgctgcactccggtgagggcggggcctcgggaggagggcggggcctcgggaagcgggtggggcctagggtgggactcggagtacagcggcccacctagccatctcccaggagccgtgtcctacctaagcccagtgggcatgtgaagcagagggcagcccttgaatgcgcggcggctgagctaccgcgggtgggccgtgcagcagggcgcagcgaggcggacatccaaacagcggaactcagacgctgactccgagcgcaccccgggccttcccatttcatacacccwcgaggatgagacccaagcacctccaaggaatagcacccgaggtcttcaggacaccgaccggtagccatggccagatgcccggccaaccccttcagcgtggccacgccctggatattcgacctcccctgaggccccaccccctgatatcaggccacgccctccgaggggaccggtggcaaactccagccctcgctctagggcccgccctttgcggctttgtccctgcccactgggtcctcacagtgcctccaccccagaggcccagcatcccctcccgttctgcagacacttgtccagcgtcccgctgagctcggcagtgtggctagtttgtgtggccctgcccctggtgcccagccttcgcaggccacaccctgaagccactctccacccgctcagccagggtgctccgatgtccacccttgtcccggagttccggcctcagctccgatgtccacccttgtccccaggtggacacagcaccgcccagcatttggtgcaactccacccttctgcagaacgggcccctccctgggaaggcatggcttgcaataacatccctctgtaccttttctggcttccccgccacaataaaacctctcagcctcagaccttccattgccccccacctccccaccagggcagggtccatcctagtgtgagtgaactgttctggcgtccctgactcgccctttgggatctgagcctttccctgcctgtttgtctgcacctgtcacagccccttcctttccccacctgctggtgacctcagacttccaggcatgagattgacacagctggggtggccccagcctcagccgagtgggtccaggtgcaccacatctggaaagataggtgatggcagaacgtgacacacattggatgcacatttgattttactgggggtaggggacagggctgggcgttcaggagttctccgctatggtgtcctcgatccacttcacataagacagcactctgacggcgacagaaggcttattgggggtgccacaagggacgtagccccatgatgtgacaccttggagcacaccatcacacatcagcgggccccctgaatcaccctgggagcacaaggtgggaggggagagtgagaaaggtctacggggcccaagttctgcctggggagccccagctcgcagacagggcctccagtgcccactcccagaggaaggtgggcagggattcccacagaggggacagggtctccagtcctggccaagggggaagggacctcagggtccagctcctgcacatggggcagggtccaggtggacagtgcctgcagacaggttagggggaggaggggcaggaccatctgcaggacgctgcccctgcgggcacatcgcagaggccacctctccaggactactctctgactcgacggtaacaacacattaccacgaggaacggtgaactctggtgtggggggtgagatgcagttgtccctggatgggcgggggaaggagggggagctggggcactgatggggcgagtggctacagctagctgggaagcagtgaagcagatgcctggttagctctcagaagccagttcagaggctgagtcccctccctcagcccttccagaccctgggggcagggctgcctcaccacacaggtgtctttgccaccttccaggtgtccgacacacagcatgaagtctgtcaccttctggacgtgggcttttttgcactcatcattaggcaggattttgaggtccacacactggagatcatctggaaatgagactacgaacccgggagaaaaagggctgcagcccgacctcacctgcttccctggccctttctcccttggacgcaggagtccccatccccgccttgggctacacagtctgcccccacatacaattctctggttcgatgctgccccagccggaagccaaacaggtgctccccacttcgggttcctcggtgggcaactccacgaccttcacagcgtctgtgatggtatcagcaggctctgtcaggcggagcagcatgaggtcgtggctgtagtcctcgtctgcttggcgggtgtggttctccaggaggctcatgttgaagccagggtgtgggaagctctcactgacatgaacaaactgggctgtgttttcgtcgtcaaacaagttgtggcgacccagccagagctggtaattgctggggaaagatgggaatggagggatgagaagacgggaaggggaaaaggggatggggcaggggagcatgggggagggtccccaaagagagaaagggaaagagaaaaatgtgggtgggcggagacagaggaagaaagatatagttatggagaaatacagacagcgaatgggaagatgaaagagtttgagagtgcaaaaggcaaatgaagagacagagcaaaaaagagctcaaaaggacagaggggtgagaaaggcggaggggagggcagtgagaaacagggtgagcaaaaaagaggcagatgagaaggataaaagacagggacagcgagaaacaggcccagggaagagggaggaagagggaacagaacacggaagggagcgagaagcagacaaatgaaaaaggacgcgggacgtcagagtgagaactagaaacagaggcagagaggaagcaggagtgaccgagtgtgggagagaaaagggagggaggccctgggggagggtgggggcaggtggggagggtgggggcaggtagggaggaggggaggcctgagagcggctcagctgcagctggggctgtggtgcgggctccccaggggcaggtggcctggcctgaagtccaaggtcgaggcccccttcccttcccagcaccctcccgcgcgtttctcgccccgcctcctccttcctcctccctcagttgccccacccagctcccgctgaaaccagcccttccctgtgtctctccagagtggagggatatcctgtggggcggggagctggacagagggagaggcgccccctcccaggcacacaagttggggataaagcccttcctttactctggggcctcccttaggtccatctgggtgtgtgtttagtagggatgagggagcggtgaggtagagacccagagagagagagatgggtagagagatggagggtgagacacagtgacagagatgccgcagagagactcagagacagacagagacaggggagatgcagagacaaggagacagaggagagagaggaagacagagaccagaacacagtcacacagagacacaagcagaaccagatcccaagagacccaggcagccttggagaggggtgtccagcccagctctgccctgccaggcgacctgcgccagagccttcctctctgcctcagccccccagtcttgcctgaggttatccaaggggaatgccactggcctgtcaatcctgtggcagcatagatgccctcctcccagaccccaggcccctactcactcgctgatgcaatgagcagctgtgagcacccactggcggtgcaccaggatgcccccacactggaaagtgctgaaatggtacagagccgcctgccagggctgggaatgctgctcacactcccagcctcccacaatccgggactgaatcgggggcgcagcacctgcagaggcggtgctgggtcaggaagggcagggttggcaggagaggccagggacaaggctaggagagggagctgggctgtgggtctgaagggacattgcgggtagaggaccagggctggaggttggggacatgggcaaggggtgttgggaaggggtgggactctggactgttccctgggcttttggagtggtggctggacctggtggggagattttgtgctctgacagtagagcagcctccagggatcagggtaggagacaggagacagtgtctggagcagacactgcatctgggcgtcaggtcatttggggtctggggctgggggatgggaggtggtgggttaggggagtggaaagggattctggaaaccagggatcaaggcgccaagggtgggacaggatcagaggctcactgaggaagaatctggagggctaaggggctcctaggctagggaaacaggacctgggttgggcttttgaggttcaggaaaggatgcagctttagggaaccaggtctgagaggtaaagaagagcatctggactgaagagtttgggggtgacttggggtccctacattggggttggaaggggccagcttggctgggacagttagatttcagggcttcctggttaaagggtaaaagaaagggctatggttaaggctagaggtgggcttccgagaggttttggggtccttcctgtgaaccaggaatggcaatctgaggggaggttggggccctgagaacacagttgcggtcaggactgggacggggctcaggaggagggaggcgtgagtggcagtccttctcggacagggtgaaggatgggatcttcgtttctcatggggatggggttcatggtctgagggtactggaaggatatggggtcctcttggaggcaatcctaggaagaggattggagaagtggtgagaacaggcgccaagcagctgtgggaatgcaatgcaggacccacttgatgtgaggttgtagaatcacatactgacttgggggaggccagggcagaagcgctggctgagaaggcattcaggatccttggcgtggggttccagaaaaccagagctgtgtaggaacaattcaggcagagaagggctggggcctggggcgggatggaacttccccaaggaaaggagcatgtggtgggagggtgtggtgtttttcctgggagagctgggggtgctgggtgggaagggacatttgcagacccccccccataccagatgggggatcccacatgccagtttgggaagcagggttttctggtgaaatttgggggaccctggaaggactggggagaccagatgtcagggtctggaggacacagttgagagcggacagctggatggaaaaagtcactggagtgtggtgggatttgtagactcaggagccaaataggtggccgcagggaactagggggcaggaggggatgatcagagtcctgtggggtgggggaagcccatgggagggttggggtcctccagagagagacagagatggcccagaatctgcccctttggtaaagcggtgggacagggcgttggctagggaagaggagaaagtactgaggcttcctgggaggagcaggaatctggtgtgggagtgagcactatgacaacatggaggagcgggggtggaagtttagggtggggccgcgcaagatagataagagccggggcaccccggactaggatagactgtgggccagagggatgagggtggggtgttggaggggaaggtcttatcggggggggatgtgaggccagcaagagaatcagggcccgttccccctcccacatccccccactgtctcaccagtcccccccagggacagggcgaggcacagaaccaggaaccacatggtgacagaggtgtccaggggccagcaggtggaggaactggggaacctccctggggaggcttttaaaagcccttatcccctcagagccccacccctgccctgctggcacccagatgttggccaaggcccttcccctgttgcctgggggctggacaattgcccccccccctccgatccccagagctgtagacggggagggagaaccagcacctgttctgcaggccctggatcacgctggacgcattcctggggttgaagccaggtggggcagggcctgtggctctggggctttgctctggggagcagccagtgaggcaaggggggactgaggggaagcagaaacaggaagacggaggaatcagtgacccctggtacaaagccccatatacctcagtctcaattaaggccctgcacccccagacctggtgccctcaaacaccagcagttagggctctgattccctgcaccactcggagccaagatactagcatctcagctgccagttccccctgaaatataagccttggccttcagaatgccctggttcttgcactcccagacccaggacctaggtccccaaagctactgttcctttcataataaaattttggggtacacatcaccacattcctagtgcctccagatccaggaatgtgaagtttcaggggtctcccagggtaagttctttagcattacaaaatccagtgtccctcccaaacaatgctggggtctcaatgagcctcccacttcttgctcccagttatgggtgctcaacgtcctgtcctccaaagtcccagagatctggacaaccttccctcccaggtcaagatcaggctaaccacagattccaatgacccttcccccccaccaccagtacaatatttaggtctcacgagccaggttcatgtacttcaacattcagcgaccttgaacatcacattttgtggtctctgaagataattaggaactagattcctgcagcctcaatggtaaacccataggcttccaacaggttgtcttggctttttggtaaaatcaaagcagctcagagttccagcctctgctgtatatcagggacctggctaaggaaaggacagtatttgcctttttgccatggctaccaggaagccca

SEQ ID NO: 5746 - DNA, 49979 bp, Homo sapiens
  misc_feature (1)...(49979): n = A,T,C or G, or insertion/deletion polymorphism (see Tables 1-2)
taaggaaaaagaaaacagggaaaaataaaacctcatcaatatcttccaacagttaacaggagataccacattcatgaaacaaaaaataggttataaaataggaatagagggaacaagaaaaagctcttagaaatgagaaaaaccttggtagaagggctggaagacaaacttgagaataacttccagaaagaaaatgaaaaaccaaagggtacaaaacatcaattagacaggaggaatgtggttttcttttatgagatatattgtacagcacggtgaatatagtaaataataatgtcgatttcaaaagtgctgacagtaatctcatatgctttcaccacaaaaaacttaaagtatttgaagtgatgaattatgttaacttgattttattatttattgtatccataaatcgtaacatcactttgtaccccctaaatatgtacaagtataatttgtcaatttacaatttaaaagataaaaacaaaaacaaaaattttagaggggggaaaaagaaaccttaagaaaattatgagtgccaatccagaaagtccaagagtagaattctagagagagagagagaaagcaaataggaagaaatcaaagcaataaatcaaaaaaatgcccagcgttgaagaacatgagttgcaaataaacaggaccaaagagtaggcaagacgatggatgaaaacagtctccaagggacatcactgttctgggagttctgaatttcacagaaagaaaagcctctgaggccagatgcaaagccttcactcccagcacttcgggagtctgaggcaggagaatcacttgaggccaggagttcaagatcagcctgggcaacatagagagctcatgtctacaaaaagtttttaaaattatccaggtgtggcggtgcatgcctgtagtcccaggtacttgggaggccgaggcaggagcatcactcaagcccaggagattgcagctgcagtgagctatgacagcgccaccgcactacagcctgagcaacagagcaagacgctgtgtctcaaaaaaaaacaaaagaaagaaagaagaaaaaaaagaaacaaaaaccttcaggtttcatggaggaaaacatagtcacacacaaaggctctaaaaatgttacgtatcaataaaagagaatcagaacggcttaagacttcaacaacactggaaacttagagaccgcggagcaaaatgatgtccaaattcctactcaggataagagcagaacgaggcactttcgtacatacaaattctgaaaacttcatctgccatgcacttctcaggcaactagtgaaggatgtgctccatcgaagtgagacagtcaaatcaagagaatgacataggttccagaaaagtgaggctccaacacaagagggagtgaggagagttacaggaagatttcaggcacagacaagcctgcagcagattggaggcgctgggagagatttattcaagataaaatgataggaatactaattttcttcaaaagaaaacggacaatttcttgaaagatttagataattgcttcagaatttggggttgaattgtagtgacaaaatatagaaaactgagcaagcagcaagcaaacaaaaacaaataagacttgtaataacccaggaaaacaaaaagttatccagaaaagtgaaaacaatcctattataccacttcgtccagctgtaaatggcaatatgtagtcataatataaacaatcaatactgaactaaccaaattaaggatatatcactttgggcagccatggatccgtttgcactgagaaggcagagggtgaaagaaagctaggaacttcctacctattctcagtgtcaagcgaagagacatcacatgaaacaggggtaggggacacaaatacagacgtcaagcaaatatgctctttagagttggaggcaaagatcaaggaaatctactaaggctgaagtagatactctgcaggggaggaaacatgattaggggaaggatgttggcacttctttcttacaagcctttctaggattatctgactctacaaatgacatgaagctgtaaccttgatttgaaataagattaatatgaatgctaataaaaagtagtaagggagagtatgtagtcaatgtattcttaccaaattaacaacaagtatcaacaagatgactaacacaaccacatgatgtccagacacgtctcagaacaaatgtctagctcatcttcaacggtattcgaggaacttcagtgtgcttggtaaaacaatagcctactagggatttcacttctaaaatgtctctgactttagaaataccaaaaaataacatgtaaccaagttttaaaatattatacacatgaaaaaaggttcttttcattattttcttggtttccagatgttgaacgttgtggtgcttttacaattgaagagaaaaagcattctgacacattatactggttggggttctctgcttttctacttggtcaaaaacctttacacgcattttggactttgtgtcatcataacttggcaattgggaaagccgcatgatatgcttctttcagaacttggttacttcttaccaaaagagggaaaagctttcgtatcaccatttgcctatgggatggatgcacaatgaacgggccataccaaataaaaatatcactttgtactccaaaaagcatgttctctgcttaagccctttctgtaagtttcagctgggacgcactaatggagaatccatatgacccacgaaggatcgtaagatatcccagtggacccggcacaatcatctcaaattctgttcaggtcagagtatcttagataaaactcactgaagggcatcaagtccttcagtacacagtctgagccaagccctctaccatttgccatggcaagagtataccaaattctaaacctgttgctcacgtatgccaccaactataaatgtcagcctcctctttcctagtcttcctgtccactcagcaccacctggaaaaactcttactcgtcttttaaaccgcagttcaaggaccacattctgtaggaagactttccaacaggtaaccacagcctatttcctatgtccacaccttacacatatttctatcattgcacttatcacaccataatgtaattactcttctacaaataagtctctcacactagaccacaagctgcctgaggaaaagaaaagtctatatcctctttttttgttggctttttgagacacagtctcactctgtcgcccaggctagagtgcagtgctacaatctcggctcactgcaacctccgcctcctgggttcaagcgattctcatgcctcagcctcttgagcagctgggattacaggcgcgcgccaccatgccaggctaatttttgtatttttagtagagacagggtttcaccatgttggtcaggctggtctcgaactcctgacctcaagtgtccacccgcctcgacctcccaaagtgctgggattacaagcgtgagccactgcacctggtcgaaaagactatatcctctcaacctttgtatctgcagaacccttaaccctacacagcaatttccagcaaatatttttttgaattgaaatgaagaagtgaggtcatgaggctgaagtcagacaactggaaggccaaaacaacaaaacctggaaaaatacgtatttactcaagaagaaattctcccaccaggccactgagaagttagctttgcccactggagaggacactgtaacagggattcaagtaagcctagtggcgctgagggacgtgatataggtcaactatatctttgaggtgctctccttacactcaatgcacttttacccgaatgacgttaatttgactcctgataagatgagctaagtcccttcaacagtgcttggcaccaagcaaaactaatagcagtaacaggaaagtttaatcctcatgatgaattatttaatggggtttcaaacgctgtccctgagacttgaggcagtaggctccagctccattttccccaagtctaaaacttgataggttgatgtttcagactcagagattcggtaatccaaatgatggaaataattcttacccaaacaccttttcaactatttttaaatactgttgccaagcatcctaatatcatgtgtacttaatgaatttagcctagggatacttttacatgtcaaaaaatcaaaatataaacctaagcactacgtttcatccagtgtttcagcatcccagatttgcttccctaaatgaacattaagcttattatgcaatgtgccgctaccaggagccttagacaaaaccctaattgtgacttaacctatcttaatagggttttaaggaagttagctgctaagaaagtgactatccttaagcagacaccaaataaatgtgaagtcattgattgagggcttagggtataggtagctatgaatctgaggacataaaacgcaaaactgaggggcaaatcgtcatgttccttaagattacgactcatccacattccttcagacgtttaatttcaccataataggcactgtttaataagcaaagcccaagtcgacttccttcgattttacatggcgtccaaacaccatgtcaagtctgaccctctcattttttaagtcgaatggagaggatatgtagcagctagccttgagcacctaaccacttttcaaaggagctacgcacaaaaataccctagcaacatgccacggtgtcagaaaggctcaggttcccaacaccatgcgggtcagccattaggaactcaggaagtgtttcctctaagcgggggaaacctaggaaggcttcctgaacgaggggtatttgcgccaagccttgacgtgagtctcgaacagttgcagtgcctccaggccacgcgggagggaggaaaggacaccccgggccggggcacaacccgcgggccggagccgcccgcgcccatcccgctcaggccgcagccaggcacggcaccctcccgtccccgagccacgtcgctgctcgtgggctcgcggagcactccccaggtctcacctcgggccccacaccagaaggagaaagctaggggccgcgccagctccgccctcccccgcggggcggcgggccccagcccgggcacaggaaggccacgtccccggggagggacgcccgactcgatggtctgcgcagggcccgtcggccccacgtgacgtgcgcgcagccaatcccagagaggccccccgatcatcgagacggcggcggtggtgggctagacgagtttcgcgcgggcgctcgccgtcccccgcccagtcgtactcggcgccccagctcggggctggcgccatcttcttggaagacaggaagagaagccaagggctccctccccgggaatggtccggaatcccgcaacaattgcccttccgggacggctttttctttttaagggggacttggttccttttaacaaagggctttcccccattcggttaccaccgaaggcaaagaatctcttgaccgnnnnnnnnnnnnnnnnnnnnnnnnnnnnnnnnnnnnnnnnnnnnnnnnnnnnnnnnnnnnnnnnnnnnnnnnnnnnnnnnnnnnnnnnnnnnnnnnnnnnnnnnnnnnnnnnnnnnnnnnnnnnnnnnnnnnnnnnnnnnnnnnnnnnnnnnnnnnnnnnnnnnnnnnnnnnnnnnnnnnnnnnnnnnnnnnnnnnnnnnnnnnnnnnnnnnnnnnnnnnnnnnnnnnnnnnnnnnnnnnnnnnnnnnnnnnnncttggtaaaaggagaagaggctacgcttgacctccccccccacccccagcctctatatggccaactgccgtgggaggagcacggcgcttgcgcagaggcggacaacgcggacgactctgggcttgcgcactcggaagccggccgcatgggggaggggaagaaggccaggtcgcactgagccaggaagcagttggcaaaggggcggggtgacgcggtgacgcaatccgcctgcgcgctgggcggggcggggcgggctggggcgggctgtgagcggaccgcgagcgctgggcgggtccgcggcgcggtcggtcggcgcctattctcgggctgtttggcgggtgagtgtctcgccggtgtaccccgcacaagttgtgggccggccctcccgaggagctgcgggggacgcgccgctcgtcccatactctcgggcggtggtcggctggctctggggtgccggcggggcggtgtgggggaggggcggccgagcccaggctcttcggcacttatcgtgggctcccccgtcccgggcggtcctagtgccggcgacagtggctccgacacgggcaggcccgggcgcgggagtggggattccggtgaccccttgttgaccctgcgggaattcctctgcactgtcgtcggtgctgggcctcggggcgtcgagtgcggtcgaggtcgggaggtttggtgcttggagggaggatacaggtttaggcccgacaaacacttagagcttgtgtggccatcttgtctttctaacggtgccatttcctccctgaggcgtggaggactggccagcccccaaacctccaagcccatcggctggatgccgtggataagcgaggggagagcgactaggccctgtctgcgggtaccttcggcgaggagaggcgacgaaggtctgcaccagcgaggcacggacaggcagcagggggtagggtatagggttggrggccgccgagttggcccggggatgaggagcaaacctgtggcttccgtggtctcagtggagtcccaactgtgacctggcctactggcccagacaaacctggcttgcttttttaccttttcggtctaattcttgtcagtgccaccagaccttgtcctctctccacggaaacacacgaaccaactacactgaacttcttgtagttcaaacttctgcacctttggccattgcccaaactcttaaatctggctacttcccaccttaactgccttctccttacctagtctgtgcttgtgggattccgcccaaattagatttcctccagacaggcttaggtgtttacctgatgttccagatggtatttgtccagtggactattggtgctgtgagggcagggcacatgttgtcacccatactcattgcctcggttggtgtctagcacctagtaggttctcaaatactttttgaatcacagtgcctgccgatatatttaatgtttcaaaatagttctgccgtcataaagaaaaacatcatggtgtaggggtcatgaaagctgattcttgatacttctgatttgagcctcattgttttcagtgatttttgatagctcccattaatgggttctttgcaccacccagcatcctaactcatgatgtgtactgttatgtataatcttggcattgatctcattagctataaaggttgtcctgattttttttcctcaacttccaccttgatttctctcaccagtgccacagccaggaataaagaacaagagcgttttaattagatcagatttacattctgactggctcttaaactagcaaggtgacctagggaaaggggccagggtttccctctatcattcataaatgtaattcagggcccctttttatccccaataccagcatacagaaactgctgtaaaagaagaagttgtgggtatttttttttttttttttgtctggaggaatggggacaccaaaactcatttggcagcagaggtgaggtaaggccatttgtattgtctgttctgttagtagtcatacatgccacttatccctgccccagtccctgttaggagtgttatgtgggtatactgaacgtggaccttccccgaatccaaagaatccagatgctttgaataagatcatggaccttccgggttctacatcgccagatgttgttcatcttctatcttttgttttgcgaaaattggttttttatgtgtattggggttattctgtggaagaaataagctgtgggtcaagattaaagaactttaaacaacttctggcatgtggaataaacacgatctgaaggaacaaaattttcatttgactacatttttggtccaatttgcacccagtgtttaagttaatcacagtgcttggcagtttgtgttgctggatcaaggctttctcactgaaaaccatgtgcttcagaggttcataattcctctttcaccttccatttcacattagttaataaattatgagagaaaacattgtggatccaagttatgtttcagaaaaaaaaaaacaggaaaaaaaaaagatggcaggagaaacttggtaaagtcaaagcaaagttgaaatgtcagtttaagacaaatagtttctccattttcccatatgtgtgcacagggttcagtgaggctgaggggttctgtggaggtgcgggagaggtgctctatggtatttctatgttgcactgtgtgggtttgaaatcagatacatgtaataggtgataaggtaagtgcctgctcttttctatcctcagcattggcatttaatctttccatgtgaacttaaagctcattttatccaatcctttaagaaaaaagccacaccattagggattccagttagaaatggactaaataacatactcatttggggaaaataaaaatgatttgatttatgtaggacctgttttctagtttggtccctacttgtttggatttttaaaaattctgttgtaaatgatgtgcccccatttctattccttgatatttgttgctggtacttgacttacttgagatcttatatttagctaccttactaaattatcgtattctagaatttttttaaccagagtatttgtattttctttttttttttttttttgagacaaagtcttgctctgttgccaggctggagtgcagtggtgcgatctcagctcactgcaccctccacctcccgggttcaagtgattctgcctcagcctcctgggtagctgggattacaggcaggcgccaccacacctggctaatttttgtatttttggtagagacggggtttcaccatgttggccaggatggtctcaatcttttgacctcgtgatatgcccgtcttggcctcccaaaatgctgggattacaggcatgagctaccgcacccagccgagtatttgtattttctgtgtattcagtccaatcagcaaaaaagtgttttcttttgattttcttgtttcattatattcagtaaactcaccaaggtagtattaaataatcatggtgaaattgcaatatctggatcttacttggatcttgattcacatgaaaaaaatgagagaatagagaatatgaatactgattggatatttgattgcattaaagaactagctatgtgtaaggtttgtcattttaggaagcccttatttttagatatgtgtagtggaatataaatgaaatgttacatctcgtatctgcttcataatcatccaggcagtggcattgatgattgtggaaatagatgaaacattattgaccttcagttgctaattgttgaagctggataatggatagcacatgggggttttgtttgctttttgtataggtcttcatgtaaaagttttcatgtaagtgcttaaaaataattatggaagggcattcctgccgaattatcggttgtaatttaaatagatttaattttctattgtttagaaaacagtatttgcctttggttttcagaaatatcctgaattagatttaagcagttttcctttttttctttttttgagacagtctcactctgtcacccaggctggagtgcagcagcaccatctcggctcactacagccttcacctcctgggctcaagggatcctcccacctcagtctcccacttagctgggattacgggtgcccgccaccacacccagctaatttttttgtattttttgtagagacagtgtttcaccatgttgtccagactggtcttgaactcctgagctcaagcgctcctcctgcctcagcttcccaaagtgctggtattacaggcgtgagccaccacactctgccagcagttttcttactgttttcattatgattggttgctgaatttcatatgcctcatcagcatctattaatgcatgattttttttcccctatactgtgttgttggattaatattggtagatgcttttgatacattcctggaatctaattgctagcaaatattgtattcaggatttttgcatttatatttgtgagtgagattggcctatggcgttcattcattcctttgttcctttcttatgtctccatctgggtttgttattaaaactgtgctgtcttcataaaacaaattgttttcccttttctctatagaggcttggaatagttaaatgactttggtcttgtccaaggttannnnnnnnnnnnnnnnnnnnnnnnnnnnnnnnnnnnnnnnnnnnnnnnnnnnnnnnnnnnnnnnnnnnnnnnnnnnnnnnnnnnnnnnnnnnnnnnnnnnnnnnnnnnnnnnnnnnnnnnnnnnnnnnnnnnnnnnnnnnnnnnnnnnnnnnnnnnnnnnnnnnnnnnnnnnnnnnnnnnnnnnnnnnnnnnnnnnnnnnnnnnnnnnnnnnnnnnnnnnnnnnnnnnnnnnnnnnnnnnnnnnnnnnnnnnnnnnnnnnnnnnnnnnnnnnnnnnnnnnnnnnnnnnnnnnnnnnnnnnnnnnnnnnnnnnnnnnnnnnnnnnnnnnnnnnnnnnnnnnnnnnnnnnnnnnnnnnnnnnnnnnnnnnnnnnnnnnnnnnnnnnnnnnnnnnnnnnnnnnnnnnnnnnnnnnnnnnnnnnnnnnnnnnnnnnnnnnnnnnnnnnnnnnnnnnnnnnnnnnnnnnnnnnnnnnnnnnnnnnnnnnnnnnnnnnnnnnnnnnnnnnnnnnnnnnnnnnnnnnnnnnnnnnnnnnnnnnnnnnnnnnnnnnnnnnnnnnnnnnnnagcaaaactccatctcaaaaaacaaaaagaaaaccagcttttggatttgtttacccttctttttccccccctcataattcattttttctctttattgatttcctgttttatctcctaagttttgcttttatcttccttccattgctttctagagattgcttatggctttgcttttgttaccctccttgatcctggggatatccagtaatgtaacaaattactgggagttacttttcatctttttccacccaatttaagcagataattatttgagaacattgactgtaaaaatgtttttcaaattttgtttaggcttttttttatggtagatacatgacttcaaacattttttaaggtattgattcaaatttctctatgtctgctaaatcagatgtatttgttgtattactcagttcttctctgtccttgcacatactgtgtttactgaatctgtccggttctcagagaactctrttaaagtttctcacttgaatttttttttttaagtttgtatttttcctagtccttgctttatgtgtttatctacagtgattatttgaatatacaggcttatgaatattacatcttccctataaattgtttcttttatcattatagcttgttatccctgttattctgcttatttttactttaattcccaccttggctgatagtagtgttgtctctcctccatgtttgcactagcctgctattttttaccttgtccctttattttcagcctctctttgttccttttgctttaagcatatacgttatagctggacggtttgttgtttttgttttttttttcccttggtttttcaggccaatctgtcttctcctttaagcagagaatttggttatttcacatttatactgataactgatattcttgaattttgtccccattgtcttgatttaggattacttctgattttgtttcttcttgttccttttccatatttttgctggtttgatgaagttgctgtttcctccatatttttctcttaatttggaagttctcattgttattttctttaatgattacctttttttttactttcataatcagatacttatctctgtattatttgaaaannnnnnnnnnnnnnnnnnnnnnnnnnnnnnnnnnnnnnnnnnnnnnnnnnnnnnnnnnnnnnnnnnnnnnnnnnnnnnnnnnnnnnnnnnnnnnnnnnnnnnnnnnnnnnnnnnnnnnnnnnnnnnnnnnnnnnnnnnnnnnnnnnnnnnnnnnnnnnnnnnnnnnnnnnnnnnnnnnnnnnnnnnnngataactggggacctttccgtttcaaagggaaacagaggccccagtttccaggaagtaaattttgggggaggggattcgagaggcaaagtaaaagaagctttttattaggttttaagctccaaaaggaacccaatttggcagcagtctctcttttggggttgttactaaggttagccaccagactccatgctttccaaagcttcagggtttctaaaatttgtttaaaaattccacatatctctggctgggcacagtggctcacacctgtaatcccagcaccttgggaggctgaggcgggcgggtcatgaggtcaggagatcgagaccatcctggctaacacagtgaaaccccatctctactaaaaattwaaaaaaaattagccrggcatggtggcgggcgcctgtagtcccagctactcgggaggctgaggcaggagaagggcgtgaacccaggaggtggaggttgcagtgagctgagatcacccactgtacttcagcccgggagacaatgcgagactccgtctcaaaaaaaaaaaaagaaaagagaaaaaaaaattccacatatctttaaaaatattgtcacatttttcagacactcagatgccttcagtactatttcctttcctcataaatgtagttcacattgctctctgtaccccagtgtcaaaatctagttctcaggtagctctaggaaactccagtgggtggcaaacatgttcaagttacagtgctctatgtaatgaagtcccttactccttgaaaggtttcaaagagagaggggaaatgacataattccagaggtcagggaagtatgtatccgtgtgtatcccatttgtgtccctagtgtctaacatatagtcagtactgaaaaaaaatttgaatattattgaaaatatggaatatgtgcgtacatatatatatacagttgcttttatcaacttaaaaatttttttaattttttaattttttgtagagatagggttttgctatgttgcccagattggtgttgaatttttggcttcaagcagtcctgcctctgcttcccaaactgctgggattacaggcgtcagccactgcacccagccaccatctaattttttttttttttttaatggagtctcactctgttgcccaggttggagtgcagtggcatgatctcggctcactgcaacctccgcctcccaggttcaagcgattctcctgtctcagccttctgagtagctgggatcacaggcacgcaccaccacgcctggctgaatcagtatttttagtagagacggggtttcaccatgttggccaggctggtcttgaactcctgacctcaagcgccaccatgcctggctgaatcagtatttttagtagagatggggtttcaccatgttggccaggctggtcttgaactcctgacctcaagtggtctgcctacctcggcctcccaaagtgctggaattacaggcgtgagcatcacgtctggcctaatttttttaatcraatttatttttgtaatgatagatgcttgtcttattcctagggaaatatttgaagtaattgagatgctgtcacctaaaataatcaaaaggctcctgattcagttaaaagaattcatttaagtacagagtgtaagcgagctacaccaaagaatggtgattagcgctcccagggtggggaaaaatgaggattgtttatataggcaaaatggaggtgccaaacagaattataacattttcrgaactaaggctcatttaaagatacaaatttgattggctactattgattrcacttgaagggatttgtttaacttccttttgtaaagaagtaacagtcataaggatctctcatctcccagtcatttagtctagttttgaataaagaatagggggtctggttaatatatacatctaaacacaaaagtcagaaagaataaaagtagtgatgttacaygagccagctgtcagtgcytaacttttccctttggcctaatgcatttggaaggtcctgaaattgtattttctttttacattgcctatgtatgtgtaagtcttcttcaggtcagttcacgctgttaaatatacgtgcgtatacatacatactatgtatgtgcgtttatgtgtgtctgtgtgttttttttttaacagacgaagcttcacaaaagatgtctaaggtaagatcatacttcatgtatctacagcataaggagaaattgctttatgttttcagactgttgacagtcgggacttatatgattcattatttttaatacaactgatacatttgattcattaacacaaagagttctaatttagttgtctttttttttttttttgagacgggagtcttgttctgtcaccaggctggagtgcagtggcatgatctcagctcactgcaacttctgcctcccacgttcaagcgattcccctggctcagcctccggagtagctgggactgcagacacgtgccaccacgctggctaattttttggattttagtaaattcggggtttcaccgtgttggccaggatggccttgatctgttgacctcgtgatccacccgctttggccccccgaagtgttgggattacaggtgtgagccaccgtgcctggcctaattgtcatcttaaaagcttggagctttctcttttttcaggcttctactttcttttctctacacacatcagtaacagtcctttggcccccttagttcattcccagcagaccagataatttagaattctgataatttattatgatgaamttgatggggctcttagacttgataaattggtttaaatcagcctttgcaagttagttcagagataaattagtgctaaagaacatattctgagaaaagcagaacttgtggttaacattgcaagattattatttctgttttttttttatctttgaatcctgtgggtgttcattactgtccaatgcaaaatcatcataccagtttttgcattttataccagtgttagcatggaacacagataagcaaaaaaaaaaagtcattatttcaccactcaggaataaccactgttaatatgttacatatattctttttcacctgtgtgtgcatttgactatacatttacaaaatgtaatcctaaaggaaatactattttgtatcttgcctttttcaattaataaattgatttttaaaatttcttctcattttcagtatgccactgtctagattctggttacttctgctattcttgccttctcatatctctgtcctctctctcatcagatacccttctgtcaaggaatattgatgcttcagtgtagtcatctatgatcttctcattctgtcttttctttcttggtctttgacactagatactcaacatcccacccctaatttgcctgcctcacccttgatgaaactctgttctatagagctagaagcacagcaagagagatgcttttttcctcgatacttttcagaaatgcattgcacctaatacctgggagaagctattctttagccaagtttgttgaatgaaaccattcattcaaagtactgtcagctgtagcagtactttgtaagcttgactgattttcctggaactccatagtctctcaagtcgaaatttgaaattgcattaagatgtattaagcatgtatcttctatgtattgttaaattcctaaacagaatactgattaacaaaatgttaattttcagtcgcatacaactaaggagttatactagataagtttttctttttttaatgctcctagttgaatactactggttttctgatagaagtatgacyttctggaagtgtttatactttttaaaaaatttgtgaaaamtgataacctatgtttgtttcatgtctaactgattatatcttaaaagcaactactaaggtgtttattagtttgtttgttttttaatcttatttagcaacagccaactcagtttataaatccagaaacacctggctatgttggatttgcaaacctccccaatcaagttcaccgaaaatcagtgaaaaaaggttttgagttcacactgatggtggtcggtaagaaattaatctatagtctccaacttactaaataaatatctcccctttccaatctctggagtatgataacgtgacctataaagaaagaggaaaatttggcagagtcaaataacttgagaatttgaacaaatatatgtgtattcattagaaaatttttctcaggagcaaaattatttttctgtcactttcttatttatatgtagtgaaagtttactcattgtgtcagctaggctccaaaatggcccccagtgattcttatctcctggtattcacaactttcttgtcccttcctgcattgaatagggttttacctgtgtagccagtaggacattgtggagatgaaagtgttgtcattttctaagactaggtcataaaaggcattatggccccccaccttgcctcttctcaaattactcactctggaggaagccagctgtcatgtcaagagaacactcaagcagccttacagggaagcccaccaagtaaggaaccaaggcctgccaatggctgtgtaagtgacccgtttcagaaatatcctccaggccaggcatggcggctcacacctgtaattttagcactttgggaggccgaggcaggcaggagtttaaaatcaggctgggcaacatggtgaaaccctgtctttacagaaaatatgaaaactagccaggcatggtggcatgtacctgtagttcctttcccctgagtccaggaggttgaggctgcagtaagctgagatcatgccactgcactcaagcctcaaaaaactgggtgaatgaaaccttgtctcaaaaaaaaaaaaaaaaaaaaaaaaaatccaggcatttacagtgtaacattcacaatgtctaatgtctaatagaaaattgtgtggcatcaaagaaacaaaaactgtacataatcaggagaaaaagcaggcaatagaaacagatccagaaatgatagaaatggatctcgatggcaaagaagaactctattacttaaaggaaagcatgaatataataagataaaggaaagatacaacagaaaaccaagtggaacttctaaagattaagatacaaccgaaataagaaattttcatgataagcctgacagcacattatacactgcaggagaaaaagcacagtagaagcacagtaagggaaaagctggaaaaaaaaaagaaattgaatgtgccctcagtgtcctttggtacattgtgaacagtctaatatatggattatattcacagagaagacaggaaagcaaaaaaaaaaaacatgaaaaaataatgcctgggaattgtscaattttcagcaaagttgtaaatgcacagatccaagaagcttgacaaataccaggcaaaataaatataaagaaaactacaccaggacgcatcataacacgctaccagaaactactgatgagacaacaagcagaagaaataatagagaaaagcacaccaaagcctgtaataagcaaatagaccatagataaacagaaaggtctttaaaagtagccagatcaggcctggtgtggtggctcatgcctgtaatcctagcactttgggaggccaacatgggtggatcacttcagcccaggagttcaagaccagttcaagagcaacatggtgaaaccctgtctgtacaaaagatataaaaattagccagccttggtgggggatgccggtagtcacagctacttgagaggctgaggcaggaggatcacctcagcctgagacgtcaggcctatggtgagctgtcatcgtgccactgcgctccagtctgggtgacagagtgagaccttgtctcaagaaaagaaaaaagtagccagaacaaagaaatttattacatacaggggattgaagataagaggagtgaccactgaattgtcattaggaataacataactggtcgggcgtgatggctcatgcctgtaatcccagcactctgggaggccaragcgggtggatcatttgaggtcaggagtttgagaccagcctggccaacatggcaaaaccccatctctactaaaaatacaaaaacctgggcgtggtggtgcatgcctgtgacccagctacttgggaggctgaggccaggagtatcacttgaaccagggaggcagaggttgcagtgagccaagattgcgccacagcactttagtctggcgacagagcaagactccgtctcaaaaaataaaattaagtagaaattggctgggtgtggtggctcatgcctgtaatcacagcatcttgggaggctgaggtgggcagatcacctgaggttgggagttcaagaccagcctgaccaacatggagaaatcctgcctttactaaaaaaaaaaatactaaattagctgggcgtgttggcacatgcctgtaatcccagctactcgggaggctgaggccggagaatcacttgaacctaggaggtggaggttgcagtgagccgagatcccatcattgcactccagccggggcaacaagagagaaactccatctcaaaacacggtggctcacgcctgtaatcccagcacttgaggaggctaggcgggtggatcacctgaggtggcaagttcgagaccagcctgaccaacatggagaaaccccatctctagtaaaaatacaaaattagccgggcatgnnnnnnnnnnnnnnnnnnnnnnnnnnnnnnnnnnnnnnnnnnnnnnnnnnnnnnnnnnnnnnnnnnnnnnnnnnnnnnnnnnnnnnnnnnnnnnnnnnnnnnnnnnnnnnnnnnnnnnnnnnnnnnnnnnnnnnnnnnnnnnnnnnnnnnnnnnnnnnnnnnnnnnnnnnnnnnnnnnnnnnnnnnnnnnnnnnnnnnnnnnnnnnnnnnnnnnnnnnnnnnnnnnnnnnnnnnnnnnnnnnnnnntaatgtaaatcttttgttgttgttgttgttttgtttgtgtgttttgtttttgagatggtttgagatggagcctcgctctgttgcccaggctggagtgcagtggcacgatcttggctcactgcaagctccacctcccgggttcacgccattctcccacctcagcctccaagtagctaagattacaggcacccgccaccacacctggctaattttgtttctgtatttttagtagagacggkgtttcaccgtgttagccatgatggtctcgatctcctgacttcgtgatccgcccgcctcggcctctcaaagcgctaggattaatataaatcttacacagacatcttcatgaaatagatgagtaggaaacacctaccagcctattttattaagccagcattatcctattacaaatgacaagaaaactacagactaatatatgttagaaatgcttgtttttcggtgccataaagaaatagtacttgaacataaattcagtttcctcagcaaggccatttttactttctacagaaagggtacactcgccagcagttttgtcaagagggtacaccgaacaaagaggatcatttgtaacctgggtcatttataacctgatgcgtctaccttactgctgtgtctggtttccactggctggaacggtacctcacattctgtatttgtcctgattggctagcaacttagaacttcttaaaagaggcaaaggcagaggagaacaaaggaaggaggaatgttgagaaaggtaaaatcaccttcaaataaggaagagcaacaggctatgacctaatgcttgcttggaccagcataagcatgccagggcaaatatttaggctgaattgtgcgagctaagaacataaagtactttgatttcctcattacggccagcagatatttaagaatgttagcacaggtctttgaataaattatgcttctaagagaagttagtattattcctaattagacggggagtaaagcctttaaagaggagcctctactttttacatatacacgagctagacatggacatcttaattaaatcttaccgagtccagcaatatatctaaataaaaagtcaatgcactgagtcctgctatgatgcaacccgtgtgtttctaaaaaaatcaccatgccatacagcatgatgaataaacaccacagggcttgtgcagaaaacagggacacaatactcagaaccttcatcagcgacacaatgggaaaaaagataggaacgtaagaattataccagtccacatgtaaatggttaaaaaataatgactgcaccatagaagccctgaggttggtttgtgcaagtggacatcaggagggttgcagcttgtgtgcttttgtgtagctgtggagggagggttttctaaagttggaaagtcataacactacgtgtaaatgggtgtggctcataacaggcagtgaagaaagatagctgatagatatttaggggtgtgtgttgggaatatccccaagtggtttgattctgttggatgcagaattaaacactgtcttctgtattctcctagtttctcaccaatgagatcatatataataagcaaatacgaaatttgtattactctgctattgttccgtaatgtatcaatcccattggaacaaattctcattttcaaattaggactgactaaacaaatggagtttatcttaggaatacatgatgcaacattcaaagtcattgtcatgcagtgtagttatcaaggaggaagatgatgttagctgaaaaacgaatttgtaaaaatccaggacccactaaagataagaaattaggctgagtgcagtggctaacacctgtaatcccagcactttgggagcccgaggctggcagatcacctgaggtcaggagtttaagaccagcccccccaacatggtaaaacttcatctctttagtacttttgtaaagtactgaaattagccggccgtgatggtgggtgcctgtaatttcagctatgctggaggctgaggcgggagaatcgcttgaatctgggagggggaggtttcagtgagccgaggtcatgccactgcactccagcctgcatgacagagcgagactccgtctcaaaaaaaacaaaagaaaaaaatcacaaacaagagtattaataattttaagacagtaccacttaacagtcacaaaaaatattgttcagagataaatttaacaaaacgtgcaagacctatacactgaaaactacaaaacagtgctgagagaaattaaaatctaaagttgttaagatctgccccatttgtggattggaactattatgccctttctcccccaaattgtcccatattttttctgagacagtcttgctctgtcatccaggctagagtgcaatggtatgattttggcaacctccacctcccaggtttaagtgattctcgtttctcagcctccccaagtagctgggactacaggcatgcgccaccacgcccatctaatttttgtatttttagtagaaatggcattttgtcatattggccaggctggtgttaaactcctagcctgaagtgatccacccttctcagcctcccaaagtacaaggattactactggcatgagccacagcgtccagctccaactttcagaaataaaaattaacaagctgattcggaagtttaaatgtaaatgtagagggcctagaacagacaaaaacagtttagaaaaagagcagagttggaggattacagtccctgatttcaagacttaacagcagtaatcaagacagtgtggtaagggtagatacacagatctactaaacagagcaacagccaagaagtagacccatcaatataataagttcaattgtttttttggtttcgttttttgagaaaaaagccaagttgattcagtgggggcaagtttagtctttttacagtctgtaacaactagatgattatgtgtgaaaaaatgaacttcaactcctgcttcacactgtatatcacaacctgaaattatagtagatttaaatgtaaagctataaaaactacaagaaaatgggcaaaaaaatttttatgactttgtagtaagcagatttcttaagacatgaagaatagaaattataaaaacaattgtgcattattaaaagtttgccttcttgaaaagacatcaataggaaaataaaacgtgaggaactcagaaagtattcatagtaccatatctgacaaaggatatgtgtccagaatatataaaaatattgcacagatcagtaagacgaatgacccacttacaaagagggggcaaaagatctgaatagacatttcactaaggaagataaacaaatagccaataaacccacataaaggtgtccacatctttggtggtcaggggaatacgcattgaaaccatgagatgccactacccagccactaagaggcaggcactccaggtgtcagcaaggatgtgaaacaactggaactcttactagtgagcatgtaaaaatgccacaaccagtatggaagccagtttggtacttccttaacagttaagacccagcaatactgcttgtatgtgtttacccacaagaaatgaaaacatgtccataaagatttgtatatgaatattcatagctacttttctcaaaatagccccaaactggggacagcagaggtatctagagagtggattaacaaattgtggtgtagccatacaatggaatattgccaagcactacaaagaaacgaactactcgtagatgcaacaacatgcatcagtctcagagctttgttgagcaaaagcagccagacacaaaacaggccatgttgtatgatgccatttaaaagttttagaataagcaaagctgatacatagtgacaaagtagattggtgtttgcctgcggtggggactggagagggtagacttcacagttacacaaagcaactctagggttatgaaaataatctttatcttgagtggagtttgattatctgagtatctacttttgtcaaaactgtacagtttaaatgggtgtattttagtatttgtaaatcgtgcctcaaagtggctttaaaataaaacaggtagggggttgagggtgagtagtgaaaagtaaaactagaaagccacaagaatcctcaacttttaaattgtagtattaatagctcaagaaaaatgggtgtatcaggaaaaccctaacacacctaattagtaaatgagagactattgaagaggaaaggcagtttttaaaattttgtcagacttctaaagaaacaggtaaaggggcattgcaccaccgtttattaaaaggatgacttaatgggataacaggcatttagtcaaatttttacactcatatttaggcatgttcaacacattgttttgttcttttcatgtgtgaaaattgcagttcacttaaaatgcagtcctaattttgtatgtctgcatgtttctttttgttttgttttgttttttgagatggagtctcgctcagtcgcccacgctggagtgcagtggtgcgatctcggctcactgcaagctccgcctcccgggttcacgccattctcctgcctcccgagtagctgggactacaggcgcccgccaccacgcccggctaattttttgtatttttagtagagacggggtttcaccatgttagccaggatggtcttgaactcctgacctcatgatccgcctgcctcggcctcccaaagtgctgggattacaggcgtgggccaccgcgcccggctgtgcgtctgcacattgcaaattcacttatttgttcttgattttcccagaattgttttattctgtaagggacagggtctcactctgtcacctaggctgaagtgcagtggcatgatcatagcctgctgtaatctctaactcctgggctcaagcaatccttctgccctagcctcccaagtagctgggactctaggtacaagccacaacacctggctaaggttttggggttttttttactttgttttggttttttgggagatgggggtctcactattttgcccaggcggggtcttgaattcttagcctcaagtgatcctccagccttggtctgctaaagtgctgggattataggtgtgagccactatgcccagccagaaataatttttcaaaagagatgtgtactccttcctcatgctttgcagaacttaacagagggtggtttagggtacccagaggacagtccagcaccagtagtaccaagatcagaagcagttctccatgcagaattgagacctagatgatcatctgcaatgaagcagtgggatttgtgcttcccttcaaatgtaaaatttaatttttggtattttnnnnnnnnnnnnnnnnnnnnnnnnnnnnctgaaattagtcgtgtgaactcaacaaagtgagcgggaaagttgcccgacatatgacagttgccagtgctgggaaacggggatggatttaaagcaggaagaagacaaggtggcagaagggggaggttgcagagtgagggtgtgcatgtgagcccaccagaccacaggccctgtcctgctcacacgtttctgcagctcgggaagcacaagggttgttgacactatgggatagatatgttcagttttctgaaaatgtggtgagtttagtgactagcagaactgataattgaaaacctgctttgcattctatttgtcaaaaataaaaaccaacctctaaagtacattcctcacatttgtgaacagttatgtttctaattatatgatgttcaagttctgtagtctcatagacctggattcaaatcttggccctgctctggatagtactctgaccttgggcaaattagagtttctttgagtaccctcaaagatcatactgcaaacatagtagtactgtaggtactaaacacagaatgatgtttgtgaggtacttagcccagtaccaggccttatgtaaacacttaaccgattsaatggtgtcatatgaataaggtcatgacaaggtttttctttttatttaaaggtgaatcaggtctaggaaaatcgactctcataaacagcctattcctaactgatctgtacccagaaagagtcatacctggagcagcaggtaaaaacattcttatgttactgtaagtgtaattctacatgaaagatgctgaagactgcctaattaatattttatgtcttagctgtgtgttttgtttgttcttgttcagctttgaacacaaggaaaacacttttatggggtaggtgtgctgcaccgaggtccttggatttgggttgtagactttctttgacacgtatccatggatccatcctctcttgagtttgtctgtaaaatgtaataagtagtttctgcctatattaaatatttgatggaaggattaagtgagaatgttttacatcaaaaatgctgtgtaactagaagattactaggatagatgttcgaattcatctactgtcagaaagttccagcacaggacaccagcatccacaaatgactgttgaatgaaataggcacacatagtgagagcctaagacttgggctgctgcaagaatatgtagccctttcagaatatttttgaattcagtttttaaatgaattcgtaaattgctttctttttcccaggaacagaaattataatttttaacatttgtgtttttaaccttccccagtagcacaataatcttagctttaaccttcccctttctgacttctctgggatctttttttcttaatccccatggtatctttggagaacctacctctgtagagaggcagtagactctgaagtcacctgtcgtaagaacgtgagctttcctcttcacatgctgcttatattccctattaagtttgtttcttttctagaaaaaattgaaagaactgtccagattgaggcttcaactgttgaaattgaagagcgaggggtcaagctacgcctgacagtggtagatacccctggctatggtgacgctatcaactgcagagattggtatgctcccccatgcccagggatctgcatttgtttasttaatatacttcataaatttatagatartgttaatgagtgattattaagtttgggattgctgtatataataaaacacctagacaatttaaagcgtgttaaatgttgactttttaaataaggaattttatagagagtaatttttttctggtactctactgtaatttgagatcgcaaagccagtcatccatagactgctagtataaatgaaacacctggatttgagccgtggttggtgaccgagatactgtagtacatcctttctatgtggaaggaagtgaaacctgttagagagtgggttgagtcgtagtgtctgtaaatgactgctcattggcatcattttcacaaataaggaaatgaagaagtagaagatagagcagtctgtcacctgtaccgtgcaaagaatgccacttttgttgtacaaactccctcctggttctattcctgtcaacataaagcatcaggtttccaccactagatgaaaaggggaaggttctgttatctttctcctacatttaggaatttctcccttcttacatgtgaaagtgctgtactgtttcccagctcagttaaatgctgtttcccagctcagataaacctgttcttgacccatgttctctaccaccctgttcctctgccccttttcacagtcacgttcctgaaaagaattggcagccctggctgggtgcgatggctcatgcctgtaatcccagcactttgggaggctgaggtgggctgatcacaaggtcaggagttcgagaccagcctggccaacatggtgaaaccctgtctctactaaaaatacaaaaattagccgggcgtggtggcgtgtgcctataatcccagctacttgggaggctgaggcaggagaatcgcttgaaccctggaagcagaggttgcagtgagccgagatcacgccactgcactccagcctgggcaacagtgcaagactcagtctcaaaaaaaaaaagaacgaattggcagccctgtctacactggccctctctcaggtgcatcataacctattccattcaggcttttgactctcagcacttaggggcagttatgcttggcatagtttccaaaaacttccatttgccaaatctaaaagtcagtcttctgttctcatcttgaaaatgaattattaaattatgtatatttgggcggaggcacttgttttccctttgaagtcagggaccccctgttttataccctatgattattgttaatgtttctgtttctctcagttttaagacaattatctcctatattgatgagcaatttgagaggtacctgcatgacgagagcggcttgaacaggcggcacatcattgataatagggtgcattgttgcttttactttatttcaccttttggacatgggtaagtaattgtttatcgtggagaaatgctttactacatgggtttgtaagttttacccaaactgtgtattttaatataagaattaagataatttgagrgagaagagttttgtatgtattttttttaaataagtgacaattctaaaattaattttagacttaagcccttagatgtggcrtttatgaaggcaatacacaacaaggtgaatattgtgcctgtcattgcaaaagctgacactctcaccctgaaggaacgggagcggctgaagaaaagggtgagtgaggctggcgtcctgccctccctctgggtgcgactcgggggcatggggatgaagaaaggagtgtgttcccacgctcagtctgctcaggtgtcgggaggcagggcgggagaatttttcctgcattttagtggtggttttcaaggagaacctgatggttacaaattttaatttttgccttcatgaaggtatcaaatttctattctttaaattctccttatatttaaaatgccctcgatgagtagcagttggttacacacaagtaccttccatgggagttaaatgactcaaatatagaaatgtgatctctccatgaagtttgttattttacctaaattctttactgcaaatgacccatacaaggatgtatctaagtagactggttctctgttctgtttggaaacatagcagttgtcagccagcgaagcgcctctcacccgccagcagctcctgtggtgtcccagttttagtgcctcttccgtgtatgtctgtaaagcctctttattgattctctgctatatatttttaaattgcttactttgttctgattatatgctccttaagaaagtccaaatagtttatatatgctaaactctaaaaatacaaatccctaactgaacataccggtacgtgcataaaaatacaaatccctaaatgaacataccgatctgtgcgtgtaatcacagttgctggggcagggtagggggatacagcagggggttcaggcaggaggatcacttgagcccagaagttggaggccaacctcagcaacatagcaatacgctgtctctaaaaaaawatatatatatattttatatatataatatataattaataaatatatataatatatattacatatatattatatctatattatttatattacatatgtaatatatattatatttatattatttatatattatatatattatattatttatatgtaatatatttatattggttatatatattatatttatattatttatatataatacatattatatttatattatttatatataatatatattatatttatattatttatatataatatatataataaatatataatatatataataatatataattaataaatatatataatatatattacatatatattatatctatattatttatattacatatgtaatatatattatatttatattatttatataatatattatatatattatattatttatatgtaatatatttatattgtttatatatattatatttatattatttatatataatacatattatatttatattatttatatataatatatataataaatatataatatatataaaaatatatatatttaatatatctataatatatattatatatattatatataatatatataattgtacatatatttattatatatattatatatataatatatattataaatataatatataaatatatttataaatatatataaatattatatttatacattatatttatatacatattatatatacatttttatatattatatatatataaatataatatacatatattttttaaaataaaagagtttctaggccgagtgtggtggctcacrcctgtaatcccwgcactttggaaggctgaggcaggcacatcaccagaggtcaggaggtcgagaccagcctggccaacatggcaaaactccgtctctaaaaaattacaaaagttagccgggcgtggtggcgggcatctgtagtcccagccactcaggaggctgaagcaaaagaatcgcttcaacccaggaggcagaggttgtttgcagtccagcctgggtgacagagcaagactccgtctcaagaaaaaaaaaaaagaatttctgtaattacccacagaaagaacaactgttaagtatatatccttctagaacatagcttatgtttttggttttgcagaatgaaatcacatagtaatactattctgccatttgatttttctatttaaaaatatttggaagcatcctcatatatatactgtatcctaattcttcctggatgcacagcattccaccatatgaatatactctaacttgtccagtttcctgctgatgaatatttggcttactttttgttttactctggccccttttcttctttgaccaaatttactgtttctttgccccttgctcgctgcttttgctagtgataccctctgcctggaacagtcttccctcagatacctgtgtggggaactccctcactgagcccaacgctgcacacaagatttcacatctccatcccctgctctgctggtagcactccccccacactgcataaagtatttctctagcgtgttttttggcttctcctgacccctgaccccaggtcctgagatcaggaatctgctttgttcacttatgtattcccagagttccgaataatgtctggcacataatagatttgttgcataattgttgtaatgaacactggtgtacatctatcttttcacaattgtgtgagccaaacgaattcttaggaaataagtatacatttaaatttttgaaggatgactaaatttgctctaaagtaagtttgtaacaatttacatttccaaagtgtactcttctctccaccccctaaaactgtcctggttatgttgccagtttttgtaatgtgtttcctgtctgagaaattgtatctcatttgaatttgcctttccttgattgccgatgtgagtatctgtgctggtgttgatgccggttggtgtattctctcaggttgcagggacttggctcttgcttttttattgacttaacacatatacttatttttagatgttgactatcacgttgcagatgatttcacctggtttgactttcattttttcacatttttcttggtgcttttttccaaagcaatttttaagcagcatgtagtcatgtttggcagccttttcctaaattgtctcaagtgcctgccagttttttagaaagtatttgaacctttgaagaacccctggaagcgtagacgtttttatgctaataaatactttagyaattcctacttaagggaacttcaccttttgtactctgctatattaaatttctttgaggtagaaatgggggtggtgtcagggttagaatgctgtaattctaatctctaatcctgtatgcgaaacatttagtgctggattacaacatctgagatgaatcgaaatacttcgagcttttatcccttccttcttgggcctcattaatcacttctcttcctccagtttctccttgatgcctaccagtttgttcattctgccctatctacaagaacctcttgcctcctgccagcctctactagcttcttgccttcaccagcctttcttctagtcagacacttactggtagctgttatctgccctccccatgatcctgttcactcaggcttcctgtcatccacctgcaattgctctctcatgggcttggccaacagttcagttctcagatgtgggccccacctgtggggtttgtgtgattggcaattctacttctgaaacttcccttccttggctgctgaaccactgtgtttgcttttctatctgctgttttttaccaccttccttcctgatccctgaaggtcagtattccttagtattattttgatcacattatttctgtggcttctgatttgcccttccaggtatcttatttcttgttgtgaaccacatttacccacaggagtcctcttttgaccactgatggactcctgtccttccagctcccctgtctctttaaatggtcccacaattcttgaaatcatccagactgagaaatgtgtaaattattttttactcatcacttctgactcctctgctcacttttaaatagcttactaactgtttccgarctcttctctyctccaaagtgtaagctccatctttatgaggccagcataggacaaaagatgaggttagcatggatggatagtagaccaggaaaggggccgtaagatgaggacaggtgagcaagttcatgcttcttattgctcagtttctcccagagataagatggttcctcccatttaggaataaggatttatgaaaagactgaaggtcgagttacagagtaaaggatgtagagaggagggccttttctggagttctgaattagtgcagacattgtactaagaccaaatctctgaccattcaaggccctttttaggtcacattaaggctttccattcttaaaaaccagaaagcaaatccagtgcacagtttgaggtcgggatattttctgctcacgttgctcttgttctctcttccctgaatggctcaggtactgaggtgagaccaaacaaaactgtggcctgcctggtgcctgtgagaatgcccaccatgcaatgagcatttgagtgctagggttttaattgattgactgatgaatgcattcgtatttcaacttcagcccagttctttctcccctcaagccccatcccccacactactgcctgcttgataggtccgattgtgggatttcactgctgactgctggctgcctgttgaatgaaatacagatccccaggtcgctagcctggtgttgatggaactctccactttgtaattccaatttttgtttccttatccaactggatgtcttagattccaaccttttgaatttcttattctcaaaatgcaccccatgtgtcctctnnnnnnnnnnnnnnnnnnnnnnnnnnnnnnnnnnnnnnnnnnnnnnnnnnnnnnnnnnnnnnnnnnnnnnnnnnnnnnnnnnnnnnnnnnnnnnnnnnnnnnnnnnnnnnnnnnnnnnnnnnnnnnnnnnnnnnnnnnnnnnnnnnnnnnnnnnnnnnnnnnnnnnnnnnnnnnnnnnnnnnnnnnnnnnnnnnnnnnnnnnnnnnnnnnnnnnnnnnnnnnnnnnnnnnnnnnnnnnnnnnnnnnnnnnnnnnnnnnnnnnnnnnnnnnnnnnnnnnnnnnnnnnnnnnnnnnnnnnnnnnnnnnnnnnnnnnnnnnnnnnnnnnnnnnnnnnnnnnnnnnnnnnnnnnnnnnnnnnnnnnnnnnnnnnnnnnnnnnnnnnnnnnnnnnnnnnnnnnnnnnnnnnnnnnnnnnnnnnnnnnnnnnnnnnnnnnnnnnnnnnnnnnnnnnnnnnnnnnnnnnnnnnnnnnnnnnnnnnnnnnnnnnnnnnnnnnnnnnnnnnnnnnnnnnnnnnnnnnnnnnnnnnnnnnnnnnnnnnnnnnnnnnnnnnnnnnnnnnnnnnnnataacatcaaaatctatcacttacctgatgcagaatcagatgaagatgaagattttaaagagcagactagacttctcaaggtaagaactggcttcagatccacaacataaataactcctgtttactgttgtccatgttgaggtgagagagattgcctgggtatgttcagttacgagagtatttttgctttcaatatattttaagacctcatgcagtggctcatgcctataatcccagcactttgagaggccaaggcagatggatcagttgaggccaggagttccagaccatcctggccaacatggtgaaatctcatctccatcaaaaatacaaaaattaggtggatgtggtggtgcacacctgtagtcccagccactcgggaggctaaggcaggagaatcacttgaacccaggaggcagaggttgcagtgagccgagatcgcgcctctgcactctagcctggcgacagagcaagactctgtctcaaaaaaaaaaaaaatttgatacagctatcacctaaagcttagaawttttattgtaggtttaatttgttttcgtacaatttgtcccatgtagaaagtatctgacacttttcaagaaaatgttacatacccccagctttccaattcagttttgtagtcaatagcaatgtgttaagtctgtgctgatgttctcgtgttgccagtgaactctggggttccctgtgtggagcctgtctactctgtgtgtctctttctaggctagcatcccattctctgtggttggatccaatcagttgattgaagccaaaggaaagaaggtcagaggccgcctctacccctggggtgttgtggaagtggagaacccagagcacaatgactttctgaagctgagaaccatgctcatgtaagacatttggtgtgttccttctggcagaatttggcgtgaagaatatggatttcagacggggtgtacacttggcccccaagatagttgcagccagcagcttcattgccgccctcagtgtttctcacatcgcagaagtggtgtggggctgttgcagattggtgctgagaaccctcacccaggggccctctgtggcactactaaactagcgcttctgcctgtggcctgtagcctgcagtacctttccttcttgctaagatcttacatctttgatgttaaaaggagaaaaggagactagaacctaaactggggtctgagaggtccccagtgctggtaaggaaacagtcaggctgtataggcccctggtccactgctccaggctgagccacccctggtgccctgctcaccagtctgagactcattgtatggccctggttagctttttgtgtcttccatttattattaatagcaattacagacctgactacaaaaatagtcttctttaaaaatgaatttcatggctgggcgtggtggctcacacctgtaatcccagcactttgggaggctgaggcaggcagatcacgaggtcaggagttcaagaccagcctgaccaacatggtgaaaccccatctgtacttaaagtgcaaaaaataaattagccaagcgtggtggtgcgcacctgtaatcccagctactcaggagcctgaggcaggagaatcactgttgaaccaggaggcagaggttgcagtgagccaagattgcaccactgcactccagcctgggcgacagagcgagactctgtctcaaaaaaataataaattaaataaataaatttcacatattgtaacatgcayacattgcttttactcttgaaaaaagaggctgaggccgggtgcggtggctcatgcctgtactcctggcattttgggaggcccaggcgggcggatcacttgaggtcaggagtttgaaaccagcctggctgacatggtgaaaccagcctggccgacatggtgaaaccagcctggccaacatggtgaaaccctgtctctactaaaaatacaaaaaaattagccgagtgtggtggtgggtgccggtattctcagctacttgggaggctgaggcaggagaatcgcctgaacctggaggtggaggttgcagtgagccgggattgcgccactgcactccagcctgggcaacaagagcaagacttcatctcaaaaaaaaaaaccaaaaagaacaggctgagagtattgcttaaactatacctctttaatcagaggacttcaaagaatgactgatgtggataaatcagtgttttgattagctgaaagtcgctacatatttgccgcatgtctcacttagtttagcaatttgtagtgagttaaaataagtaagcatgttaccatccaagctgtgtcaaacacaatttaatggttgtgtaagaagttaagcgcactcagcccctccagggctgcatccttgtggctatcctgatccccattattgaggggrgtgtagaggctgaagacagggtttggggactttactttagtgtcagttgtgtgtttctcacaatgaggtagagtgagccactccttggctatctcaatccatttccctggatcctgaatcaataggaacgtgttacaatgtttgctcattcttgcctgcttttaagtattttgaataagctaggcaattaaaaaaaawtttttaagagtgcttcataagatgaatggaaggttaagttgctgactaatattcttggatccagaatattagtccttcactttatggtcttgtacatagcttaagctaaccaactcttttttctcatatgagagtaatatataaattttgagttataggaggcatgaatattttcattacattttccgtaagtccttttagaagagtgtcttctatttcagacattgttgacctgaaaatctcttaaaatctgtctgccatcctgtggtagtgatggcctcacacaggggtggcagtgcctctagcagaaatccccctgagagactcagtcgagacctgtgtttgtatatcatttattggggaagaaagggagagctacacctcactagacatttccacggccatactcattatcctgaaatcccagcagctttatgtacaatttaccaagtaattttaattactgctatttcttctaygtacttgatgggtggttttttttctcatgagaatgtcatgtgcrtgatgccaccttggtgcattcctcttctctttcagcacccacatgcaggatctccaggaggtgacccaggaccttcattatgaaaacttccgttctgagagactcaagagaggcggcaggtcatcacactgtgcccctttctctgtattgtgtcaccctgagccacaatgttcctcctcctctatgtgttcagctcagccttcttgaccattaagcaacatggtttggtttcctactcaaaagttattataaaagagttgttaatttaatcaaattatgctcttttagcctttttaagaaaaagtacatttaatgatatgcacgtaaaaactttaggccaggcacggtggctcatgcctgtaatcccagcaccttgggagaccaaggcaaggtagattgcctgagcgcaggagttttgagaccatgagattacatggtgaagtcccatctctacaaaaatttaaaaaaaaaaaaattaatttagccgggcatggtggcacacacctataatcccagctactcgggaggctgagttgggaggagcagttgagcctgggaggtgcagtgagccataattgcaccactgcactttatcctgggcaataaaacaagaccctgtctcaaaaaacaaacaaaaactttagatggaaaggccagaggcttgtgtcgagttctccttcaaaagcatcactctgtacgtgaggacaaacttgttgccattaggaaactgcagcacctgagttaagggtgaggccaggatgagtggcatccaagcagccagtggccgttgaagcagcagcttcgatcctcgcaaagtcctgcagccatcctcactcaccttttctttttaaccattctaatatgtttttatataagttttctgggaggccaaggcaagtggatcacttgaacccagtagtttgagaccggccctggcaacatagggagacctcgcctctataaaaattttttttaaattagccagatgtggtggtgcatgcctgtggtcccagctactagggggaggattccttgagcccagtaggtccaggctgcagtgagctatggtcgcaccaccacgctccagactgggcaacagagtgagaccctgtctcaacaacaaaagtttcctgtgttgtaattcattaaaattctcacattctaataatttgatggatttctagatacatatgttgtacacrttgaagtctaattatgagtttggaaatgagacattaagaaagattttagaggcagcaagaaaattccaccctctggaagctgagtaggcgctggccctgagatggagattagtgtgctttgcagagcacagttctcaggtgtgcttggggagcttaccctttgcccctcgttcactcacgcagatcctgctccttaaatgtggtgactacattcgcattaataaagaataacatctcaaagcaaattcttcagataatacctatttttgagtgggtaacagcaagtgttgtcgctcaagcttagagtaagaaaagtctcttgaatgttccatttcatgttgttcgaactttttaaaatcattctgttccctttttattcattatatctttaattagaaaaatgataggctgggcgtggtggctcatgcctgtattcccagcactttgggaggccaaggtgggcggatcacttgaggttcaacaccagcctggccaacgtggcaaaaccccatctctactaaacacaaaaaaaattagctgggcgtggtagcacgtgcctgtaatgccagttacccaggaggctaaggtgggagaattgcttgaacctaggaggtggaggttgcagtgagccaagatcatgccactacactccagcccgtgcgacagagtgagacaccatctcaatataaaaagagaaatgataaatacatgtcattttaaattttaaagtagaatttttkgggggggtagcaaataactatttgttgcagtgttatgattctgatttctttcgattcttaggaaagtggagaatgaggacatgaataaagaccagatcttgctggaaaaagaagctgaggtaagtaggaaagtactattggttggttggttggttggttgttttgtttgttttgagacagagttttgcaccattgcccaggctggagtgcagtggcgtgatctcggctcactgcaacctctgcctcccgggttcaagtgattctcctgcctcagcctcccgagtagctgggactacaggtgcccgccaccatgcctggctagttgtttttgtatttttagtagagacggggtttcatcatgttggccaggctggtctcgaactcctaacctcaggtgatctgcccaccttggcctcccaaagtgctgggattacaggtgtgagccaccgtgcccagccaaaaagtactattcttgtgactgaaggtgttttgtttacatccgtagatatcattggtaattaacttaaagtttatagttttttttttaatttgttgaggaggatacatataactactttattactatatatacacatctatatataataataaacatggatatttacatagcatacatgatgcttcatatatttagctgaaagactttggagacaatttagtaatgtcactgatatttgtaagtagatcataaatatggaaatatgctctgttgtaaaggtggcattcagatctgctggagttttggaaggcaaacacattattcagtaaacaataggatcataatgggctagccttttggaaacaaaaagaaaatacttctttggtcaaattaattcaatattgatcaaatatttaaatgttaaaaataaccacaaagtcacctgaagaaaatttaaatgttttataatactttcctggaggcatttctgaacacatacaaatcataatgataaggataaagatgaattaacatttactatttttggccaggcactgtgggttacacttatagtcccagcactttaggaggccaaggtgggagaatcacttcatgccaggagtttaagaccagctagggcaacagagtgagacccccctcgttctctagaaaaaaattaaaaaataattagccatgcatgtcggcatgcacctgtagtcccagctactcgggaggctgaggcagaaggatcccctgagcccaggagttcaaggatgcagtgagctatgattgtgccactgcagtctagcctaggtgaaagagcaagatcccatccctttaaaaaaaaaaaaatatatatatatgtatatgtatgtatatatattatttttattgtgaggccttcattgccctccagaaaagctgattcattcccattcccctttactttgcatttctcactgtcatcagtctctttccctccttttaggttagaaaacttctcatattggccgggcgcggtggctcacgcttgtaatcccagcactttgggaggcggaggcgggtggatcacgaggtcaggagtttgagaccagcctgaccaaygtggtgaaaccccgtctctactgaaaatacaaaaatcagctgggcgtggtggtgtgtgcctgtaatcccagctactcaggaggctgaggcaggagaatcgcttgaacccgggaggcggaggtagcagtgagccgagattgcgccactgcactccagcctaggagacagagtgagactctgtcttaagaaaatttatcatattgtcttatctttctttggttattgtttctgtttggcttgcatattcgtatcatttacttgattttctctttagctgttgctttttttattgattggtaaaaagtctttatgtaataactcctgtcatattttgggaaggtgtagaagttgaaattttaggaatcacrgaacacccagaaataatgttcaaagacagcaaaccttgaaaacctataatgtgtgtgtgtgttcacagctccgccgcatgcaagagatgattgcaaggatgcaggcgcagatgcagatgcagatgcagggcggggatggcgatggcggggctctcgggcaccacgtgtaaggtgatgtgcacatatcaagaagtcagaggtaggccctgttgtcccttagcctggaagacaggcagttactaacattgtgtcagcttaaatatgacaggttcctccttaagcctcattaatattttgcattttgaagtaactccatcactaatcttaaacaaggagagattgctcctgaaaaacagaagccactactttgccacctactttctagtaaagatttttcatatttttgtctcttcttttttttttaaataatttcaacttttattttattggggtacatttgcaggttattttctaagcttgcaaataccaacattagaaggaaattatgtattaaagcacttttattagttgtattattggaaatttgttaattgttaaaacatctctttaaagggaataaaaacgtgttattaaaacagcttgtacagattaaaagtagagatggcacaaggaagaagaattatgtgaggtagataagggttccctggatggtgactgctgacctcctgttcctcagatagctttgtcccgactgatggtcattagtgaatagatctgtctggcatggtgtatgctggtctgcctgcttgaaaagaatctgcagactccagagactcaggaccaggaaaaggcagatgcccactcccctgtatcttatgtatcttatggacaggcaggctctctgaactgtccaggtggccactcccatcacttgccagaggaaaagcatgaaaggtaaagttaagtaatgacctaagagtccaaagaagagggtaggtcacatggagctggggtaaaggcaaacaaacctcatacaagagatctgattagagcttgaaagagagtttgagttggccaagatctgaggatgaaacgctgggaatttggtagaaggtctctactacaattcagggacctcattctggaagcatgagtgtgttcatgaaaacagggaggggacttgagccttcaacgacatacggcagggtgggttaggcagaaggcagggagtcttgaggcctccacagcatgtggacaggtggctgaggaaggacccagagtgacttgctggagccttagtcaccaaacgctcttgcagcttagtgggaaaggtgttcattgtaaaatacggtatttacacaaaatgcacaaaaatacgtatgtacagtttaataagttactgtaaggaaaacatccatgtcacccccaactgagtccaagttggttgctttagtttcatcatcacagtgacaccttagaatagtcctgagggtatgtgcttagttcacactttactgatgaggaaattgttgccgctccgagagtttaaaagtatttgctgatggtgccatgacttttaaacgatggcctgctgactctagaggctggtcctgcataaccagttaatggcatgtgactggggaagtgagggtacagtggaaagagacaaggatgcctcagcgatgcagctcatttgaagcaggaagcagtgacaggtgtttgcttattttctctgagcttcattttcaacctttatggaatgaaaattttacttttagatcgataamattttatttctgtatactttctagttttgcagcatttccagtttccaggagcctcatgaatggctttttggtttagttaactttgtggtcatgtaagccctgccttttgctcagtttatgacctttgttaaggagaaaagtagaactgttaataattaacgcagcagacattgcctcactcccacttaagtgtgttttgttttcttttttctagaaaacactttcctggataaaaaagaaaacattccagatgcatgatccagctgtgtgttttcaatccttgggagggtgccatccacattttaacagtacctgtgcctgagaatttaatttttaaaagactttgatgtgtttttgtatgaagtacttttaacgtatgtatttcattgctgtgtcacactctgtgttttgtgaggtgaatgtcttccttttctttctccctaaccactaatgttagaattgatttccaagaatcggcatgtatacttaatactgaatttctttgatttaactgacttaacaactgactaaccattgatgagcactcctgatttttatctagaacattcagatttrccataatgttccttagtggtagaggtgtgtgcctagtgatgtagaaagatacactgacttggtgcaaggccatctgcttaccacatcacaccacttggagatctttgcttccttgcttttatgtttgtacacaacacctaaaaccagttttgctgctataattctatactgttgattcgtctgcgattttatctgttaaccaaataaaacataatagaatttcctaatgagatatatctttatacttaaacagcttttttagaggtgagttttaaagaagtctcttaattctgatgctaggttgtttttaaaaccactatgcaaagaactcaccacaagccaccttttgtagtgttctccactaatactggttatcctgtgctacagagaaaatcaaagcagtcataagctccagttttcgtattgcaaataagactcttacctacaaaatgagattcagtgaactaatttggtttttactcaaccaaattaaaaatttttttaaggaaaattagcagttggtctattcagaatcaaacctttttatattttatactgcactttagtgtattttctgtcactgtaggtatagaagatctgcctcccctgtggaaattggggtctgttggtgggcktgcccctgaagcctggcttgggttgaaaagtgttcccgccctaaggccttggtgccctgaacctctgatgcctaccgggttctcctgatttgagtttcctttaaatactccctttttgagtaattttctgatgggaggaaagtagcagtcatcatctttttgtgtgcaggctgtctcatttatttttagccattgtcgtttcattcattttgtgtaatataaaccgtgtgtcatgtcaaagtgaaagacatttcaaatctgtagcataggctagtgggcaggtccgcacagtcgaagccacacctggtctgttttctgtgcactgtagccttagtgtcacctttcttcttgtgtctccttatggtacactccagcggttgccttttttatcatttctactgaagttgggaaattcaaccccagaaattgacagatgaaaggagacaatggttgtgtagggagatggagaaaatgcttaatctgaggatgagacagggttttttcatttttgtgggggctagaaaaaacataaaatgaggcagttaaataataatagttaatgaaggtgtgctacagaaaataatctggtgttcttgctaactttgcccttcactgttgcttaattgtgaacagccaaaagctatatgttatggcttattgtgtgaaggtaactaagaagtggtgttccatgacttcagagtacatccatgcggagtccattatttgagtttgacatttaataactttgctggaaaatctgtaaaaaagaaaaacaagtttgctagtgactaagccccgcatatgtgagtgaaagtacttcaggcacgctgcctcctggtaacagctatgcagggagggaggacccacactgctacacttctgatcccctttggttttactacccaaatctaaatagatacttttgataatagataactgctcttttactaagacatagtctctacctatagaaatgtattttgaaaacacttattttacacagcaattttgtatccatttaaactaaccttttatcaataaagcactattgtttagatattaaatgagtatttctcttggttatttgcaagggaaagttgtgaggttttctgggaaaattcaaagtcttgacaacatctttgtataaaatcaagaaaaattacttgaatcaatagtgtcagtactggacaagtttgtacgtattggagatccagcccaaaagaaagcacaaaagattggaaaggaattatttacaggtgatcagaacatctacttagaaagtacaagacatctggtgaaaattaacactaagaagtcagtgatatctattttctaattagaaaatgtagtgagaaaagaaatcgcattgataatagcaactactaaattactggaaatataagtgaatgattgaaatatatctaggaagaaatttctaacctataaattttcaagaataggctaaggcggctctgccacttgagtaaaggaaactggaaacctgaattgatctgggtggctggacacctacactccaaggcctctagccttcttcctgcccactggactgatcatcccaggaccaccttgggccccttttaccttgctatcagtgttttctgagcttccttatagacagacccctggatactgaaacttgctctctctagttcctcagctgacagctgccacgcctgctgccttccctccagactgccagcctcaggtcaccagcacacaccctgcatcctaccaggggtcagtaccaccctctggccaggctctcacctgcactatccccacccggccctgcccgtctgcaggcagggatcctctgttctggggtgtgtgcaccactctgggcctggtggtgtcattgggggttggttaaaggaaaagccccagaggtgggtggcacatgaggggagcatcccgcacagctgagcccagtcttggtgtgcctgggtctcagaccccatagttgtctcaggagaaatggaggttcccctgagccagcatttctcctgtctgggcttctgggaaacgaagggtcaggtttcactctggaatccacagcaccataggaggagtctcttaagtgcccgggtgtttcctgaagttaattattccctcaacagccacatggtgacagtgggtgacagggccgggctaggagagcacgatgggtagggtcttgaagaacacataggagttcaatgaacttctcaagagaagggaagtgtgccacagcaagtcagtcttccattctcgggtgggggtccctaggccagaggaaggccgtcctggccgccaccacggagcagcctgtctcagccttagcacagcctcgcgcgatccttcgatgatccccttcggtccctgtagtcccacgagggatgcaatgcgttggaggaaggaggaggctggcagccagggactgagccaaagggtgcaaggacagccggcaaggcccgggccaagacctatccccgcccagcgagccaggcctcgcccagcacctatccgcgcccagcaagcctaggcctcgcccagcacctatccgcgcccagcaagcctaggcctcgcccagcacctatccgcgcccagcgagcctagacctcgcccaagacctagccccgcccagcgagccgactccccgcccaggacctagccccgcccagcgagccgactccccgcccaggacctagccccgcccagcgagccgactccccgcccaggacctagccccgcccagcgagccgactccccgcccaggacctagccccgcccagcgagccgactccccgcccaggacctagccccgcccagcgagccgactccccgcccaggacctagccccgcccagcgagccgactccccgcccaggacctagccccgcccagcgagccgactccccgcccaggacctagccccgcccagcgagccgactccccgcccaggacctagccccacccaacgagccgactccccgcccaagatctagccccgcccagcgagccttggcttcgcctaggacattgcctcgctcagcaagccgacgccccgcccaacgagccgagcgctgcacagatttatatcctacgcagctgcctgcctgctcccgccccttctccgtccgttcaccaatcagaactcgatcttgcgctttcaggccgcgggacgggaaggctccgccctggcgccccgcaggccaatcgactgcgcgtccgcgtcgcgggggcggggtcagggcggggcgcgctgcgcgggggctgccggcgggcagttgggagcaggcgacgccgacgcgagtctggcggctgctgcttgcgactgcggaggccgggcgaggccggtgaggacgcggcgggcgagcgagaggccgagggtgaggacgtgaagcggcctgggcgcgtggggcaggggtgggcctctccgggtgggcggcgaagcccgaggcccgaggcgagaggcccaggcggggggggcgctgaggccgcggtccaccagagatggtcccgcccggcctctgaaggccatcgtgaggcggctggagctcctaggcgggtccgggttagaggagcgtccgtctgtagggagcctgccgcgtgggggcaggcggggcggtgggccggggagtggcccgcgtggactcccgggttgaggggtgccgcgtggaggaggccggtggggctgtagaccggggagtgtcccgcgtggactcgcgggttgagttgtgccccgtggaggccggcagggccgtgggccggggagtgtcccatcccggaaggacaccccagagtgggccatagggacccgcagggtatgggcctggaggtgcctggtggaggcattttgagccgtttgcctttttagcatttctttaaattgtatcttaaaggtgggaatcaagtgttaggtgttaatatttttactccactaagggctagaaatactcataagccagtgggtagcctttgggaaacccatgaaaactggggaccagaatatggcccagtacattacacacccgaattacgggcaccttttccgtttacgctatggcagcaacccctggcctatcatgtgccattaatggatgtgaaaagcagaaattagaacaaggcatcattgaaggaaagattgtcaatacatagtgttaaaaagggatgggcaaatttaaaacccaaggccaaatctttaaagggtggtttttctctctgggtttttgtttttgttttgtttccgtgggatatttttgtctgggccactgtgtaaatgtttgataaccctgaggtggcagtgggttagcgtgttggtcttgtgtagactgccttataacaggcgacacagattttctcagtaccagagagatgggagaggacatttgaggtagggaagcatggagtaacctttacttgtaggccaaatataatttaaattttctacatctgcttgttgaaagttttgttttgttttgttttttgaggtccttaaaggtttaggaagcacttcatgctcgttatttattcagttttccaaaactcttcagagacatgaccaagttgcacagccccgttttaaagtagaggaaagggaggttgagagaggtggaatgaccagtttagggtcacacctagggtacttgcaaataccatctgtacttctcatgtgccctatccttgttgcagattctcattaggtggttcactgttaacaaactaaatgctgatgatgcagtttcctggactgcagacgtttgctggcttatttacctataggactatcagtcgttagtaaatttccaggttccttgtatactaattcctttcccaaagaggaagttgatataaggtgtattcatttctctctgcctcaggttccttattcaaaaaatgagtttaaaatttacttggccaggcacagtggctgtaatcccagcactttgggaggccgaggcaggcagattgcatgagctcaggggttccagaccagcctgctcaacagggcgaaaccccatctctactaaaaatacaaaaattagctgggctggtggcgcacgcctgtaatcatagctacttgagaggctgaggcacgagaatcacttgaacccaggaggtggaggttgcattgagccaagattgtgccactgcacttcatcctgggcgacagagcgagactctgtctcaaaaaaataaaaaaataaataaaaaaagctgtgttaacaagatgcctggcacaaggtaagtgcttaataaatgttagccattattattatcaggtggacaaataatccgagtagaaagtagaacaagctaaccctggatatttacaaaaaacagtagagaaaaaattaggcaataattaagcaaatttatcctgtttagagggaatggtatgaactggattgccaaagcaaagatcaatgcatgggcaattccatgtgagctcatttaaatccatttggcccaaagaattcagttgcttccttcctttccaaacacccctgcttctagtcacatcaatacctcttctatattcggacagtaacagatttttcttactgctgcttgtcctttcagttttgttcttatttttccttcacccactttcatatcagcttgccagcttcccctttactcagtgcgtcatgagcttcataaacacagcatagtgctagatatacaggcaaaaccccattgtagtgttggatactgagctgaggtaattccggtcatgttctctgagatcagaatatagagtcctttgaccatagcgtatttgtcaatgccacagggagttgaaaagttgaggatcctacaaagcaatatgataaagcccagtctttggtgattttctggggagcgtttagttgacagtgattctataaattggtctaatctttttggaaagtagcagtatgtggcaaagattttgattttggaatcacacttttcaaaacaatctgataaactttgttgtgtcagtagggtagagtactccatagcaagtaaacatgcttccacaagctgaatcccatcctcccatccaaggaaaatttgaaccattttgatccatggaaatatgctttaaaatgtgacttaactgaaaagttgaaatggtgtgtacacagcaatcatagtgttgtaaaaatacatgaggaggtgaacaggatcaggagggtagttagagtgttgtaagtggttttattttaagagtcatgaattgttttcccctaaactggtgttttagcttattgccattttaaaattcaaaaacaaaaaggccctataatgttgtaggatgcagtgatgaatcttgcttaatcccatctttccccttccccgcccatcctcctgattgcttcccaaaatgaaaatgtggtcatgtcctatcccagctgcaaaacctactttggtatgagattccaaccagttggcccactagagctcgcgcagcacaaccccaggccacctccccacctcccctcgggtgtctcagcccaactatactcatcctttcccagctgctcctgcagtttctatgtagtcctctgcctgtgcacacactatgtcctttgtccacctggtctcctgttcccctgtgaggaaagctgctccaggtcaggctagccagcggtgctgcctctttctttctgctctctctgtgactgcagtgggcaggtagtactggttactttctcagtcgtctccctttctgaattaaacttctgtatctttgtgtgctctgtgcacaccatgcaatcacgatggggttgaggccgcttgtggagctgagtgactgctaacaaatcactaacctttctgagcctgagttccttgatgccagctgcacatggttattgtgaggattaaatgagatgacataagcgaagggcttgacatgcatctccttgcagtggtggtcatacaggacacggtagctgttgtaatgtgtaccagtgcatttttgaggccttgtcttggaccttgtcctcttgatgaagcctcctccctgtctccctccagctgccaacttcctctctaccaccctcactttactcac

SEQ ID NO: 5747 - DNA, 15156 bp, Homo sapiens
ctggttatttcagcttattagctcatgctgctgtgtgagcaaggttgaggatttgttccttgaagcagtcagaggatctccaagaaaaaaaagcatattatgtgcttacaaaaaaaaaaaaaaaaaaagccgttttacccccaactagctttttcatgaatacacatcctttgtcacagggaaagggttgagcaggaaaaaaagtgaatagcttaacacaaatctatcctcactatggaaaaaaaaaatgtcttcccatgtggatctcacccagggaggagggcatggttggctttgagatcaagtagaaaactggaaatgggtttttccccatggggaaggtttcctcccctttgcccaggtctgctggggtcgggctacccacagttggtgaggagtaagttcaggagttccccatcaattcagtcccccagccacacaggggtcagaggtgctgctgagtctctgccttctgacagaccccacaacagcacaacaggacaacagagcacaaagccacagggacaagggaagaggcaaaacagagaacgccttacagccctaatgttgaatctaaaacaaagaacagcgtcactgcagcgtgagaaaagtggcaacgggctgtggcaccggcccttggttagggcatcacaaagtttaacgtgcacgggaatcacctgggagtcactaaatctgcagattttgattcagcaggtctgggacgagcctgagggtctgcatttcttttttgtgattattattttgtatttatgagacggagtctcactgtccccgaggctggagtgcagtggcacgatcttggctcactgcagcctccatctcccaggattaagtgattctcctgcctcagcctctcgagtagctgggattacaggctcacgccaccatgcccagctaatttttgtatttttagtagagacagggtttcaccatgttggacaggctagtctcgaactcctgacctcaggtgatctgcccgcctcggcctcccaaagtgctgggattacaggcgtgagccaccgtgcccggccaagggtctgcatttctaaccagctcccaggtgatgctgatacagccagtccatggcccacactatgtacaaggagccaggttctgaaccatacgtactgtgtctctctcacgtgtgctggacatggcaagtatgtattcctcatgacatttaatgtgctcatgttcttcagtggtttaccttttgctaataaatctcagtggtttcctgatcattccataatcatgatggcattcactttattgagtgggagatgaagtgatgcaggaatgagccaatcctaatacattttagaagtgtattaatcctaaataaagcctaaaatcatctattttcttcagtaattgtttccatggtgggaggttagggggagcttttgaggtgatttaaagtcattttcaaagcagatgaagacggcaacctgagctttctgtcaggacatgtgtgtagactggagacctatcacatccaacgggaccctcaggccaatccttttaagcagggggctccacccagccccttagcttccctactcccctaagccccttggttgtagacagtagcttcgggtgccaggtgggaggccatgccaaacaactatagccaaagagcatgtctctgatgccatttctttggtggcctaggacagaatctgagctatttccactagaggaataggagcttcagcagggggccttggaaatgtatccaaggtacccacctcctgtccttctttctggaagcatctggccctgggaagtagcatcccgaccactaatatcagggcactaatatcaggcaaagggaggaaaagttgcatcctgaccactaatatcagaaaggcccctcctcccagcccgtgaagaggggcctctctgggtgtgtacctggaaccctatcttggaagttaagttttgtggtcactgctaccaacacaccaactcccaggacacaggatactagggacttctgtgccccatcagtggacaagtcacaagttcccaaagcagggtgaccaatcgatctggatcaggtggcagggcctcggatcttaactgtccatttcattgttatgcacacaaacttatcttagagatccggccatctgcctgttcccgtcctggggatacctgcgggaaggcaggctgtgcctcccagaggtcatctgggctgcaaatgggtgccaagaccttcctctgcccctactcaggactccagactcctccacatcccctggagatactcaaagcccatgcccacagtaacccgtagggaaactgacccgctctgcctgggagctgctcccaggagcctcagcagtggcaaccaggagcttagagaccgctgtgcctctccctgcccaccctctccctctcatcctgccccatttctctgttgtctttcctctttcctctcttcattgttcacagcactatttaatctccttcccctctttcttcccttattcttgttctgactctattcccaggtccagagaggcccagaatcttctctgctcctgctccacctcctgacccactgccccctgggagcccctggtcatcccagaagcctgtaagtgcacacagcagccaagacccacatgcctgcaatgggggtggcacaggggaggcagggtgaagagcaggacagacttgcaggtgtttttttctgggctgcctggcttcatcaactgcaacactccagcactttgaatttttagcaattaatgccccaagtccccctccccctgagtccctgcagagcagagggaggggcacctgcaaagagaagtctctcccaggaatgggtcacaccaatcagcatgtatgtggtgtctttcatgtagcaaatcagagtctttcatattcaatagctgggcctctagagggaccaagctttgctaagcaaataagcttgtggggttggttcacatccatccagaaaagcaagaatgaaaaataaacttgggaaagtcagctccacaggtgaagctcaaccttctgtgcatctgcttggcatggagctacatttgcaactgaatggctcatttatttaactattgcacacattatgggctcttaaaacatcaaaagaatgggttttattcccaacaattagctcttgaaataaaagaataaacatactttttttttaacttccccagactctgttgaccaaagtcgctttcacaccagtggagtggaagctccaaaatggtatcatctggtgggaatttaaagacttcttgtccccaaaaaaccttttcgtcactaggcttaaaattttccattgggaggccctggctttgttttgacacatgatccgttattaacacaccactcattttgggaggggaatatcatcaagtcccagccaggatgtaaaccccacgactaggaagcctcgtccgctgggtaccttggtaggtcccagggccgagcacagtgcctggcacgtgagaaataggtgttgagaaaagttatttcactcttccttttctaactggaaaccaactccaagcacagatttgaggggggacgagcagggaggcacagtagataaagcctgtgagttactgcgcccagcgagaaaggggtcggtggagtcaaagagagaaggcactgcgtggggagatggaggcaggttgaaggcaacacttggagtccctatagtcctacaattgcagtgcaattgcccagaagatatcatgctaagaaaaggagggagcctcagccctcggcctccgaggagacctctggggacatctagggcagcttcccatccaggacagatatctgaaagatcatgaggctgggcttgaatcctgctgacaacaagaaacttactacctatgtcccctaccgctgctatggtccgcctcctctgtcagctcatggtatttgagcacctactaaatcagcaaattaatagcttctgcctgggggctgcttccacactccactaatagccaatcgctgggcatctcagagccgagagaggaaggaaaattggaaaatgagtctagaataaggggcctttccaaaatgtgtgcttatggcccagacactcctttaaccctaggttttccagaaagtctgttttgccccaggactgtggacagcattatgttttgtttggtgagctttcttttttttttttttttaggttgtattttataactgaatatggcatgtgtgaaaatatcagctaccagactctgttagtccaggcgtatgaatattccagatcacaagggaggtgtgactcccctgtgaattgcaatgcggaaggtttataaagttaatcatttagaaatctgtctttaaaatttaaatatttagattgggtcgctaggacacaaaaggcaattcctgtttctcactcacttaatttgatttttttttcttttggtcgcacaagttgtttttcaaagcctcattcctcgaatgttccctataggaggaatgtaattaaactccactggcctccccctgctgggaccaaacaggggccagagctgtagggagcataaaacagatatcctgcaaaagaatccttattataaagatgagaagagaatcaacttccctctggttatgaacaagaagctttagaaagccacccaggctatttttgcaatgggcttagtctccaagacattttaattagtaatttaagactggaaggaaggggataaactcctcacctccctggctataggcaagaacttcaactggatgagtaactggttcaagtggctgaaaaggagggaggtccagagggagggtggttccttaaaatgaaccaactttttcatgaaaatggcatagctagatatcccggcccccagtcagtcactgtttttgcagtcccacttcttaaggcagttctcacccctcaccagaggcaggcactgcctctctctgggacactcggctggcaccagagcaaagaagcttgtgctgagggatggttcccctcacaccgggccaacctggacttctctctgaccaaagagcatatgcctcccaccaagcgagaaggtggaaagatcctggcagggaaccccgagacctgggtgctagcatcatccccgccatgagagcacacggggcccctgagctgacacctgctggcaatgtgacgtggatcactcacataatcccttccttagtttttctgtctgtaaaatggggatagtaacattgtgtagctcataaggttgtcaccaagattaaacgagttaagaatacacgtgcaatgtttgaacagcgccagcattacgtacatatagctactctcattcgcctttctgtgactcagtttccttatctgtaaaagaaaaaggttggactagacctcttctccactgttattgatgatgatgatgataaatgaatgtttctgtgccagatcctaaactaaacaaaagttaacttgatactcacaatggctgtatgaagtgggagttatcaccatccccatttcatcagtggggaaagaaaggctggattagtcagggatctccagaggaaccgaactaataggacagagacagaaagacattcattttcaggaattggctcatgtaatttatggagtttggcaagtgtgaagtctgcagggcaggctggcagtttggacaaccaggcaggagtcaatgcaacagtctagacacagaattctttcttcgccagaaaacctcagtttttgctcttacggccttcaaccgattggatgaggcacgcccatattattgaggataatctcctcaaagtcagctgattttaagtgttaaccatatctaccgaagaccttcccagcaaccctgggattcatgtttgattaaataactgcacactatagcctagcaaagttgacacaaaagactaaccaagctaaataacttgagaacataagataataccctaggacagggcctaggtcggattggcactcacgtttcccgactccttagtctgtattcttttcaaccttgtctctaatattccatgattccatggttctgatgccattcctcagcgctctgctgttcttgcctgaccaagtggatcaatggtggctctggcatttctataaaggggatttcagggctgcctgctggggagggaggcttgaagctgtgtctgcactgcatcttcacagcactgagaaaatgccagtcattcaggaggacagggcagccctgtcctcgccacagtgcccgcatcttcattggttcacctttgcaggtatcatctgtgacctgtcatccaggctctgagccctgaggataataagtytccctcgaaggtcctgggtttgttggagctttttctccctcttgccatgtccttttcacggtccatcctctgagtttgtgaattatctttcttcgtggcccatgtggcacaagatgaagagtgcatgggcagcttctcccctgacatccctacctccctgacgcttaacccacatagggaagaacattcctgaaacagagacgtcacccagggttgctttctgccacagcaggcactctgcttcgtgcctttctcacttccatttgtaaatgatcttgtctccttccttgtagaaagcttttcagccattccaggctttctctttgggttccatccctctgggattttccacgaattgcatttccttgtagttcattttcatcattttccttgttagggaaatgcacctgagacattggcatgcagcctgattgcccccggcctcccctctgctcattgccagagctacctctgcacagaggagtcactctcctcccactccagggcctctgtcaggggccaggcttgatgctgtcaccagccagctcttcactgctgcccagtgccatattcatatccattgagacaagtccctgggaaatggttgggagccgggggacagccctgcatcctgagatcctaagatcagggaggttctccctgcactcccagctggaaggagactggatcggccaccctcaccaaattcccagattctctgactgaagcaagccagtccttggtttgaatggggaatcaactcagggttataaaatagacgccagccttcttgtaggtagaatctgacttcagacagcaaaagactctaaaacagcttaaattcctgtatatgccttctcctgtgcatgccaccggtcagaccaaaggccacacgccaatcaaggcccaagatcagccaggggtgtttccatgtcctcaagaacttttacaaactgtagctgattgggttccgcccctggagattcgatttagtgggtctggagtgaggcctgggcttcttagaagccccagcggattctaaaatgcagccaggaggaagaacsttgccagaatcccatgaggcacagatgcaaatgtgcatagtgacattgggttgcattatcaatggcaggactgactttataaacctccacatccttactggagctgctgtttgctttttagaaaagtccctcatcagattatcaggaagtcgtgggttttccgtgatcatgctgtggtcagatccagcccaaccagagagccaaaaacaaaacaarcatacaaaacaaacaaacaaacaaacaaaacccaaatccctggcaagccccacgaaatgactgctctgataacattcagcagacaagcctgtttgaaatcatctcagaatcataccagacccaaacccaagaggtcatctggtctatgcatcgactctaggagggtgtattagtccgttttcacgctgctgataaagacacacccgagactgggcaatttacaaaagaaagaggtttcatggacttacagttccacatggctggggaggcctgacaatcatggtggaaggcaaagaggagcaagtcacatcttacgtggatggcggcaggcaaagagacagcttttgcagggaaacttccttttttaaaaccatcagatctcgtgagacttactcactatcacgagaacagcacgggaaagactcgcccccatgattcaattaccgcccaccagtttcctcccacaacacaagggaattgtgggagttaaaattcaagacgaggtttgggtgaggacacagccaaaccatatcagagggtgaggggctatttctccatgttacagacaaggcacgtgaagcctagggacgttccatcacaggcccacaccttgtctcagaattaagaggaaatgcttctggctgccaggggtggggtggggtaggatgcagagcctctccctccaccaccayctccatccttttccctttctctgaaaatctcatttgatgattccccagcctggctgcaaattaaagatttgtagacctgaaagatgctaccgatggttatcagcaccaccaccaccatcgtaacagtaaacatttatggagcgccataattattcataataatttttatgtgttaaacaaatctgacctagctctataaagaaataggccctgttaaccaaaaatattggataaattaaaagtctcctagaagcatctgatgaaaggatctcaagttccataacacacggaccattcagtggtgttgtttctgggcttgattcactgtgggtcacttgaacgatgtcgggggtattgtccacctcccagtgctcagtctgtggcttgtggccagctgttcctctgtggggtctatgttggctgtgttaaggcctgctgcagaaacatctcatttctagcatgtttttctcaagcagtgatcctgtggggtcaagtcttcaatatcaaataatattgataataattatgatagaaataataagaggccaggcaccgtggctcacatttgtaatcccagcactttgggaggcagagttcaggtggatcatttgggcccaggagttcgagatcagcctggtcaacatggtgaaacccagtctctactaaaaatacaacaattagccgggcatggtggtgcacacctgtaattccagctactcgggaggctgaggcaggagaattgcttgaaaccagaaggcagaggttgcagttcgctgagattgcaccactgcactccagcctgggtgacagagtgagactctgtctcaaaaaaaaaaagaaagaaaaaagaaataaagaagaataataagaattatcagtcattgaacacgcgctctgttcttggtgctcttggtgttattccaggcaattctaacaccaattagatattttcccctattttaaagattaaagcaactggcgcagtggttcacacctgcaatcccagcactttgggaggccaaggtgggaggatcacttgaggcagggagttcaataccagcttgggcaatatagtgaaacccctgcctctacaaaaaaaaaaaaaaaaaaaaaatcaaaaattagctgaggctggtggtgcgtgctcgtactcccagctactcaggaggctgaggtgggaggattgcctgaggccaggagttggaggctgcagagagctatgatggtgccactgcactctagcatgggcgacaaaacaatagtcttgtctcaaaaaaactaaaaaagactaaagtgaaattgaaattcagagagtaagtgacttcaaggtagaggcagaaacagaggctggatttgaattcgatcctctggctccagagctcctgggagttatcttgggaatgactgcaaggtctgaggtagatcgttccaggagcaggtgcttatatacagtggaatggcacccactggcacaccgctaggaattctgttttcttaccaccaccggagccaggtctctgtcacggtgatgagaagttcccaaagtcatttctcctctctagggtgtcccctctctgtctgctgccactaaatccctaacgacattagagcgaataaatggcatttttaacttcagctttaagcaacaaagaaatactattaagtcaagatgtgtccatctttaccataaaaaaaaacaaaaaacttgcttcaataaccaataaacagatcaaacaacagaaaaataaatagcaaaagacttcagggctcgatggctcacacctgtaatcccagcactttgggaggcggaggtgggtggatcacctgaggtcaggagtttgagaccagcctgaccaatacggtgaaacccgcctctactaaaaatacaaaaattagccaggcttggtggcgtgagcctgtagtcccagctactcaggaggctgagataggagaattgcttgaacccaggaagcagaggttgcagtgagccaagattatgccactgcactccccattctgggcaacagagcaagattccatctcaaaataataataataataataataataataataataaataaatagcaaaagaaagaaaaaaccctcagctaagaagtatactgttgtgttttttggggttttttttatgtaacatttgacaagtttacattttccttgtctgccttgggtgccttaaaataaaactctgtcaatatttccatgtaacattgggttttgcttttttttttcctcacgtaaaatccacatatcaggaattcctctatttattccgtcgcctgggtttctttccttgggaataatttatatgtcaaacctgtcatttatcgatttattgctgtacctagcagcatttttctccctgccctcaaaatttagcttaaagaccacttaataaggcctgtgcgggtcctcagactccagagatttctgctgatatgagccataatttagcaaaacaaatcctgctcattgcgggcatctaaatggtatcctgttaaatttccatacatgcttttcttttctaaagttatggcctacaactagaagaagggatgaaacatcacccctacctccacatcttatttcctgtatcaaatttcgaagcccttggagatgcaaggcgggtttccctaatgagttgagaatcaatgcgaatcatctgaaatgagaggtggcccgtgggtgtaatccatccctgctggtgctccaacttggttacacatttccagaaaccagcacctccctgttgtccatgtctggtcatcagaggcctctctcctcaggtgggataaccagagaccaagaaagaaacatgtttctctcccttggaatttctcttccttagtcattttcagaaagttaggagtcggcaaccttaaggaggagtttcctatcatctctcctccacttcctcccctcatttcctccccgtcttctccttggagtccttcatcaatgtctctattttctgttcaggataaacaaagagtccctcttacctgcacaggcctcacctgccttccccccctgtcatttctgcagccagcctgtctcctgagcctggcctggcattctccaaagactccttaaggccacttggcttccggtctgcctctaggcttcactgtctgcaccagagtggaaattgtcatgtgccctcagcaacattttacccctcccttccagaacagacacaggcatttcttccacaagcagtattccacagatgaaaaaaaaaaattataaaagcgaaaccaaaaatactggtagtatatttttttcccttcaaaagaatgataatcatcagtaaaaaccacaacaacaaaaaactaagcaaagcagcctgaagataggctgaaagcacacatctacggatggcttgttgttgttttgtttttgttattgttatttttgagacacagtcttgctctgtcacccaggctggagtgcagtggcgcgatctcggctcactgcaacccccacctcccgggttcaagtgattctcctgcctcagcctcctgagtagctgggattacaggcttgtaccacccatgccccatgcccggctaatttttgtatttttagtacagactgggtttcaccatgttggccaggctggtcttgaactcctgacctcaggtgatccgcctgcgtcggcctcccagagtgctgggattacaggcatgagccaccatgcccggccaggatgttctgaatattaaactagctgaccggtggacattagctgtgctgtggaaaagtgaagcagaatggctttttatcccttgtgtatgatcatcaagacacaggacagcacagagattcaaaatacaatgcattccccttgctcgtctggtcaggctcaccttcctattgcacagggttgattggttggaggccgccaacctctagctgaaaggcagagacagtctcccctgttatttcggtaccaagctgtgtttcttaggcattaaaatggagggaaagcaaccactggcccctcactgggattgttcttgaggattccagacagaccataagtaattcattgagtcgctcacaaagggcctggccctgaaggtttgtggctgcagcatccaggcgagccaaaggtgtcagtgccaccaaaatgcagagaaaactcttatcagaaagatgtcatttttttcccctaaatgtcatatatacaatttttattggagtgtgatgacagatagtgaataaattaacataaatttgcataatacaatacagctgttaatttatgatcatattaaaacacaaagttttgtcgtttgaagcagttaaaagtcttaatcttctgaaaatttccctcttgtttgttatttgtttatgagttacttagggttattagataaaatacaggcttctggttaaatttgaatctcagataaactgtaaataattttttagtgtatctcatgcaatatttgggacatacttatactaaaaagttaatcttattgtatatctgaaattcacatttaactgaatggttatattaatatttttatttgataaatcaggcaactctgtatttcataagcagtttaacctctctctactggctcttctctggcagggcagaggggtgctgttttatggagaaaggcacttactgctgggaccttgatatctttagactgtgggggaggctggctctcctaggaacactaacagagtcaaagagatcagacaagagaggtgccagtgcaaagggggaaactgaggcaggcagcatgcctgggctttcttgacagtaccaggggtattatagccctgttttccagattttttggactacaatctcatcataagaaatataatttataattcaacccagaacacacatcccttataaatggaacaaaaagttttaggaaacatgtcaccttctatgtacaatctgctcgacatcctgttctagttgatttcatttctttaaatgccactcttaaccccctaaattgaattcatggattgaattcatggtcccctaaaggatcacagcccacatgttgaaaaacactgggttagagggtcacagttcaggaaaatgaacgaggaggttttttaaaatctactttacaaacgaggaaatgtatcgggttccttaagagcctttccaggaaaatttttgctcatttgtggccaaactcgaaataaaacttaggtcccccaactcccaaccctgcgttttctggtttccttccaccactctttctagtatccattttcctggtctccaagttgtaatacacattctgggatccacatttacttgttttattttacataattatattacttgtatactatttccttatacttcatattcttctcaaatttccatgttttatatcatttctgatgcaaactgattacatcattgcttatggcacattcttgactgatatcaacattttaaaccaaattgtcttggtacgcaccctctgatctttggcatcttactgccctgccccatcttcaacctcggctcactattttggtgcctcaggaggtctcaaccatgaaccttccatgtgctctcactgggattggtgccatctgtgacataagaaaaacatagaaacataaaaacataagaaaaactattatttgttgtgatttgttctccctaatctatgaagtcggtagggtatctgttataaagattcccttctagagtcgagaaaacagaggctcagagaggttaagtgtttttctcagggtcacacagcaaatacagaactccagtcttcttgctgtgtctcttaccctctgtcatcaggatgcaggggctgctgagctgagatgcctgcagatgagtaaactggcgggaagaaagacaccaacccaatagatctccatgtattttatatattttctcacctactcagtctagattttcaaacaacatacagaactttctgggatcttgtcatcattcagtgtactgtcctctggatcctctccaggagccgcccactccgcacacatttttttttctagttgtcataaacaaatttcaaagaaagccattttcccagagccctttcttgtgactctaccacagttcatcctggtttgcagaatccaaactcagggcttccttccaatatttttattagttcagtagtcgatcagtttgcacagagaagtggattggagctccccttcccttggagctgccagtggagaaagtctcctccaaccctcaggctcagcaccactcagggccagtgagatgcacaaacagcatcttgcaggtaccacaatgccttcatcacttgtatcttccccgaccctgtgatgaagtaggatgaagatggctgagggtatggacgttgggcccacctccctggcttaaagctgctggaccccttacccggccatgtggccctggggcatgacacagttccccctaagcctcgcttcttcactgtttaaaggggataataatagcatctgctctgttagactgagggctggttaagtggaataacatacttagcacatagcctggtacccacttattttttttattttgctactttgtttcaaatcttcaaatcttcctattattccttttttacagagccatgtcagaaaccttagattcacgtcccttccatgtgtcccttccacatgtccctccttgacctgccacaatgcctctgctccacccagagcctcagcacctgcgttctgccccctcagtaaccagggtccctcacctgccactcctgggttgctctctccttttgaactagaaatttttc

SEQ ID NO: 5748 - DNA, 18800 bp, Homo sapiens
  misc_feature (1)...(18800): n = A,T,C or G, or insertion/deletion polymorphism (see Tables 1-2)
gtgtacctggttgagagtgtatgcgtgtgtgtgtgttacatttttatctgagtcactgtgagaatatgtggtttatgtgcgttttcctagtgtctgtgtgtctcttgtagggtctatgtgtctcctgaggggtgggtggaggtgctgtaggcaaaacatggggttatatttggaaaggtggcctggagatggaagtactgctgtcctctgccttgctctttgacaggggccacctgaacttactacacagcacctgagtttagtacagtagcacctgtgcttagtacatagcacctgtgtttagtatagtagcacctgtgcttagtacatagcgcctgcatttagtacagtagcacctgcgcttagtacgtagcacccgtgcttagtacagtagccctgcacctgcacctcccgttccctttcatacctgctgtctccaggtgacaagaggagctggagttggtttctggcctcctccaggctcccctgcatcaagcgcagctgagcagttccctgtaatggggagagggtctgtccctttatctggagcctccagttttgaaaatcagccctggatctccaactgctgcccagtctggctgttcagcaggccccatgcccccctttccccagtcttgaggcctgggactagggctgtcaggcacgtctgccacgtctgcccctctctcccctgcggccagccctctacagccacaagcccgaggtggcccagtacacccacacgggcctgctcccgcagactatgctcatcaccgacaccaccaacctgagcgccctggccagcctcacgcccaccaagcaggtaaggtccaggcctgctggccctccctcggcctgtgacagagcccctcacccccacatcccccgggctcaggaggctgctctgctcccccaggtcttcacctcagacactgaggcctccagtgagtccgggcttcacacgccggcatctcaggccaccaccctccacgtccccagccaggaccctgccggcatccagcacctgcagccggcccaccggctcagcgccagccccacaggtgagaggccctggctccaccccctcccttactgtccctgcccccttccatgttggtcccaccccttctgttgctgtccgtcactgtggggctgtgcatgcagcaggcctagggctgctgtgaggaagcactggcaggcgtggaggggtggggtgggcttccatgaagcccaagaggcacaggcgaccccaggaagatggggcccaccttacaagaacatctcagggactggactgaggaaaatgatgaagtaattgttagaggcagtggagagtaacgataaggaccaggtctgtgagccagaagcgactcttgcatgtgtttggtttggcttggctcagggttgaacattctttgaatttgttgccaacatttcaaaatcaggaattttcacatagaaatccagatttctggcatcttttggaaaattggaaaaattcatattcccatataacagtgcaccaggcctcactgcatccactcacatcggctccaatgacccctggcggtggggcggtcacctgagtttgtaatctatgatgccattgtcaggagtgggcactttggagtcaggtgggtgggctttgcagcctgcctttttgcaagctgccccctttctataaggttcctggacccggccctggcagctgtcatgacagccactgaggccattctgtgtcctggcattcaccccatgaggcgtgtccatgaccacccccattttacagatgagaaagtggacactcaaggaggggagggacttgcctcatctcccacagctaccagatggcagggccaggactcgaacccaggtcccacctcaaagcccattctcttaaccattgccatcagtcagggttctccaggaacacagaaccaacagatttatttgaaggacttggcccgtgtctgcggggggctggcaggcctgaaatctgttgctggcagctccggggagtgaattctgcagccttgaggcagaattccttctctgggaaaccggtttttgctcttacggccttccactgatgtaggaggcccacccatattttcagggtaatctccttcactcaaagccaactgattgtggcattaaccacatctacaaagcacctgcattcacagcagcgcctagattagtgtttgactcagcctagccaagccaacacgtacaactacctacctcggcatctcaccggggcttctccagtgttcacactaagatgtactcaggccactccatgggcggccgtggaccctggctgggaggctccctttgttaagaaccgagggtagaggtgtgactttggggttcctgttatctgctgtgatccaggaggtgtggccctgcctccccatcctgagtacccctagggacaggcaggtggggtgggtgtgggtgcctggtgggtggctagcagccttgtttgcctctgcagtgtcctccagcagcctggtgctgtaccagagctcagactccagcaatggccagagccacctgctgccatccaaccacagcgtcatcgagaccttcatctccacccagatggcctcttcctcccagtaaccacggcacctgggccctggggcctgtactgcctgcttggggggtgatgagggcagcagccagccctgcctggaggacctgagcctgccgagcaaccgtggcccttcctggacagctgtgcctcgctccccactctgctctgatgcatcagaaagggagggctctgaggcgccccaacccgtggaggctgctcggggtgcacaggagggggtcgtggagagctaggagcaaagcctgttcatggcagatgtaggagggactgtcgctgcttcgtgggatacagtcttcttacttggaactgaagggggcggcctatgacttgggcacccccagcctgggcctatggagagccctgggaccgctacaccactctggcagccacacttctcaggacacaggcctgtgtagctgtgacctgctgagctctgagaggccctggatcagcgtggccttgttctgtcaccaatgtacccaccgggccactccttcctgccccaactccttccagctagtgacccacatgccatttgtactgaccccatcacctactcacacaggcatttcctgggtggctactctgtgccagagcctggggctctaacgcctgagcccagggaggccgaagctaacagggaaggcaggcagggctctcctggcttcccatccccagcgattccctctcccaggccccatgacctccagctttcctgtatttgttcccaagagcatcatgcctctgaggccagcctggcctcctgcctctactgggaaggctacttcggggctgggaagtcgtccttactcctgtgggagcctcgcaacccgtgccaagtccaggtcctggtggggcagctcctctgtctcgagcgccctgcagaccctgcccttgtttggggcaggagtagctgagctcacaaggcagcaaggcccgagcagctgagcagggccggggaactggccaagctgaggtgcccaggagaagaaagaggtgaccccagggcacaggagctacctgtgtggacaggactaacactcagaagcctgggggcctggctggctgagggcagttcgcagccaccctgaggagtctgaggtcctgagcactgccaggagggacaaaggagcctgtgaacccaggacaagcatggtcccacatccctgggcctgctgctgagaacctggccttcagtgtaccgcgtctaccctgggattcaggaaaaggcctggggtgacccggcaccccctgcagcttgtagccagccggggcgagtggcacgtttatttaacttttagtaaagtcaaggagaaatgcggtggaaacttcttgcttgtccacaaatcattcagatggggtttgggcaggtagcgggaggctggggcaggccagaggcctgcgaagaggagacaggctccagcacccacgctctcacaccccacatctctgcttttcttgctctgctgagactctaatgacaaagccagatttcatcttaacctcaagcttctactttttaaaaaaattttgttttggagacagggtctcactgtcacccaggctggactgcagtggcattatacagctcactgcagccttgaactcctggactaaagggatcctcccacctcagcctcacaagcagcctcacaggcgctcactaccatgcccaactaatttttgtattcttttttttatagagacgaggtttcaccatgttgcctaggctggtctggaactcggctcaagtgatccacctgcctcggcctcccaaagtgctgggattacaggtgtgagccaccatccctggccatgagcttctacttcttttctttttcttttttttttttttttttgagatagggtcttgctccattgcttaggctagagtgcagtggcgcaatctcggctcactgcaacctgcacctcctgggttcaagcgattctcccacctcagcctcctgagtagctgggattacgggcgtgtgtcaacatgctcagctaatttttgtatttttagtagagatggggtctcgccatgttggccaggctggtctcaaactcctggcctcaattgatccacctccttggcctctcaaaatgcttggattacaggcatgagccactgcacccggccacaagcttctacttcttgcagaatgcctttgtcccatgaaacctagtccacgagtgctatgacacttcctgaagtcttgggtggggtgaacgcacaaatcctgggggtgtagagaggaggaggatgtttacttaaaatgtcttaaggttcagcattgacagagaggcaatatccaaatcactctaagttttgttttgggtcctctgacaattgagtttccataatctggtcggctcagagacaccatcatgtgtggtatattcacaaatgcagacaaagaaaattctagaaagccaggggtgaaaaagctctcctttctcagacgattctgtgaagtctatgtgggctaaggagagaagaacaaaagtttctctgggccttggcctcttggggatcccttctctcattttctaaaaactgtttctcacaccaggctaaggaggtggtggggaaggtctcccttcccctgcccacctcagacagttctagggagatggaggtttcaccacttggccactagtctcaaataactggaaggttccttttttcctgaggtcatgaaatgttctggaaccacagcgcccccgccagccctccgtgggagcacagaggggcnnnnnnnnnnnnnnnnnnnnnnnnnnnnnnnnnnnnnnnnnnnnnnnnnnnnnnnnnnnnnnnnnnnnnnnnnnnnnnnnnnnnnnnnnnnnnnnnnnnnnnnnnnnnnnnnnnnnnnnnnnnnnnnnnnnnnnnnnnnnnnnnnnnnnnnnnnnnnnnnnnnnnnnnnnnnnnnnnnnnnnnnnnnnnnnnnnnnnnnnnnnnnnnnnnnnnnnnnnnnnnnnnnnnnnnnnnnnnnnnnnnnnnnnnnnnnnnnnnnnnnnnnnnnnnnnnnnnnnnnnnnnnnnnnnnnnnnnnnnnnnnnnnnnnnnnnnnnnnnnnnnnnnnnnnnnnnnnnnnnnnnnnnnnnnnnnnnnnnnnnnnnnnnnnnnnnnnnnnnnnnnnnnnnnnnnnnnnnnnnnnnnnnnnnnnnnnnnnnnnnnnnnnnnnnnnnnnnnnnnnnnnnnnnnnnnnnnnnnnnnnnnnnnnnnnnnnnnnnnnnnnnnnnnnnnnnnnnnnnnnnnnnnnnnnnnnnnnttttttggcccaactctcgagcaagccttcatcaccatcagggtctcatgggcagtctgggtttgccagcccagtccttgaacttggagagggaggtggggcttggaaatgccttgtccccagggtgggggggacaccttgtccttggagctggctgagccctgtgcccatggctgggttcagtttgcaggtatagctgtagcactctttgctggtgggaatggagaggtctcgctggccttctttgcctttttcttctttttggtcccaagcgacacctggtccccrttgagctcacctgacttctgcttctggactgtggccatgctggtgggggtggtggcagcgacagccgagtcgacactggccaccttcttggctttctttttcaacttccttttcttctttgcctccttctccacwgttccagggctgtgratggctgactcctgtaggatgtcggacgccgacacagctgcctcccggcaccgccgccactcctcgtcactgtcctcactgctgcaacgagagggtaccctgggttagctggagtcaggacacagccccagagctgcctctcgctgtcctcccttggtccaggtcaccagraggtggccgcagagagaggcaggtagtgagttcaggcttgggagtgaggccaacctggcttccaatactggcttctgggcgtagcagccttgtgacctccttaagtgacttaacctctctgactgtatcatctctaaaacggggatcttaacagagtccaggcctcccagggatgtcccaggaggcaactatgatcaagtgaggtgtctggcccaagacaggtgctcaaaagcagtaaacatccaaagctgccgccaagagggctttccctcccgctgagctcaygatttctccagctgcctgacagggccactgccttggcctggtcctgactggagtctgcttggctattccagggaacccaccaagacagaagaggagaaaaaaggaggggacgtgaggagaggtgtgagttctcacctggagctggagggctgtcgctttcggsggggttggggagactcttccttctcacggcctccagggacagatgtgaagaaaaggcggaaacctaagattcaatggggcagagtcaaacaaaaacaaaacaaaacaaaaagaaacataaaaaaataaaaaataaagaaacaaaaaagaaaaaaattttaaaaaggaaaacgaaagaaagaaaagataaagagaaacaaaaaaaaaattttaagaagacacaaaataaaaaaatttaaaaaagaaacaataacaaaaaaacccaaccaagcaaacaaacaaaraaaacaaaggagcagagtcagcacccccagatgccagcccctcctcccaggtgccaggtgctgaagctgccccgcctctgccctcaggagctcctggtccagaggcaaagacccaggaatcagtcgtctaactacaaagtgattctgcatctgccaagggtcatgctgatgcctgatggagccagtggagggcgcgctggagcaggagccagcagccacatcagctcagcaagccctcagaggcttctggaagtcagcacttgagctcctgacctaaggcagccttcaaagtggcaaatgtgttggtacaggacagacgcagatgggcgaggctgtggagggcagcagtaaagtgctcctgctcagggtgacacagacgaggccgcctcaggcaaatgacttcgtttctcagggcctcagtctccttgtctgtacatggggttcaatcataatacctgcctcaccacaggggctgagcagatgaaagaatggtgaggtggcccatgcctgtaaccccagtactttggtagtctgaggcgggaggatagcttgaggccaggagtttaagaccagcctgggcaacatgacagaaccctgtctctaaaaaaaaatacaaaaattagccaggtgtggtggkgcacgcctgtagtcccagaactttggaaggctaaggtgggcagatggcttgaggccaggagttcaagaccagcctgggcaacatagcgagatcctgtctctaaaaaacataaataattagccaggggtggtggtgtgtgtctgtggtcccagctactcaggaagctgaggtgggaggactgcttgggtccgggaggttgaggctgcattgagctataattgctccactgcactccagcctaggtggcagagagagttcctatctcaaaaaaaraaaaaaaaaaaagaatataccaaaactgtttcgcccacctccagacacacattaggtgcttaataaatgatagcttctattaagtataaccactcaccatcatcctccaaagcgactttctgtaccttagcttttgctggctcctttgctgcttctgagatggtaatgaagctacagggagacgagacggttgatttaagatgagatttttggataacgacaaaaacaaaattctttttcaagtggaggggatggggtatgtgattgtaaatgcaaaagcgaaagcgtgctggcctagtaagagggctgatggtctggttataacatgctgaccagcctctgccacgcgaactgcagtgcttcatttctttaaagcccactttattccagtaagtgttgaagaagttttaaagacatagtaaaacaagatgaggccaggcatggtggctcacgcctgtaatcctagcactttgggaggccaaggcaggcagatcatgaggccaggagatcgagaccattctggctaacacggtgaaaccccatctctactaaaaatacaaaaaattagccgggcatggtggcgggcgcctgtagtcccagctactcgggaggctgaggcaggagaatggcgtgaacctgggaggcggagcttgcagtgaactgagactgcgccactgcactccagcctgggtgacagagcaagactccatctccaaaaaaagaaaagaatttaacaaaatgaatgcaatttcaaataggacaaagagatataagggcaagaggaacagaaagacctagaagtgtagtcaggaagtcctatacacttgttagagagagggcatacattttgctctgagcttcctagcagcaagcatgaaaagggaaatatgaccaatctagaaaactggttcagaggacagcttctggagcagggcagacctgtttttaaatttttttttttaattaaaagaaattggagataattgtagacatgcagtagcaacaaataatgcagatgttccatagaccctccatccattttctcgcaatggtaacattgtgcctcgctatagtacaacatcacaactaggaaatgcaaattgatccaattcatggacctcattcagacttcagagacctgggttttgaatcccggttttgtcacttattagctatgtcccttaagcaaatgactttatctctctgagtctctgttatccacctgtgcagtgggaacgatgaaggtccctacctcttaaggttgtcacaaggattgaaggggaaaatggatatcaagcacttgtggcacacggcctagccacaagtagctgctcagcaaatggtagctatgatgacgatgcagatgatgactgtcatcaagaraagcttcagccttcacargctctctaacataaaaataaaccacatttctctagaggcacaaggccaggaagcatgtgtctggtgagtgcagatggagatgccactgtgcacagcagagaacaaggctctcagcaatgccctcgaggcagaygcagcaatgccctgggtgctttccctaacctcccttcctgtatgccaaaggtgccccccaagccctgttcaggaaaagcaacccggggagagggagtagagatgatgccacccaggcacctgttcttgaccccacacagtggttcaatggtggccatcaggggcatttggcaatgtctggagacatttttggatgtcacaactggtggggtgagtgctactatcatctagtaggtagaggccagggaygttggtaaacatcctataatgggaagaaggatagacccccacgacaaatgctagtcaaagatgtcagtagcgccaaggttgagagacactgacctaacactagggaccaaatgcagtatcatttacatttccttttttttttttgagatgggatctcactctgtcacccaggctggagtgcagtggcacgatctcagctcactgcaacctctgcatcctgggttcaaacgattctcctacctcagcctcccaagtagctgggataacaggtgcacgccaccatgcccagctaatttttgcatttttagtagagatggggtctcaccatgttggccaggctggtctcgaactcctgtcctcaaatgatccacccgcttcagcctcccaaagtgctgggatcagaggcatgagctgccacgcctggcctaaggtatcatttagatttctttggagaaacatgaaaatgctgcagggaatattctaaccatggctgactggcatttctactgcagaaacatctctgtgactcagtgcaatgccaagcaggccctgttcagcctgaagccagagagtcacaaaggaaaactgctcccacaggctgawmtgcagctgccttcctaaacacctcctctacwttctccaattgaggggaaccctgtgggattcaggctgcggggctctggcccatcattctgtctcagaagaatagctggttcacactttgggaaggctcatttgtcctttttgatatctactttgaatggaatgacaatggccccaaatcctgcctcatctccctttcaaaaccctgccagggctctgccagtcaggaacagatctagaccagtgtatccccagacctgttccgcaggttgttgactggttttccatgaaacaaaggcactgtggccaaacaagtttggaaaatgctgggytaaacagttacacaggtctcttcactacaggaattctcagagccttgaatatactactctggcttgcagtctgcaaggacacgtggaggtatgtagattgcagtgtttctcacgcttctttgctgttggacctccttttttctaaagccacgctttgggctagtgctagaatccaaatgtttgtgtcctccccaaattcttatggtgaaatcctcaccccagctgggcatggtgccttacacctgcaatcccagcactctgggaggccgagccggtggatcacttgaagtcaggagttcgagaccagcctggccaacataatgaaaacccatttctactgaaaatacaaaaaatacaaaaaattagccaagcgtggtgggtgcgcacctgtaaccccagctactcaggaggctgaggcatgaaaatcgcttgaacccaggaactggaggttgttgtgagccgagatcacgccactgtgctccagagggagactctgtctccaaaaagagaaaagaaaaagagaaatcctcaacccaaggtattaggattaggagatgggggcctttgagaggtgattaggtcgggagggtggagccttgatgaatgaaattgctgctcctataaaaaaggtctgagagagacccctcgcccatgccactatgtgaggacacagtaggaaggcgccatctgtactgggaagagggctctccccagacactgaatctgctggtgccttgatcttggacttctcagcctccaaaatgtgagaaatmcatttattttgtttataagctacccagtttatgttattttgttatagcagcccatatggactcaaacaggttgtatccttgacacctactttaggaatgccaacctgaatccttaccgactgggttatcaacctgtgctgagaatgtaagatagagacctggcacagtgtctagcatacagaaggcacccaagaaataggaacacggtccttccttgccctcttgtggcgggaatgagcttctcgatgttcctctcttactctcatggttgcaggataatgcaggggttaagaacatgggcttggcccggcacagtggctcacgcttgtaatcccagcactttgggaggccaaggcaggtggatcactcgaggtcaggagttcgagatcagcctggtcaacacggtgaaaccccgtctctactaaaaatacaaaaattagcctggtatggtggcaggtgcccgttaagtccagctacttgggaggctgaggcatgagaatcgcttgaatccaggaggtggaggctgcagtgagccaagattgtgcgtgccactgcacgccagcatgggcgacagagtgagactctgtctcaaaaaacaaaacaaaacaaaaaaatgtgggcttggagtcagacgcacttgggtttgaggcccaattctgttccctcctgggttctgaatcctggctttgtcacttaatagcggtgtcccctgggcaaatgactttgcctctctgagcctcagttacccatctgtacagtgggaatgataacagtccctacctctcagggtcatcagaaggattaaatgagaaaatggacatcaagcacttagcacagagcctggccacaaacagttgctcagtaaatggtagctgygatgatgatgtgacttcaggcacacctgtctccttgctgacagcctgtttcctcacctggaggataaaggtaacaacaggacccacatgataatgttctttataaatgcagggagatgacatatgccaggtgcctgccaccgtgccagcctggacaccgtgagctcccagccaatgtgagccattgctgttcatattaacaagggcaagagaggagaaactccacctttgtttacctgtccagcagggctcccagcttcttggctacgtgggctcggaattcaggggtggtctgaagctcgttgccatcttgttcatgctcattcaccttatgcctacgacacacacaaagagacctcacttcctgcccgctcagaagctgtccccatgagcacagggaccatgtgtgtcttgttcacctggaaatgccaggcgtgaagcctagcatctggcacacgcaggggatcagtatttgttgaataagtgaaacttgaacccaaagtgcatagtacctgaggctcggttgggaggttgacaactggctatttgcagcacctgtggaaaaatgaaaattagggcatttatagaggaaacaatgacagcaacaacaaatgcgtgccaggcactattttcagcagcttaaaatacatataactcatatatatacatacacatgtaactcatatatattatatttatatataacttaaaatagttatatacccataacttcaaatagttacatataatttagttatatatgtatataatatagttacatattttatgtaagtacattatatatatatatatcttagttatataacttaaaatatatatataacttagttatatatataaaacttaaaatagttatatatataacttagttatatatacataaaacttaaaatagttatatatgtaacttaaaatatatataacacatataactcagtgaatcttcccaacaacccgattggagggattacaattatcccattttgcagaagaaacgtcaaagatatgtaaaataacttggccagagtcaaatacctaataagtgacagggttgggctgggggcccaggccatctgactcctgagccccctcttaaccaccacgctgtgctgaacaggcaggtctaagtgtgatttgactgcacagtttaatgcctgcctggctgtgtgctaagtgccgtggaagagagagaagatggctcttttgtggatcacatttttcaagccaaaacggtggggatgcccggccttttggtcattccctcaaaccagatactgaatgccttttattaaccaggtgttgtcattgctgagcaacttactcgactatcactgtctgcaggagcttacattctagttggtggagagagatgataaacacacatacgtaaacaaaatgtcaagttggataatgctaagtgtatggaaaaaaacggaaacaaagtaggcgagagaggtggggagtgttgggctggggattgttaacataaaggtgggcagagagggcttcactgataaggcaacatttgaacagagatttgagagaggagagggagtgaaccaagtggacatgtgggacacagccttccaggcagagggaaagcatctgcaaaggccctgagactggagcctgctttgtgtgtttagaaccagcaaggaggtcagtgtgaccagagcctgcccagtaaaccgggagcagcagagatggagaactcagaggggccagatcatgaagggccctgacgtgggccaatgggaggacctggactttgaggaggaggagctctggaaatgagcagagaagggacataaactgacctgggttttgacagaacatctttggctgctgtgcagcgtgagactgttggggcaaaggcaggaacacggagtctgctgcagtaattgatgtggtgagaagtgggtgaactccagatagatgcacttttaagatggagtcaaggccgggcgcggtggctcacgcctgtaatcccagcactttgggaggctgaggcaggcggatcacgaggtcaagagatcgagaccatcctggtcaacatggtgaaaccccatctctactaaaaaatacaaaaattagctgggtgtggtggtgcacgcctgtagtcccagctacttgagaagctgaggcaggagaatcgctcgaacccaggaggcggaggttgcagtgagccaagatcacgccactgcactccagcctggtgacagagcaagactccgtctaaaaaaaaaaaaaaaaaaaaaaaaagatggagtcaataggattcactgatggactgactacagggcgtgagaaatgagtgaaagttagctctgaggtttctgacttaactaacaagacaaaacgtgcttgtatatttaaggggccaactgaacaaagtggacacttggtagctccgggcccagtggagggccatggtgtaagaaacagctccatgggggcactgctgtgtttatgtcatcacccatacacattgcatctgtgtcctagtaccttgtggtctgtgtcactgtactccagagcacaacacagaatgctaaacacgccccatgctcctggaggtgggtaatgtgggggcctggatggacagtctttaaagacctggtctttcgtcttcagcacataatcacttggaagaagagcatctcttccatcatgactacagtgtgatgaaggtgaggtaccgtcagggaacagaaacagtattacagagggagacagttcagttgagtcctggctctgccaccaagctgtgtgatgccgggcaagtcactttctctccctgagcctttgtttttctcatctataaaatgggaatacgattaccaaccttctggagtcagtgttgtggacgctgtttccatacccatccccttcctggatttgtaagctacttgaatacgtggtctgcctctttttacctctgtatccccagatcctgccatagtgtcttggtttgaattaattgtcagaaaaataagtcaaagtagatgccaccctaaaattaaagtggtttgagtgacgagttcatcactggatttaagagctgtctctagaggttacataaataaaatagtgacctatatttccacagtcatggaccaaagggtgggagttttgaccacaatagacacttgtccatggcagagtggcacagcagcaatgaagagcatggacttgggagtcaggtaggcctgggtttacgcctggttctgccactcacaaattggacaaccttggccaagttattttaccattatgagaatcagttttctgtaaaatggggctaatacaccctcttgtggcattgctgggaagatgaaaacagacaacaaatacaaagtgtttagaacaggggcaaaaagaaaattctcaactcctggtggctattactagacgcactcaagaatgtaatctaggctgggtgtggtggctcatgcctgtaatctcagcactttgggaggccaaggtgggcggatcacctgaggtcataagttcgagaccagcctggccaacacggtgaaaccctgtctctaataaaaatataaaaaaaaattagctgggcctggtggtgggcacctgtaatcccagctacttaggaggctgaggcaggagaattgcttgagcttgggaggcggaggttgcagggagccaagatcgcgccattgcactccagccttggtaacagagcgagactgcgtctcaaaaagaaaaaaagagaccaggcgcggtggctcacacctgtaatcccagcactttggaaggccgaggcaggtggattgcctgaggtctggagtttgagaccagcctggccaacacggtgaaaccctgtctgtactaaaaatacaaaaaattagctgggcgtggtggcaggcgcctgtaatcccagctactagggaggctgaggcaggagaatcacttgaacccaggaggcagaggttgcagtgagctgagatcgtgccattgcactgcagcctgggcaacaagagtgaaactccatctcaaaaaaaaaaaaatgcaaaaaaaaaaaaaaccccaaaaaacaaacaaacaaacaaaaaaaactagaagccgagcacagtggctcacacctgtaatctcagcactttgaaggttgagaagggaggatcacttgagcccaggagttcgagaccagcctgggcaacatggcaaaaccccatctctacaaaaaatacaaaaagtagctgggactatacatctgtagtctcagctacttgggaggctgaggtgggaggatcatctgagtagggggaggtcgaggttgcagtgagccatgattgtgtcagcctcggtaacagactgagtcctagttttgaaaaaaaaaagagcgagaattaggcaggaggaggaaagcagtccatgtggaaagaccaaccacatatttgccaccatgtattgggcctttaagatgtgccaagcactgtagattgcattatctcagttacttctcaaccttatggggtgggtactatcactacccgcactgtacagatgaggaaatttaggtacagtgagatttaagtactttgctcaagttcccaccgctaatgagatggaaaggcagatctgtaaatagaacttgcagagaaaactgtggttatggtactagggggtgagaggggcagactatggtctggaagctacctacaggaagtgcagtatggcaggagggaaggaagggagaggaaggcaatggatcaccaaagggcttgtaagtccttttaaacaaatccagcggttcttaaccttgctttgccatagccttctctaacagcctggtgaagcccggttctcttctcagagcaatgttttaaatgcatgaaatgcaacatacaggattacaaagaaaaccaatgataccgaaatttaattatcatgatagtaaacaaccaaacttgtgatgtatgtgcttcttacatcttagatatagagatgggtctaaaaattagagtggcacattttaaatcagggatgagtgtaaatgacttttttccccaatatctttttatcaataaaatgatatattgatatctgtatctgcaaagattgtaatgagatatgaaaatctgtgacttctgttgggataaagtaacggcattgccagaactactgtggcttagtgcttgcaagacggaaagagatgctaaaattcagtcagagatgaatagaaagcaaagatgcaacatgttttcattccaaattcaagaacccttgggttctatccatgattaggccccttgatgttgcggggctctgtatttattcccagggcactagggagtcacggtcagagtgatgtgctgggcactgctcttggcaacaacctccagggtgggagaatgtgttggaggtggggaaaggctgggtgcgagaataccgggagggggctgttgcagttatctcgaagagacggcagccttcccagtgtggggcagtgaggatagacccaaggaggcagaatcaaaagacatttgggtacctcagcttccccgactggaataatgaaataccctccctactgcacctgcccatgctttcaatctgcactacacccagtccctggaggtctctcggggaaggaagccgagtcccagtgactctctcctcaccatccatcctctcaggctccaggggaagatcccacgcccctcagccagtctccccaaacatagtaccctaccggctcttggcttccctgccacgtgcgggcgttgctccaagccccaagccggcattgccgcctcgcggcaccgctccagctcctccgcatcgctactgctgttactactttccgaatcgctcacagtgccactgggcgccgccatcttgaaccaccgcaaaggattgtggagaacaccgccgttatcaagcctccttcatgacgtcacgtgagaggagaggcgcgaggcattgtggggattgtagttccaagacttggaccgccattggccatgaactgtactgggttggggataccaggtgggaatggggaggtgggcggttctcaaaggcaagagctagaagggcctaagagattaacttctccaatcatttcttgatgacagatctccagaggggatgggaatctcctaaggagttaatgacagacccaggattagttcccaggttttgattccatgtcatttattctagtaatttcccagtccagttgggcctaagaaacaccttagagagctggttaaactgcagacttttgggtctcacagaaaatactaa

SEQ ID NO: 5749 - DNA, 59801 bp, Homo sapiens
tgggcagatgtttctgaagggcagaggtcatctgagggaggtctagagatcaagcagaagagccggtcttccattttggctggagtcattcccttctggggttccttaaccctttagccagaacatgtcatcaactcattcaggaagttctggcctttaaaatccacatctccacgactgtaagaagctctcaaagccctcaatgctctattacttttacagctcacagaaaacatttatctttgactctttgccccatgaaagtaagtaggaaacataaatatatttattaagaaacacactaggccaactaactctagccctctggtatgggtctagaaatcatagccattccaattcatcacagcttgtcctacagtgcacagtacaagattagcaaaaccagcccttctggtttttaactaactgatttctattaagcaaatggtgccaaaccggatttgttatactcatggctccactttcaacccctgtggtctctcactttaactcctttcagaaagctggtatcatcattgaccccattagtgctgtcttctttttaccttcactggggacatcaagtgtctcacaactatgtactgccaatgtcctcagtcagtgagtgtacagggtgaggcactttgctttttcttttcttaagtaggaacacttgggtaaagtgatacaccaagttacaaatcctctggaagcaatcccttctaatgttgtgagtctgggagagaagtagggagttgggaagaaaggaacgttctggcttcctttgctcccactgagagcagtggtgacccagagcctccactgggcctaattcagatggtttgggaagtgatggtgtgtgtgtagctcctgggcacaaggaaggtaccccagcaatggccatgcaagttttccatgagaaaactttccagggcaaggtaccatccaatgagaagcagaaacacagactgtctcaaggctgaaaacacctaaaaccatctgatttggtggtttgcatgcaacctcttatagccataggaccttttcttcaaacagcagagcctaatatgtcaaactcatacaagcatagttgctttcttggaattgcagtggggagaagaataaagccccacaaactgtcttccccatggcttctgaatagagctagacactatattcttttccttggttagggattacctcacctggaaaacctggcaaaggaaatgaagaaattttctgctacctggggcagggtggagagagaaatatcctgaaactttaattctaccctgataaaatttggcatcgtattataaatttggcaacatattataaagtggagattgcaattgtcagaaatgtagcagaactgtcaacagcatactaaactatgtgacactgaaatgtgagttacacttctagttgtctagttctggtataagaaatacaaattctttaccaacactcaacccacagaatacaatggactcttacatgtcccgcccttactcccatacacaacttttagcctcatgtacttacgaataaaacatatactcaatagggcagtaggcaaaagcagaatgctaggtttgaaaaggaaatcatatctactgtttaaggtcatatgttgacattagaatgaagaataagtcattataaagcattttttctcacctgcggttctaattgctacaggtgtttgctgagggttgaatagagagcatgcagttcagacactttattgatatagtacatgttcctcctaagtttaggactaaatcccagccagtacagggactcagtagactcatctaccaaagtccggtgtgcacattagaaaaaaacctaagaaagatcatgtgcatttaacacctttccctctagccattcaaaggagcttcacattgcagccctttttcacctttgttaggcacaccaagtggcctggaagatgctgagaacaaagaggctttcttccttgggttaccggttgaaatacatcatcgattcagcccggctcaatcaatggtgacagcagctcgcagacccaactcacgtgggggagagtcaaggcctccttacaacactgtaccaggactccttcaggcacgagctctcccacagctcctgtgccgcccagaggagtataaagacctgtgacagaatgtgggacactgcctagagcatagcatttgtgccacagtctgagaactgcaaactagagttgccaacatttggagacattaggaaagttaaatgtgaaattttgtggataaattttgtggataaatgcccaggatgtatagccctccaacatttcaattaacgtcaactatcatcacataaagcaggggtgtggagaccggaaaactgggctgttttattttaattttctaacaacatctactgcgcactgactctgtggctggcacagaactaagcctctgacacagattatctctttaactcctcacaagaccctttggtaagtaccattttaacccagttttacaaatgaggaaaccctggggcttaggttaagtagctggtccaagggcacagggctgacaagtggcagccaaatgtgaacccagctgggtagagctgtgctatgcttcctgtgcttgaaatttaatgcagatgccagcatcctcaattaatataacaattgtgaagctaaaataaaatcaacatttaaaacagtgccttccccatactaatgtacattgctcatgctaagcgcttaatattaaggaaacaaatattatttaactttttttggtgaaggacacaatcatacaatatatacaaatatctaatattagctggttgcagacagtctaaaatgatcactgcagctaaaaaaaaaacctcaaaatgtttctgagaatcaaaggagtgtgaataaacaacactattctaccaaagcaataaaataaaaaattgttttaaaaaaaaccctcaagtagttataatgcagataagtgtagtctttggaaatgatttaaaatttcatttcaatgtctaaattataaagcctcaaattaatcattataagttgttttaataaagtttaaagtttagcacctagtgaagtaacttatgcatagtaggtttccaataaatgattctggaatgaatgactaaattcatgaaggcacttttgaaaacagacagacattgtcctttccttgtgtttgatttttttttttaattccatgataaaggttgcatgacatttccttattagtaatttttttaaaggaatcccaggatctccagttcaaacaaaggaaataactatcaccttgaaagacaaaaagaaataattggctgaaaataattaaaaacaaatgaagtgtttgtctttacagtgagatatggggataaaaagagtagcagcttcttcaaaatatctttattaacatttgagaaaatataaaactattctctaggcaacagcatgaaaacacatgaaataagtgggtacatttaagccactgtgactggtgaagaagacatttccccgtacatataattaatataaacaggtaaattcagaccaataaaacacttctttctcaaaagcattttagtgccctgtgttactctggagactcagtagttgaacaaatatgtgctcaaaaataactattcattctttaacagtacttaaaaaaattaatatgaacataaaaacacaaattactccattatttccataaggtaaaatattaggttaaaactacaatggccaaactgtttagcaaacctctgtcctattttaaagggaaataaataaataagagataggtctatggaaaataatgaagttgtctagcaacacttttcacatcacttccaccatttcaacagaaccaacagcaaatctaaggttccccaagcgtttcccacttattagggaaatcgatagcattacctgcggggtgcctgcggttgcttctgcataaggcttttatctcattttagcaacatttaaaaaatgcaggatgtctataaccttggcactcatcattacgctggcatctttagtacaatttgctaatagagtgaaagcactgtggttcagtttgggaagcttcttcataaggttctgccaaactgcaaaggggacggaacaaataaataggctgaccgtacatacatcagaaaaagcagacccttaaaatccaaaagggagttattcattatttcaaaaacacgttattttacaaaagaagaaagaaaattgaggggataatattttcaaaaatataagaactataaaataatctaaattgaatttcgtttgtcctgtctaaactcatcctatactgatatatcatttccatagacaaagcgagtcagatgtgttagaataacatatatacatataaaatataccaagccatggatttaattttcataataactatctcatttgcctaaatgtttggtactaagtggtagaaatagaagacaaaatgttcacacctgagattacatattaaaccgccctaggttttagtctcatacttgctagaagaaatctgcaaggaatgatacctggatgcctgcggattccaagtgtgacaaagcattttttgaaaaagcattcagaagccttgctttcgactacacaaagctaagcataaattttaaaggccaaacgtcagtcagtaaaactgaattcctgtagttctcatggttccaacgatcttgaagagcataggtacctgactcaatttacactgtcattttttatgcttaaaaatataaaccttttttcacatttacaaaatatgcacgatatatattacttgagactaatcttagccacagagctgccttttattttcagctttgtatttctgagaaactaatgaatctatggtgtagataacagcaaaagtggaaataaattcatagtctggggcagcagtataattgggacacagtaaacttacaaggaaaagaaacagtacactactactgtaaaggaaaacaagttgcataatattttccagagtctgattacttttttgttaaaacttttctacttttttcattgattgttttaaaacatgtttgctactaaggagaaaaaggaagacatggttatggtgtgaatcttgaaagatccccaaagctagaaagatttatacagaagtctctcattttccaacttctgttataaagttcctgcgctagtacttagaaaaaaccaaacctggaaggaagctctacctagtttactttctgagttcggatttccgcatctatcagatgagctctttctagtgctctttccccctcaaatctccagagaaacacgcacatttttgcaaacacacacgatgtatctatgactgcacacacaggttcatcaacaccatgacagaggcgacacgtcacaatatgataaccagaacagaggacgatgacagtgagaaatgggtttcttttatggcccgcttggatccctaatgcccttatttctacacaatccagcctcagccaggaactttaaaggatcagaaagagaaaacaggttgcatgaaaggaagagaaagaaaaccgaatgcccgcttttcgagagcactgcaaaattagccccgggacccggctgcacaaaagtgcagccttaaagaatgccagcccatattctagacacccaagtaaagcatcctgtaatcgagagaaaataataaataatagtggtcattgccattaagcataaaaatagtaataacaattgtcaccacggcgttccgtacagcagctgcgcgtggagccggcttctcctccggcccccacggcccgcagcttcccctgcagccccacagtgcgtcggaggaaggcgagggctccgcgcgcgctgcaccgtgggctgggcctgcccctcccggcgcccgcctcgcctcgcctgtcccgcgcccgcctcgcctgtcccgcccccgcgcctgcgcgtcaagtggctgggctggcttagcggacyccggttgctagggtgtgtctccttggcctcctagagggtggggatccgtggtgcttcttcgggaacagcctcctgcaggaagaccctcgctggacctttacctcgctgcctagattccgaggaaaaggagataggagacgaaaagccagttggtttggaaagcggccgattatcctaaagggtagtgtgggagtccagcacttccatgcccctctttgggtactacggaagggagatttccagcatcgtgtggaacatatgaccagggagtacaccttgagcgcttgtgtgcagttatcttttggcggtaaacggcccatttgtgcagtttcagggtgttcccttctaggctatcaatggaataatgccgtgccaggcacttttgatgttgccctgcaaactaaaagcacattttgggggtgcatcttctcgcattatttctaaacagtatgagttgggatccagcagccctgggaaatctcattatagtgaaacccatcttattttaggattgaattgttttggcccaagcatagtggttgaaaaacaagccattatagaaagaaaacaatttgtttgtgaatggttagatatggtgggtcttcagaggcttatctaatgaaggcatcttctacacatttctgaccaaattctctttctacatttatagcgataacattttggagagagagaaaaaaaatgtcatttcgactattctgaaaaatcagtatttactagttgaaatagcattggcaaattgaactttgtactaacatggaaaattgtagaatgatcctgggtagtaataatacacatatttttaaaattctatgtttacttataaccctacattttaactggattctttctattaatagaagttttaaagaattattttcttaccctctttttttttcataaaggaattctgcctggattcagtagagtattggtacagaatgattttctttaagatgtaatctaaattcttattatttttcaacaattcaaacatattcaaaaccttttcaattctcatttaaaccaaggattatgaaaaacagcacttattattcattaaaatgcaaaagcccccactgcttcttcgaagacccttacctccaaaattcactaagctgtctttacatgagaaaaaaacccatacaggtatgtgtattaatcagatatgtgtattaacatttatgtatctttcatagaaattccttgacttgcacagctcagaatcacaataaatacactcactaataacttacaaatgtttgttgtcaggtgataacatccaattcaattccacagatgcatttactgatacttattggtggacttagtagattcaagtttatctcatcgataaaatttacttgtaaccccagaattggtactcaaagggctttctcagtcatgcgtggatatgtgcagagcactgaaaatgagtcacccaacacacatgcctccagctgaggtggaacaaggctacctctaccttcttgtttcagctctcatattgtaaacgggtactgttttccctgtctgtttagctctatgtttcttgaatgtttgtgcttttagttagtgatttcactgtgggccccaagcatagtgttgaagtactgtctagtgttcctgagcacaagaaggctgtgatgggccttacagagaacaagatatgtgttagataagtttccttcaggtgtgagtagtgttgttggccctaagttcaatgttaacaaatcaactgtttatatttattaaagtgtctttaaatagaaacaaatataaaacaaaattagtgttgatcagttgatgaaaatgttgaaaccagaggtttgcaggaacctagccccatatttcttccaggagaaatggttcagtaatgagtaattcattgtttgtagaacagaactactgcaaataacaaggaccgaatatatttagtgagcaaaaacagaccttacctgttcccttcattagttacccactgggatastgattgtaatcaatcaatcatataagtaaatgcaaaattaccctgtgataagtgctatgaagtaaagatgagccacttttataactataactttatctaatgcttaatcctctatttctgtgtatggtttctattccctccttattataagcaatacaattagcatattttctcattttccccttctcagtttcctcttccatctgattttagttgattgcagttttagtgtcaacatttatactgttcaaatatacctagtctataacttgatttataatgttaaattatcatcttttgacctatggctattaacartaggtaactcaacttacctgtaatactgccacaatttcctctcctactttctctcccaacttttgttacatgatttttacatcatcatttctacatttctataatgttctgcatttacaatctgttctgtaataatacagtatgcagatttacagctcaaggttaccagttatcttgtagtttctccattcatcttttgtttaaagtttatcttctagtacagaatttcacaaccttggcactattgacattttaggttggatggttccttttttttggtggggaaagcagagctctcttgctccaaaggctcttgacagagggctttgcacatagtaggtgatcaaaatttgtttttttatttcttctaaaaaaaaaaaaagcaggatacatgcacagaacgtgcaggtttgttacataggtatacatatgccatggtgatttgctgcacctattgacccatcctctaagttttctcccctcaccctccacccactaacaggccctggtgtgtgttgttccccaatctgtgttcatgtgttctcartattcaactcccacttacaagtgagaacacacagtgtttggttttcttttcctgtgttagtttgctgaggatgatgkctttcagcttcatccatgtccctgcaaaggacayaatctcattcctttttatggctgcatagtattccatgatgtgtatgtaccacattttctttatccagtctatcactgacaggcatttgggttggttccatgtatttgctattgtgaacagtgctgcaataaacatacgtgtgcatgtgtctttatagtagaatgatttatgttcctttgggaatatacccagtaatgggattgctggatcaaatggtatttctggttctagatccttcaggaatccttatactgtcttccacaatggttgaactaatttacattcccaccaacagtgtaaaagtgttcctatttctccacagccttgccagcatctattgtttcctgactttttaataattgccattctgactggcgtgagatggtatgtcattgtggttttgatttgcatttctcagatgattagtgaygttaagctttttttcatatgtttgttggctatgtaaatgtcttcttttaagaagtgtctgttcatatccttcacccactttttgatggggtggtttgttttttttattgtaaatatgtttaagttccttgtaaattgtggatattaaacctttttcagatgggtagattgcagaagttttctcccattctgtaggctgcctgttcactctgatgacagyttcttttgctgtgcaaaagctctttagtttaactagatcccattttgtcagttttggctttggttgccactgcttttggcgtttttgtcatgaagtctttgcccatgcctgtgttgtgaatggtattgcctaggttttcttctagggtttttatggttttaggtcttacatttaagtctttaatccatcttgagttaatttttgtataaggtgtaaggaaggggtccagtttcagttttctgtgtatggctagccagttttccgagcaccatttactgaacaggagatcctttccccattgcttgtttttgtcaggtttgtcgaagatcagatggttgtagatgtgtggcattatttctgaggtctctgttctgctccattggtctctatgtctgttttggtaacagtaacatgctgttttggttactgtagccttgtagtatagtttgaagtcaggtagcgtgatgcctccagcttcgttctttttgcttaggattgtcttggctatgtgggctcttttttggttccatatgaaatttaaagtagttttttctaattcttggaagaaagtcagtggtagcttgatgaggatagcattgaatgtataaattactttgggcagtatggccattttcacgatattgattcttcctatccatgagcatggaatgtttttccatttgtttgtgtcctctcttatttccttgagcagtggtttgtagttctccttgaagaggtccttcacctcccttgtaagttgtattgctaggtattttattctctttgcagcagttgtgaatgggagttcacttatgatgtggctctctgtttgtctgttattggtgtatacgaatgcctgtgatttttacacattgattttgtatcctgagactttgctgaagttgcttatcagcttaaggagactttgggctgagacaatgggattttctaaaaatacaataatgtcatctgcaaacagagacaatttgacttcctctaccctttattgctttcccttgcctgattgtgctggccagaacttccaataccaggttaaataggagtggtgagagagggcatccttgtcttgtgccagttttcaaagggaatgcttccagcttttgcccattcagtatgatattggytgtgggtttgccataaatagctcttattattttgagatatgttccatcaatacctgtttattgagagtttttagcatgaagtggtgttgaattttatcaaaggccttttctgcatctattgagataattatgtggtttttgtcattggttctgtttatgtgatggattatgtttattgatttgatttatgtatgttgaaccagccttgcatgccagggatgaagccgacttgattgtggtggataagctttttgatgtgctgctggattcggtttgccactattttattgaggattttcacatcgatgttcatcagggatattggcctgaaattttcctttttctgttgtgtctctgccaggttttggtatcaagatgaagctagccttataaaatgagttagggaggagtccctctttttctgttgtttggaatagtttcagaaggaatcataccagctcctctttgtacatctggtagaattcggctgtgaatctgtctggtcctgggctttctttggttggtaggctattaattactgcctcaatttcagaacttgttattggtctgttcagggactcgacttcttcctggtttcatcttggggagggtgtatgtgtccagaaatttatccatttcttctagattttctagtttatttgcatagaggtgtttatagtattctctgatggtagtttgtatttctgtgggatcagtggtgatctcccctttatcagtttttattgtgtctatttgattcttctctcttttcttctttattagtctggctagtggtctattttgttactcttttcaaaaaaccagctcctggattcattgattttttgaagggtttttcatgtctttaactccttcagttctgctctgatcttagttatttcttgtcttctgctagcttttgaatttgtttgctcttgcttctctagttcttttaattgtgatgttagggtgtcaattttacatctttcctgctttctcctgtgggcatttagtgctataaatttccctctacacactgctttaaatgtgtccaagtgattcaggtacattgtgtcttcgttctcattggtttcaaaggacttatttatttctgcctgaatttcgttatttacccagtagtcattcagtggcaggttgttcagtttccatgtagttgtgcagttttgagtgagtttcttaatcctgagttctaatttgattgcactgaagagactatttgttgtgatttccgttattttgcattttctgaggagtgttttacttccaattatgtggtcaattttcgaataagtgcgacgtggtgctgagaagaatgtatattctgttgatttggggtggagagttctgtagrtgtctattaggtccgcttggtccaaagctgagttcaactcctgaatatccttgttaattttctgtcttgttgatctgtctaatgttgacagtggggtgttaaagtctcccattattattgtgtgggagtctaagtctctttgaaggtttctaagaacttgctttatgaatccaggtgctcctgtattgggtatatttaggatggttagctcttcttgttgcattggtccctttacccattatgtaatgccctcctttgtctcttttgacctttgttggtttaaagtctgytttatcagagactgggattgcaacccctgctttttttttttgctttccatttgcttggtaaatattcctccatccctttattttgagcctatgtgtgtctttgcacgtgagatgggtctcctgaatacagcacattgatgggttttaactctttatccagtttsccagtctgtctgttttaataggggcatttagcctatttmcatttaaggttaatatcgttatatgtgaatttgatcctgttattatgatgctagctggttattttgccctttagttgatgcagtttcttcatagtgttgatggtctttacaatttggtatgtttttgcagtggctggtaccagtttttaccttccatatttaatgcttccttcaggagctcttgtaaggcaggcctggtggtgacaaaatccctcagtatttgcttgtctgtaatggattttatttctcctttgcttatgaagcttagttgggctggatatgaaattctggtttgaaaattcttttctttaagaatgctgaatattggcccccactctcttctggtttgtagcgtttctgcagagagatccgctgttagtctgatggacttccctttgagggtaacccgacctttctctctggctgccttaacattttttccttcatttcaaccttggtgaatctgaccattatgtgtcttggggttgctcttctcgaggagtatctttgttgtgttccctgtatttcctgaatttgaatgttggtctgtcttgctaggttggggaagttctcctggataatatcctgcagagtgttttccagcttggttccattctccttgtcagtttcaggtacaccaatcaaatgtaggtttggtcttttcacataatgccatatttcttggaggctttgttcgttccttttcattcttttttctctaatcatgtcttcatgctttatttcattaagttgatcttcagtctctgatatcctttcttctgctgatcgatttggcttttgatacttgtgtatgcttcacraagttcttgtgctgtgattttcagctccatcagttcatttagcttctctaaactggttattctagttagcaattcatctaacctttttttcaaagttcttagcttccttgcattgggttagatcaagctcctttagctcagaggagtttattattatccaccttctgaagcctacttctgtcaatttgtcaaactcattctccatccagttttgtttccttgctggcatggagttgtgatcctttggasgagaagaggcattctggtttttggaattttcagcctttttgtgctagtttttcctcatcttcgtggatttatctacctttggtctttgatgttggtcaccttcggatggggtttctgtgtggacatctttttgttgatgttgatgctattcctttctgtttgttattttttccttccatcagtctggcccctctgctgcaggtctgctggagtttgctgaagggccactccagaccctgtttkcctgggtatcaccagcggagcctgcagaacagcaaagattgttgcctgcttcttccactggaagcttcatcccagaggggcacccaccagatgccagctggagctctcttgtatgagatgtctgtcgacccctgctgggaggtgtctcccagtcatgaggcacgggggtcagggacccacttgaggaggcagtctgtcccccttagcagagctcaagtgctgtgctgggagctccgctgctctcttcagagctggcagacaggaacatttaagtctgctgaagctgcacccatggccgccycttcccccaggtgctctgtaccagggagaaaggagttttctctataagcccctgactggggctgctgcctttctttcagagatgccctgcccagagaggaggaatctagagaggcagtctggctaccacagttttgctgagctgcagtgggctccacccagtttgaacttcctggtggctttgtatacactgtgcagggaaaactgcctacttaagcctcagtgatggcagacgcccctcccccaccaagcttgtgtcccaggtggacttcagactgctgtgctggcagtgagagttgcaagccagtggattagcttgctcagctccatgggggtgggatccactgagctagaccacttggctccctggcttcagccccctttccagggtagtgaacagttctatctctctggcattccaggcaccactggggtatgaaaaaaaaaaaaaaactccagcagctagctcgatgtctgcccccatggccacccagttttgtgcttgaaacccagggccctggtggtgtaggcacctgagggaatctcctggtctagaggttgtgaagaagatgggaaaagcatagtttttgggttggagtgcaccattcctcacggcacagtccctcaaggcttctcctggctagggttgggagctcccggaccccttatgcttcccaggtgaggtgaygccgyaccctgctttggctcgccctccatattgggaagatttctttaagcatcgyttctctacccaatcagactgcctttttcttttctcccatagtattccatacttactcctacgcaccacttattataactgtttacctgcctagtttctatactaaattgtgagatatttgttggtagtaaggtttgtgttatatcattgtacccccagcactatgtgtacagctggcacatggtaggtgttaaatgtttattgaatgaattgatgagaacaataaatatgtgttgtattatcaaagaaggatggattgcatagggtttaaggtagactttgaaagaaaaaaatgatttgaattggttgataagagaagattttccacatagcatgatgaacatatgaaatgaagtcatacatgagcaattgggcctttttggttgtcagaaataattgcagtaaataaggcttcatattggaaagttatgagtcatcacacaaaaaggtgaggtaaagtagatcctgttcacttagatttttatatcccaaactaagaaatctgaattaataccgattctgataattcagcgaaaacatggtatgacaatatcagaaaaccaatgggaaattaactctgaagactaggacgatggcagtgataatcaggggaaaaactttttttaatttttattttcccattttgttttcatgacattgggtttgaagagaggggttcataagtatatgggactgtgatattttgctgtctctcaagtgccatatggatcaaagttcaaattttgtcttcaagttcaagacttggttctgagtcagcagaggttaacccattgctactggggagtgggggtctgttggaagaaagaaggggacattggtgtgaatgactgtggaggactgcagatttccagaacccatctcaggccttggacgttttcaatatagtttatttgttgggagttgccaaagcagacccctagagcaacatggaatggctaggctgagattgtactgggagtggaaggttgtcaggcgtacagtgaacagctgatgagaacacacaccttcagggtttctttttctctgcatcctcactaacatctgttattttttatctttttaataacagccattctgactagggtaagataatatctcattgtggtttaatttgtatttctctaatgattagtgatatwgarcatttttaaatataagtgttggccatttgtatgtcttcttttcagaaatgtctattcatgtcatgcctaaggggattttttgttttctaaggggattttttttttcctgttgagttgtttgaggtccttgtatattctagatgttagtaccttgtggtatggatagtttgcaaatattttctcccactcaacaaggtcttagtcataaattattttcctagaccagtgtccaggagagttttacctaggtcttcttatagtatttttatagttttgggtcttaagtttaactctgtaatccatttcgagttgattgttgtatatggtaagagatagggatccagtttcattcttttgaatatggctgtccaattttcctaacactgtttattaaagagggtatcctccagttagaatggcaatcattaaaaagtcaggaaacaacaggtgctggagaggatgtggagaaataagaacacttttacactgttggtgggactgtaaactagttcaaccattgtggaagtcagtgtggcgattcctcagggatctagaactagaaataccatttgacccagccatcccattactgggtatatacccaaaggactataaatcatgctgctataaagacacatgcacacgtatgtttattgaggcactattcacaatagcaaagacttggaaccaacccaaatgtccaacaatgatagactggattaagaaaatgtggcacatatacaccatagaatactatacagccttaaaaaaggatgagttcgtgtcctttgtagggacatggatgaaattggaaatcatcattctcagtaaactatcrcaaggacaaaaaaccaaacaysgcatgttctcactcataggtggtaattgaacaatgagaacacatggacacaggaaggggaacatcacaytctggggactgttgtggggtggggggaggggggaaggatagcattaggagatatacctaatgctaaatgacgagttaatgggtgcagcacaccagcatggcacatgtatacatatgtaactaacctgcacattgtgcacatgtaccctaaaacttaaagtataataataataaaattaaaaaaaagaaaaaaaatataaaaagggtgtcctttccccagtgtcagttcttgtcagtgttgttgaagatcagttggctgtaagtatgtgactttatttcaggattctgtattctgttccattgagcatttcttgtagcgtcactcttggttgtaacaaatttcctcagcatttgcttgtctgggaaatactttatttttcctccatctgtgaaggataattttgctgggtagactcttcttggctgacagttttttttgtttttttttttttttaatttcagcactttgaatatatcacctcattctcttttagcctgtgaaatttctgctaagaaatccactgttaaggccaggcacagtggctcacgcctgtaatcccagtactttgggaggcygaggtgggtggatcacaaggtcaggagttcgagaccacctgggccaacatggtgaaaccccgtctctactaaaaaaatacaaaaattagctgggcatggtggtgtgggcctgtaatcccagctacttgggaggctgaggcaggagaatcgcttgaacatgggaggtggaggttgcagtgagctgagattgtgccactgcactccagcctgggcaacagagcaagaccttgtctcaaaaacaaaaacaaaacaacaacaacaaaaaacaaaaaaamcccacagaaatccaaatccactgttagtctgatgggrtttctttattggtgaccagatgcttttctcttgctttttaaagggtatgctttttatctttgactttaggcagtctcactataatgtgccatggggaagacatttttgcattgtgtttgcctagggattattgaagctcctatatctgaatgtgaatgtctaaaattcttgctagacttgggaagttttcttctattatttaattacataggttttatagtccttcctttgtctctttgcccctgggatgccaataatttgaatatttgatcacattatgttgtcccaaatatcacaaagcctttgcggattcttttaggttctttttctttatttttgtctgactggattatttcaaaagacgtgtcatcaagttctgagattctttcttctgcctgatctagtctattattggagctttcaaatatattttatattttcttcaattaattcttcagctccagaatttctatttggttctttcttaaaaatatctatctatctctttggtagatttctcattcatatcctgaattcttcttctgaattgtttgtattttctagaattctcttgtatctaactgagcttctttaaaattgaaattttgaattatttttctgggatttcagcaacttctttttgattaagatctattactggagaattcttgttttcctttggaagtttcatatttccttgtattttgatgttttctgtgtctttatattgatatctgtgtatctggtgtaacagttgcatmttcctattttttaattcacttccatagggtaggacttttttctgaagatgtatctgtggtgttggttgggtagggcactttggctttgattctgagtacatgtagtagtgtagtctctgtatgatttctttggctataaatagcattaatgctttcagtgatttccttagaggattaggctgcaattattagtgaaggctgtggtgaagttgtgctggggacaggccccaagggtggcaagagtaggctgactctacctatctttgtgccccagagtggtgtatgctggcacctgtgttggcagttactggtgggccggttcctgggccttaggtggtttgcatggatgctggtagtggcagcagtgggctaggtgactgaacaggttctcacgtcgctgggaaacaattgtgctatgggtcatggcagtagaggtggtgaatgaccctctgggtcctgcatgctgtgggctggtgttggtggtggctgtgctacaggtcaccacccacagttccagacatgctgttctcaggttcttctgctctctgcagcagcagtgctacagtgccatgtgaaaggaggaagaaccttgctttcactccagatcccaggcatgcaggccatgttacactgtgaggttgtagtcactacttagagcctcagtcaagcaggtctctggatcacctgccccaggcttcagcagcagtagcagaagtgggtgtgtggaggaggaggagrtgtcctgttctctatgtgtgagcctgagaacagagactcttccgccggtgggagaggaaatcaaactaatgagtataaattactccagtttgccattaaagggaaggataaatatggtgagatggtggtagttggaaggagttctggagtctattgaagcgtttgctgtgttaatgtgttttgttttaatagagagaaaatgaacttaaatatattggtrtagctattttattgaatcagttagctttaattagttccacttaagtaggaagcaaacattattttcttactactgcccttcaatctcatgtggcatatgtatctctctaaaagcttttctagtcagttttgtcaattagctctatctcattttcagatattgaattacttgtttcatctaaattagtacttccatatagtgtacaatcagactgtgtcccttctccaagctcaacctaggcctgctaattcttacacaagccaagggaaggaggggcctgatcagttcttcaaccctatttttttactctctttttctattcttttcatttttcctttttcttttttttttgacagggtctcactccgtcacccaagttgaagtgcagtggtacaatcatggctcactgcagcctcaatctcctgggctcatggtaccctcccacctcagccttctgagtatctgggagtacaggagcatgatgccacacttggctaattattttttttttgtagggataggagtattgctatgttgcccaggctggtcttgaactcctggcctcaagcgatcctgctatctcagcatcccaaagtgctgggattacaggcatgagctactgtgcctggccctactctctttctcaactcatattatagtttttggttcctctataagtggrgcaaggtgtggggaagagttaagttgttaaaaagttaaaaattaaagtgagaatcagcatcagtcttgtaccccatggaaatgtcaggagatacaagtcaagtagttaaaatgattctcttatattactctgatcaggaaacagcactagtaaaccaatacattttgctgytctacaagtatcagtcagggaggtggataggggaagagtgagatgttactttctccttgtggcatatattcctcttctctataaaaagtctccctcacttggtttgagataggggacatcatccctcctacaccctccatggggagggaaaaatcagggaaatgcatagaactccaatagctctgttcagaagaaatactgtctccaaactcagatcagtctctagcaatcccatatagacaacagatgggtaaagggtgaagtgttgaaggactaattttggccaccccttggcaaattttgccttaatgaatctattatctcctcatttgaatgtacagatcctcatcatttattgcactcagctgagagaacagaaaaatgtcatttcacattctgttgcataggaaagaaaaggcatatatgattcctgcctaagaatgcaagctcagtggattttctggacrtaagatagaaaagaatacttattgttataacctaaatgagcttatggcacctgtaaccactatcagattgttatcatcttcaaaagacacattggtctgacatctggcatttaaaagaaatgtaaatctttggtcaaggaaatttcaaatgagggagagctaatgatgtatgataaatagcaaaacttcatcaattgtatccatccctattgccagagttttagtgataacctctcaaaaatctagtctattattggagcttatatctccccttctctctaccaattctgttcttccaagaatagctctctacccttttaaaatctaatacaatttagccttgtcacttctccggttgctcactcaaactttataccagtcatgtcaacacacatcctggtagctgagcaagtgtatacagaaacatttttagaaggtgagaaaggggtgagtgggtaaagaaaagtgaatgctaagatattttgtctgtgacatattgataaatataatttaatttttctttttttcttttggtttagctaaaactggtaaaattgagtcactacatgtagcattcactgaagatgaaaccacttccattaaaatggatagaactcgttttcctgatgttttaagaaatcaatcactaacacctatcaatatccaaaatatctttcttgatcactgtgtacaagaaagagtgactgcaatttcatcaccccagaaatctactaagcatgtccgtgagcagattccagatactgctactggttccatattttttccacattgtaattcagcttctactcgaatttttgggaaacaaacaaacaaaatggaaagttcaagaaagtttaaaactrtgaaagatgtttatactgaaaaaaggctagaaaacattttaattctttcttccaagttttccaaacctaaaagtactcctggctcagttatcgctcaaaaacttgagaaaatgcaccctaagcatcaacctttaccagagagtccaggctatacttatcagcacatctcgagagacttaagtgcaacagtgccaagccctccacctrtgactgtatctatgaaaccagaaggacagtggcctgaacattttaaatcaactgctacattgacactaagagttactgaatttccaggttttgtttccttgccaacaccagttttaccaagaaaacctcacaggcagtctgtgataggtaaatacaatctgaacacggtataattatagagtcaagtagagcaaaggggagagaaggcatgcaagctaatggtacccctcccgctttgggtttgcagartgggaggatggaatcaccttttatatatacatgtaatacttgagccatagggcaataacagaagtcctgaccttgcagatctgccaaggccagactgggtactccattcagatggtgataatgggaaccaacaagggaattcaaaggatcggaaaagctaatataaagaagcagtgagaatacacagtcattcaaaggtgatctagaagaactccagaagtagaatgccartgctgatagaygccttcatgaatatattttcatggataattggaatcyattaaatgatgaacaattatattgaagtcataaaaccctcaagtgaatttttacaaatatccaaagtcatcccatttgtttttcatttttctagaaactcttgtaacagaaaatggaaatatagaaagtgtcccaaagcaaatcccaccaagaccacctgaaggtaaatgctagatttatacaattcttttagaaaatgtatgtaagattatatctttaaaaaattatgggtgattttttgtgtttatgtgtgtgattcacacatgcataacacacatatgtcttacctcattttcagctccctaagtcatttatggagcagctatttttaatatattgactatgaaccaaatatattgataytgagaatataaaagctgatgcactcgtaatctgggtggggtggacaggcatacagaaatatgaattaactatttgccatgtgccaggcaaatcaaacaaatgaaaatgaaaaatatatttgaagaaagattataccatcctagatgttacattatgtctacaaacaatctctcaaatatagtgtgtggcaaataattcacaattaccaggcacacaaagagaaagacaaaatgaatgaaaactagcagaaacaataagcagtagaaacatatccacaggattatttggtattagaattattgggcacattttttaataacctggtgacttctgggttttttccattrctaagtagtttgtaatggactaaccttaccaaaatcaactattaaagctgccaaaaatatataaagtagctattgaaggaactggacagtaaccaatgtgggcgtgacttgagtagaactggacagtaaccaatgtggacattacaattcctgaaagaagggaagctctgcctttaccttggctcatgcctgagggtgtttgtggtgtgggagaatggattacaagtagaatgtggtggttttagtggattgaggagctagtagtcagacttcagagmagccaatatacttgggacttgagggagaaaatcttggcgaggagagaattgaaggaaggtgaatcaaaaaatctgcatacaagctgggcacagtggagtgcagctgtagtctcagttcttgagaggctgaggtggagtatcactttagcccaggagttcgaggcccgcctggaacatagtgagactcagtctgtgttaggccattcttgcattgctataaagaaatacctgagactggataatttatagggaagaaagacttaattggctcacagttctgcagaccttacaagaagtatggtgctggtatttgctgctgrtgagggcctcagggagcttttactcatggtatacagcaaagtgggagcttgaacatcacatgatgagagcgggagcaagagagagagtggtgtgcggtacaggtgccacaaactttaaaacagycagatcttataagaactcactaycatgagggcagcacaaagccatgagggatctactcccatgaaccagacacctcccaccaggccccatgtccaacactgggagttacatttcaatatgagatttagaggggacaacatccaaactatatcactccacctctggcccctcaaatatcatgttcttctcgcattgcaaaatacaatcatcccctgccaatagttccccaaaagtctcaactgatttcagcatcattcaaaagtgcaaagtctcacgtgagacaaggmatgtccctttgtattagtttgggttctctagagggacagaactaataggatatatgtatatatgaaagggagtttattaaggagaattgactcaccatcacaaggtaaagtcccatgatagaccgtctgctagttgaggagtaaggaagccagtagtgactcagtttgaatcccaaaacctcaaaagtagggaagccgactgtgtagctttcagtctatggctaaaggcccgagagcccctggcaaaccactgatgtaggtccaagagccyaaaagccgaagaacttggagtctgatattctatgggaggggctgccacaatggtctctgaaatgtctttgaggccttgttcctcttggctatttgtatttggatcctttttagttatgcacatctctctagcaagtggttactctatagcctgctggaatccctctcccaaagctttttctttccatgctgtatggccaggctgcaaattttccaaacttttacaatctgcttccctttcgaatataaatttcaactttgtcattgctttgctcccacatctgagcataggctgttacaagcagccaggccaaatcttgaatgctttgctgcttagaaatttcttctatcagataccccaagtcatcactctgaagttcagacttccacagatcattaggacatgaatagaatttagccaagctctttgctaaggtgtaacatgggtgacttttgctccagtttcaaataagttcttcatttcaatctgagaccttggcagcctggacttcactgtcaatataaatatcaacattttggtcatgctgtttacctagtctctgggaagttccaaactttccctcatcatcctgtcttcttctgagccctagaaacttccaacctctgcctgttacctggttccaaagtggcttccacattttcatgtatctttatagcaatgcccttctcctcagtaccaattttatgtgttagtttgttctttcattactacaaagaaaaacccaagactgagtaatgtgtagagaaaagaggtttaattggtttacagttctgaaggctatacaagygtagttatggcattcccttggcttttggggaggcctcagtgagcttttactcatggcagaaggcaaaacaagagcaggtatatcacaccactgcaaaagcagaagcaagagagagtgaaggagaggtgccacacactttttcttttttctttttttttttagacagagtcttactctattgcccaggctggagtgcagtaggacaatctcagctcactgcaacctccgcctgccaggttcaagtgattctcctgcctcagcctcctgagtaactgggactgcaggcatgcaccaccatgcccagctaatttttgtatttttcatagatacagggtttcaccatgttgaccagactggtctcaaactcccaacctctagtgatcctcctcggcctcccaaagtgctgggattacagatgtgagccaccgcacctggcctgccacacacttttttttttttttttttgagacagagtctcgctctgtcacccaggctggagagctgtggcaagatctcggctcactgcaagctccacctcccaggttcgcgccattctcctgcctcagcctcacgagtagctaggactacaggcgcccgccaccatgcccagctaattttttgtatttttagtagagacggggtttcaccgtgttagctaggatggtcttgatctcctgacctcgtgatccgccggcctcggcctcccaaagtgctgggattacaggcgtgagccactgcgccyggcctgccacacacttttaaacaacatcggaattccactcactaccacaaggacagcaccaagccataggagatctgcccccatgacccaaacacctccctctgggacccacatccaacattggggtttacatttcaacatgagatttaaagaggacaacatccaaactatatcacagtctctttaaaaaaatcttcatacaaactccaaggttgctagctaattgtaagctgtgaatgtatagaacaagactccaagaaacacagtagaaaacatcagctgagaagacaagaaatttatcatagagttttgtgtttgcacaaaagatggataatagagttcaagctctgccaaagtgttggggcctttgtaaacacattggaatttccgttgaaattccattccttaggaataaagatgatgttctaggaaagaggacaaaactaaaatagccaagccctaacaaagctcaaaccaatccttgataatggtgttttctgcctaatcaaggaaaacctaacacgttgagagaaagakagagagagaaagagagagggcgtattatccagacttcttaaaatagttcatcctcgaagtccaacattaaatttaaaaaattacaacacattctaaaaaaaaaataaaatatctgaaaaatggtagaaagaaacaggcaataaaacagccctatatttgattcagatattagagtttcaaatggatttaaaagtaactatgattactatgtccaagaaaacaaagaggtcattggagaatttcaccacagaactggtatttttgttttttaaaatgagtcaaataaaattctagaacaataaaaataatatacccaattaataattcaaatagctgcatttagtaagaggttatacacagcagaacactctaaccataacctaccattcctcccagaacttttgtacccttgtctatgatgtaaattaacttccgggtgtcttccatgtcatgctgccatttttgctttattgagtttcttctctggtagtttcctccttagaaaatttaagaatcctcagattcttgagagatcacatcctcttcatctccatcttcctcatttctactcaacaaccaactctgtgggcttagagcagggagcaggccacagacttatgtcttaattcactctctttcccttcttgctccattctttctaccaagccaaggcatctctatattacattatatatctttctttattctgtggtcagctttcacatctcttgatctgaaatgggcacagaggttctattttagaaattaaaaacctttttttgttttctttgttctaggatgcttattttctctcatcaaaccagtagcataagaattactgacattataaaatatgtttctgcaaacaatgcagcaataatggctgcaaaagtaaaatatataaaattttaaaatactttcctgccacatttggtgtatacttgcataggacatttttgatggaaggtgaaacccatagggtcataataaagtaaatttaaatttagatggtctttctttggcttactcctragatgtttgtttgtttcctatgggggatctacaaactaaaggaagagtttaattacacagggcatttgaattatacatcaaagtgatgctaaggaaaaagtgaggctgatgtcttcatgaggtattcttacatgatgttgcttattaattttatgagccaagaagttctttatgtaattcrtagtaaattttaagagaacatttttacacatagtatacaaagactgatattgatggaatctaaattatctagacagaaatctatgagcatatggtttactttggggaagataatggtgcatttaaaattacaaaacaaaacaacacccactttggcaaacagaactaactgagtttgggtagatgaaggctatggggaatccctgccagaggatgtgtacacttaagtccttagggtaactcaatattatcataagataaatacctcttaactttcattctaagtgataacacatttaaattttatgttttgttttgttttgtttatttaggtctcaccaaaactgaaaaaatagaatcagagatacacgttgtacgtggtgaaggttttaagactgttgcagcaacacgatatgaaacaataacagccatgaccaacctggccatagtaaactgtcaagtatatgggagaaatgcacttaatctgaaggtatgctagatctttttaatgacagtgccctcctgtattatcaattatttttgctttaaatttcccaatatagattagtttccatggtattgaggggaattttcctattacaatagagatttcttaggaacacattcaaattrcatctctaaacctatattcctagtttgccttcagtttaaaaagattctgaggttcaagtcaatcacagtgctttttttattacttagcataagagaatttgaattcagatttattgtatttttaagttattagcaatctttggttctgtgacaaatctagtactaggatggcttttcactgaacacaagctcaatatcatgaatagcaataatattagttatcatttgttaagtatccactatgtgccaagtacacattactcctaaaacacaattatgtaacgtaagtattataatctttaccctacagataagaacactgagccttaatgaaagtaacttgtataagatcacacagtaagcaagttgtagagcttgggtttgaacccagaactttctggcctcaaaatcaatgcttttttattttaagttttattttgaaataagttctaactcatagaaaagttgtaaaaataggaaaagctacagagagtttatttgaaaaattaggcattaaaataatattcacatatactgggaaatttggaaagccaaatgcatggctggggctagaaacattcttagaaaagacctgagaagaccctaagctttcacatttcgctgacctctaaatgcagtacaagcaggaagtaaaggctaaggtggttgtaaatggcctggctaagcattgaaggagtgccttagcacagagtcgatctgwaaagatgaagttctctctgtcctcctccctctgtcttctgttgtgtaaggaaatcatgtcaaaacaataactgaacacaagttaaaggagcagagattttaaagaaaatatatgtcaaagaatacagacttcacaaaaaaagtttagaaaattattaaacaacccaatagctatagctcatatcaagcctacagaaattctggagctgaaaaatacaataactgaaatgaaaacttcactggaagatttcaatagtagatgtgatcaggcagaataaaaatagaaatagaaaccaaaacaacaaaacaaaccccaaagagaggggaaaatgtgatttccagagttaacacataataattattaagatgtccagttccactttttaacaaaaattatggaatatgcaaaaaaaaatgcttgttcacagaakaaactaacagaagctctattttttcacgtcagatgggtaatgtgccaatgtcataaaaaggcttgagggaggcatattttattcatgagcataaaaagccaatcatcatgcttatgaactactaaaggattagaaactacttatgaggaagcacagacattggacttactggaaaaaggaccttaaataaactgtcttaaatatgttcaaactgctaaatgaaactatggacagagagctaaaaagaataatgtgtgaacaaagatttcaataaggagaataatgtgtgaacagagatttcaataaagagatggaaatgacaaaagaaaaaacacaaaacaaaacaattctggagctgaaaactacattaccaaactgaaaacttctctagaaagtttcaatactagaaatattgattaggcagaataaagaattatagaactagaaaatcggtcaattgaaatgatcaagtatgaagaacagaaagaaaaaaaataaagaaaaatgaacacaacctaagggacctctggaacatcatcaagtataccaacatacatttaatggggtctctggagaaaagaagagagagagagaggaaagggcagaaaaagtatttgaaaaaataatggccaaaatattccaatttgattaaaagcacaaatctatacatccaggaagctcaatcaactccaagaaggataattgccaagaratccacaatgagacatataatctaattgtcaaaagccaaagtcaaagaaagaatcttgacagcagcaatcaagaagtgttttgtcatgtacaagggctctacaatgaaawtcacagccagtttgttgccagaaactatggaggcaagaaaggaatgggatgacatctttatagtgctgaaagaaaagcaatctgtcaaccaaaagtctatacccagaaaatctatccttcaaaaacaaaggagtaattaagacattccccaataagcaaaagctgagggcatttgttgccagtacacctgccctataagaaatgctagagagttgttcaggctacagtgagagaacattagacagcaactcaaagtcttaagaagaaataaagaactctgatgaaggtaactacaaaggtaaatataaaagtcagtattattttggttatcggtttatattactttttctttcttatatcacttaaaagacaaatgtgtaaacataattataaatgtatattaatggacacacaatgtataaagatttaatttgtgacaaaacagaagggagatgaagccatataggaacagagattttgtgtgccattggagttaatttggtatcaatccaaactacattgttgtaaatttaggatgccaagtgcaatcccatagtaactactactgaaaaacaatattaaaacatacacaaaaggatgtgaggagggaattaatgtggcacactacagaaaattaattaaatacaaagaaggctgtaacgaagggaatgaacaaaaccaacaatgacaaaacattctggaaagggcaaaaatgtaaaggcagtaaaagtatctgtggttttcagggttgtggcagaagggaagaaaggatgaataagagaagcacaggtgatttttagggcagtgattctgtrtgatactgtaatggtgaatctatttccttatgcattttgaaaacccatagaatatataacacaaggtgtgaactataatgtaaactatggacttgggttgataatgatgtgccaatgttggttcattgattgtaacaaatataccaacatggtgtacaagttgttaatgttgggggaaggctataggtacatgtggtgaaggggtatgtggagaagaaaaatctcaaattaagaacttaactttacaccttaaagaacttgaagaaagagagcaaactaaatccaaagctaacagaaggaagaaaacaataatgataagagcagagataaatgaaatagagaatagaaaaacagtagagaaaattaatggaaacaaagataggttatttgtaaagatcaayaaaataaacaaatcattagmtagactaagtaaaagagagagaatgtacaaataactaacattagtcatgaaaattgaaatattacaactggccttacaaaaatgaaggggattgtaagagaatactataaataattgtacaccaatgaattatataacctagataaaatggaaacatttccagaaaaacacaaattaccaaaacagactcaagaacaaaaaaaatccgagcagatgtttaataagtaatgagattaaatcagtaacaaaaaacttccaaacaaagaaaaatccaggaccagatggacctaatttcaggcaaccctaatttcagacaaaacaggctttaaaccaacaaagatcaaaaaagacaaagaaaggcattacataatgttaagggctcaattcaacaagaagacataactatcctaaatatatatgcacccaatagaggagcagccagattcataaagcaaattattagattcctacaaaaagactgagactccctcacaatgaatagtgggagacatcaacactccactgacagcrttagacagatcatcaaggcakaaaattaacaaagatattcaacattggacaaaaatggatctggacctttacagaactctacccctaaaacaacagcattcttcccatttccacatgacacatactctaaaatcaaccatgtaatcraacacaaaacaagtctcagcaaatgcaaagtaattgtattagtacattgtcatactgctatgaagaaatacctgagactgggtaatttatwaaaaaaaaagaggtttaatggactgacagttccacatggctggggaggtctcacaatcatggcagaaggcaaaggagaagcaaagacatgtcttacatgacgataagcaagcatgtgcaggggaactgccctttataaaaccatcagccctcatgtgacttattcactttcagcatgagaaaaactcacccctatgattcatttacctcccaccagatccctcccacgacacatggggattatgggagctacaattcaagatgatatttgggtggggacacagccaaaccatatcaataaccaaaattataccaaacacaatcttggaccacagtacaatgaaaatagaagtcaagacttttaaaatcactcataccatacaattacatgaaaattaaatgacatgctcctgaatgactcttgggtaaatctgaaattaaggcagaaaagaagtactttgaaattaatgagaataaaaatgcaacatattagaatctgtggtacacagctaaggcaatgttaagcaggaaattcatagcactgaatgtccacatcaaaaaattagaaagatgttacattagtaacctaacatcaaaaccaaaagaattagagaagcaagagtaaaccaaccccaaagctagcagaagacaagaaataaccaaaatcagagctgaactaaagaaaattgagacacaaaaaagaattcaaaagatcagcagatccaggagttgattttttgaaacaaataattagtaatataggccactagttagactaataaagaagaagaaagagaaaatccaaataaacacaattagaaatgacaaaggggaagttactcctgaccccacaataataaaaataaccatcagaaactgctacagacacctctatgcacacaaagtagaaaacctagaagagatggataaattcccagacacatacatcctcccaagactgaaccaggaagaaattgattacctgaacagaccaataatgagctccaaaactaaatcagtaataaatagcccaccaaccaaaaaaagcccagtgctacacagattcacagctgaattctgccagatgtacaaagaagagcttgtactatttctgctgaaactattccaaaaaaattgaggaggargggctcctccctaactgattcagtgatggcagcatcatcctgataccaaaacctggcagagacacaacagcagcaacaacaacaacaacaaaactttagrccaatattcttgatgaacactgatgcaaaaatcttcaacaaaatactggcaaactgaatccagcagcacatcaaaaagtttatctaccatgatcaagtagactttatccctgggatgcaagattggttcaacatatgcaaatcaataaatgtgattcatcacacaaatagaactaaaaacaaaaactatatgattatctcaattgatgcagaaaaggcttttaataaaattcaacatcactacatgttaaacactctccataaactaggtattgaaggaacatacctcaaaataataagagccacctatgacagaccmacagccaacaacatactgaatgggcaaaaattggaagcattccccttaaaaactggaacaagtcaaggataccctctatctctctctctttttctttttttttttttttttttgacggagtctcgctctgttgcccaggctggagtgcagtggcacgaycttggctcactgcaagctctgyctcccaggttcacgtcattctcctgcctcagcctcctgagtagctgggactacaggcgcctgccaccacgcttggctaatttttttgtatttttagtagagacagggtttcactgtgttagccaggatggtctctatctcctaacctcatgatccgcccacctcggcctcccaaagtgctgggattacaggtgtgagccaccgcgcccggccaaggatgccctctctcaacactcctattcaacaaagtattggaaatcctggccagggtaatcaggcatgagaaagaaagaaagaacatccaaataggaagagaggaagctaaacyatccctatttgcaaatggcatgatcccatgtctagaaaacctcgtagtctcagcccaaaagctccttaagctgataaacaacttcagcaaagtctcaggctacaaaatcaatgtgccaaaatcacagacattcttatacaccaacaacagtcaagctaagagccaaatcaggaacacagtcccattcacaattgccacataaagaataagatctttaggaatacagctaaccaaggatgtgaacgatctctacaaggagaactatgaaacacaaagttcaaaggaatcagagatgacacaagcaaatggaaaaatgttccatgctaatggataggaagaatcagtattattaaaatggccatactgacgaaagcgatttatagattgaatgctattcctgttaaactaccagtgacattcttcacagaactagaaaaaactattataaaattcatatggaaccaaaaaagagcctgactagccaaggcaagcctaagcaaaaagagaaaagctagaggcatcatgctacctgccttcgtactatactacagggctatagcatggtgctggtacataaacaaacacatagaccaatggaactgaatagagaacccagaaataaggctgcatacctacaactatctgatctttgacaaagctgacaaaaacaagcaatggggaaaggattccctattcaataaatagtgctgggataactggctagccatatgcagaagattgaaactggaccccttccatacaccatatacaaaaattaattcaagatatattaaagactttaatgtaaaatgcaaaactataaaaaccctggaagacaacctaggcaatactatttgaggcataggaatgagcaaagatttaatgataaagacaccaaagcaattgcaacaaaagcaaaaattgacagatggggtataattaaactaaagagcatctgcattacaaagaaaactatcaacagagtgaacagacaacctacagaatgggagaaaatttttgcaaactatgcatctgacaaaggcctaatatccggcatttataaggaacttaaacaaatttacaaaagaaaaacaaacaaccccattaaaaagtgggcaaagrccatgaaaagacactccaaaagaagacatacatgtgatcaacaagcatgaaaaaagctcaatgtcactgatcattagagaaatgcaaatcaaaatcacaataagataccatctcacatcaggcaggatagcaattactaaaaagaaaaaaaaataacagatgctgttgaggttgtggagaaaaaggaacatttatacactcttggtgggagtgtaaattagttcaaccattgtggaagacagtgcaacaattcctctaaaacctaaaaacagaaatatcatttgacccagcatcccattactgggtatatacccaaaccaatataaattattctattatagggacacatgcgtatgcttattgcagcactatttgtgataacaaagtcatggaatcaacctaaatgcacatcgatgatagactggataaagraaatgtggtacatatacaccatagaatactatgcygccattaaaaagaacatgagcatgtcttttgtgggaacatggatggagctggaggccattatacttagcaaactaactcagggacagaaaaccaaatattgtatgttctcatttataagtgggagctaaatgatgagaacacacggacacatagaggggaacaatacacaccggatcctattggaaggtggagggtgggaagagggagaggattaggaaaaataactagtgggtactaggcttaatacttgggtgatgaaataatctgtacaagaaacccccatggcataagttttcctatataataaacctgcatgtgtatccctgaacttaaaagctaaatttagaaaaaaaagacctagaaaacatatttaaggaaataatggctgaaattttcccaaatctggagataaccagcagcactcaagtacaggaaattcaaaggtcaccaattagattaaatgcaggaggaatttcccaaggtacatcataatcaaattagcaaaaatcaaagagaaagamtatttgaagcacaaagaataaagaaacatgtgacgttcaacagagccccagtacagctttcagcagattattcagcagaaaccctgcaggctaggagagagtgttgaagaaaaaaaaaaamaaaaaacctctcaactgagactactatacccattaaagtgtctcttcaaacacaaaggagagataaagactttcyccaaataacaaaagatgaaggaattcataaacaccaaacctgtccaaaaaaatgctacagggagtccttccatctggaagaaatggaccctaaggtgtaacaagaaaacatttcaaaatataaaactcactgcttcaagtaagaaaattgaaaactagacaaattcrgaatatattaatactgtaattgtggtaagtaaaccacttacatcttaaatatgaagactaaaagacaaaactattaaaaacaacaattgcaacagctggttaagagataggcactatggaaggatgtaagttgaaacatcaagaagtcaaaatatgtagaaggtgctattaaagtgtggagtttgtttttgatgcttttccttgtgagcaaagtyaagttgtcatcagtttaaaattgcctattataacatgttttttgtaagcctcatggtaacctcaaagcataaacctgtaatagcacagaatcaaaacacattactagagaaaattacttaaacacaaaggtagtaagrgargtaaaaaggaagaaagtattcacacaataagcagaaaatgaataacaaaatgacaataggaaacccttacctatcaataaaaaccttgaatataagtaaataaataaataatgtaagccccagctatatgctgtctataagaaactcactttctctataaagacacaggctgaaaatgaagggatggacaaagatattccacgtaaattgaaaccaaaaaagagcaggagcaactatacttatatcagataaagtaaactttaagtcaagaatggtaagacaaggagggccatcgtataaaaaccaagaggacgggctggtctcaaactcctgacctcaggtgatccgcctacctcggcctcccaaagtgctgggataacaggcatgagccactgcacccrgcccttggttatamgctttaaagaatttgtttgctattttgcacatttctgccttaagactgtgtttctagcaactatttaaacttataaactcttcattgataaagaataaatcttatatcactaaaagatgaatatgcaataagatgttttcagacaaagaaaagctgaattcatttttctcaagcttatctctactacaagaaatgttggaaaaaaacctgaggagtacaaaaaaaaattataccaaatagaaacctagttaattaagaaacaatgaatagcaccataagtggtaaataatcagtgaatataaaggaccttttgaaacaatcttgaaatctctttaaaagaatactgattatttaaataaatacattaatcatatattgtgggtgttatagctaatataaaagtaaaatatttgacaacaggagtacaaaaggttggaaggggctaaatgtatatatctattgtaaggttctttttttttcttacccttttctatggtgctgatattgtaaggttctttaatcatgaagtagtagaatattttttgaagggtggttgtgttaaggcacatattgtgatccttaaagaagtcacttttttaacaacactaaggagaataacaagaaagtcatttttaaaaaatggtgtttgaacaaatcgtctgttcacagtaaagaaggcaagaaaagaatagaggaataaggctgagtgctgtggctcatgcctgtaatctaagtgctttggcaggtcaaggcaggaggattccttgatgccaggtgtttgaggacagcctaggcaacatggcaagaccctgtctctacaaattttctgtttagaaattagccaggaatggtgacatgtacatgtagttctagctactcaggaggctgaggaagatcataagagcccaggaatttgaggttttagtgagctatgattgtgccactggattccaggcagggtgacagagcgagaccttgtctctaaaaaaagggggaatagagaatagaagaacagaaacagatcagacaaacagaaaacaagtaccaaaatggtaaactttagcctaaacacattagtaattttgttaaaggtaaatgggttaaacaccacaataaaaaaaatagagattgtcaaactggctaatgaagaaccactcaattatttgctatttactaggaagcgtacttaaataaagatactgatggttraaaagtaaaactggaaaaagataacagtaggcattataaagctcttatggctgtattagctgactaggtagaaaataatactaaagawaaagaatattaccaagtatagagaaaagtttgaaaatgtttaaagggtcaattcatcaagaacacagaacaatctaaatgtgtatagwtataattagaatgcctcaaaattcataaaccaaaatttgacagaactaaagtgagaagtagaacaattcaccatcataactagagattagacttaatatatcttgatcaagaattgatatgtgyagtcaaaaacaattcaataaagatatagaagatctgaaataactccagcgactaacttgacctaattaacatttatagaatgatacatccaacaactgcagaataaacattactttttaggtacacatagaacaatttcaagatagaacatttgttgggccataaaacctgtctcargaaattttaaaagattgaaatattgtagttctcgtaccacaacagaaataaaatagtcacartaagatatctagaaaagtaccaaatatttgtgctaaatattaatttaaatattaaaaagcactaagtgtttggaaatcaaacaacacactaattaaaaaataggtcaagaaagaaaacaccgaggaaatcagaaatattttgaactgaataacaatgaagacagtacagaaattggcatatttaacaagaagtttcagatagatgctagagtaacagatagaaatcagagaaatagaggtggagatataaaaagggggtaaagaaaataattaaatataaaatagattcaattatatttcagcacatagcaatgtttgcttgttattgattgaaataattctgtcacacgtgtaatactacacttatcacatacagaaatacttagtctgatatggtttggatctgtgtcctcaccaagtctcatgtcaaatggtaatctccagtgttgaaggtggggcctagtgggaggtgattggatcatggggatggatttccaccttgatgctgttctcctgatagcaagcgagttctcatgagatctgttagtttcaaagtgtgtggcacctcccccgtcttcctgctgctctggccatgtaagaccgcttcccccttcacctgctatgatcgtaagtttcctgaggcctccccagaagctgagcagatgctgccatgctttctttacagcctggagaaccgtgagccaattaaagctcttttctttataaattacccagtgtcagatatttctttatagtagtgtgagaacagcctaatacacagtgcttctactttgcttctatcttttacataccaaagaaattattatcatgacagactaaaaaaaaatgaatggacgaggagtataggcttgttagtatattgtgtaaaacattctcattcaaattatgtgctgattttgttttactcttgtataaactattttgtgccttgttagtgattaacaccttatctcttgtcactttcttttagggcttttttatcctaaattgtccagacttaacacctttggctttccagttgatatatcttaatttatcatttaatgatcttcattactttcccacagaagtgagtcaacttttattgttatgtactgatataacttgtcgtgaataataattataataaaaatagacgtcttttaataccttgargttactataaagtactgtaaatgtattttggattgcatcttttgaatggcttattttcagaagcacaaaatgtacagtacatctttcttaggaaatcccatgatgtaatcctcaaagactatgttatagtgagactctcaaatgtgttctcataattctataatgtatattaaatatttattcttctaactctgaatgtaatctaaaataaaccttatttatgtgccaatcagaagctttaaaaacaaagtaaacatgcagtgttgtaayaagttttaattaccaaacgataaaatataatattctgcttaataaaatgtatgaaggataatcagatatgagatgagctaatttaatgtcatttcaagtgaatgaaccattatgagtgattaggacaaattacgtttttcgtgtctttagtcattgcttcattgattactgggtaattggtggttttgtgaattgatttccagagtattgtcttttagtgagtttatttttggcaaatgtattttcttctttcaatcagatggtattgaaaacatatattttccatactttctctataatataatgtttttattttcaattggagaagttatttcttttctaatacataacaccagttttattaatttgactaggagaaattgacaagaattcccaaggaatatagtgatctgagttcttcacactaatttaacctttcttctaagtagatacagataatatttgtgtatctgccaaagaaaactccatccactaaaaaataaatgtgtgaagacaggagagctagtcacttgtaagatataaagtgctcattgttaaagtgacagagatcaacttgtcattaaaatgcaggtctgtgttatatagctatagataaaatattccaatgaagatggtaatatctaagcttagagaggctgttttggggacaggctaatgaggcccagttgttagcatggcataaaggcaatgaataaaaggctggggactgaggtaagtggggtgattcaaattattaccgatttcatggaaaattcaaaatggttgaattaggcaaattgcagtgtccactaaaatagtttcagatgggagaaggtagaagcagaaatgttaaataaagaagattaatatagcaaactctatatacatatacttggtcttcttctctaagattcttaaacagtcataaaatcatagtaataagtataataatgtattgttaggtctgtaacatatatggatatgatatatgtagaaattatagacaaaaaaggaagaaggaattgaatatgtatgaagaacattttcatatctcactggaattaagttagtataaatctgaagtaaattctgataaggtgtatattataacctctaaacaatcactaagaaaataactcaagagaacatactgaaaacatttattgaagtcataaaatgttacactagaacatattcacttgatgcaaaaaaaggcagtagaggaagaattaaaagaacatatgacatatagaaagctaaaagtgaaatgacagatgtaaatccaatcatgtcaataataacattaaatgtgaatatatcaaacaatccaatcaaaagatacagatagtcaaactgtacaaaattatacaagttcttatacagattcaatgatacgctgtctgcaggaaacacacttaagattaaaagaaacacacttaagattgaagaggttgaagccaaaagcatgagaaaatatatatcatgcaaacagcaacaatagaaatgctggagagactatactaatatcagacaaaatatattttaaagcaaaaaaagttactagagataaaaagagacatttgtcaatttatcagataatagaactttataaacaaatgtttatttagtaacagagccccaaagtatatgaaacaaaaaccaaaggaattggaggaatagaaaatgcaactataataattggacacttcaatatcccactttcgataatgaatagaaaaattaggcagaagaacaagagggaaatagaagaattgaacaacactataaaccaattagacctaataaatctgtatggaatgtattagggtctaactcaaaccaatagcagcagaatacacaattcttgagttcatgtagaacattttccaggataaatcatatgttaggctacaaaatcagtctcaataaaaggattgaaaaattacaaaagtctatttttggctacaatagaattaaattataaaccaaaaactgaaagaaatttggaaattcacaaatatatggaaattaagcaacatactcctaaataaccagtgggtcaaagaataagttataagtgaaattagaaaatatttttagataaatgaaaatgaaaacacaacataccaaaatttctgagatgcattacagagtactcagagggaaacttatagctgtaaatgtaaatcttttaaaaaagaagaaatacctcaaactaacttttcatgtaaagccactagaaaaaaagggcaaactaaacctaaacagagaataagcaaggagatagtaaatattagtacagaaattagtgaaatagaagatagaaaaacagagaaaatttaaaaacagaagttattacttttaaaaaatcaacaaaattgacaaactttacgtagacttaacaagagaaaaagacagaagacttatgttactaaagaccaggatgaaagaagaaacatcactactgaccttaagaaattaaaaagatttaaagaaaatactataaataactgtataccaatcaattaaataacttaggtgaaatgaacacattcctacaaagacacaagaaaggtctttagaaaatatgaatggctccatgatcttaaaaattatatagaaatgcaaaggattacaaagagccaaaataattttgaaaagaaaggcaaacttggagcactgatgcttcctgattacaagaatgaacttgctctactccaccaattttggacctttatgatgataacaaggttgaatttaatattaaagagaactaatataagaccttgttaatattcaccagagaaaaatatactaatcaagtaaagatcatagattatttctttgtttttctttttaaaatttgtataaatttaagaggaagataatagatttaaatggtttactctattttttaaatttcacatgaaaaatcagtgtacctgaaattactgggatgtcagaaataatctggctttgatctctaacacttttctgatcactaaggttaattccacctttcttcctggttctgcagatacctccttcctccctcattattccgtgatttcctcgtatgaaaccgtgagcttgatcagaaagggtaactttcacacttaggaaagcaccattcttgagtcaagggtgtatgagtacagtggttgcactatttcaccatatcatacctattaatgctggtcacttgttttgaaggttgaccgagggtgtttactgagttacatgatatagccaattaatgttgctataatgattctacattagttcagagagtttataaaaggtaacaaataatgatttgcatactttattattccgctcatgtttgtttctcttttctgttccccagatattatgtcttaaaaatttacaaatactgaaattgagaaataatcctatcaaagaaattccttctgaaattcaacaacttgagttccttagaattttcaccattgcttttaatttaattactgttcttccaattgggtaaggttgatggtctgagattataaacacagaaaataattcataatttcgaaaaagatcaatttcccctttcaaagcagctagcagctttttggctatttagtaatttgtattctattctaattagctaatacgcttcttcttatggtgttaaaaacaatcctaccagctacatacagagcaattaatatgggtctagtgactatacatttagaaacacgttatctgagtacgggttaaattaacaggaattatctaaagcagttcaggtgagagccttgcacctatctcttgacagcctttttggatatggaaagagcactgaatttgggatgaggaaatctagtcctttgactttaaarttgatgataattatatatttgatctggagaaagtaatttaaccattcttggcctcaatttcctaatctgtaaactaaggagattggcttatatgatatctaagaccctttcaactccataagaatgctgatatttggacataaaagagatgggtttcttcccacgtatggactagtaattatttaactcctaatgaaaattttaaaccaaaaccttaaccamatgtcaaaacaagatacttattccaatcagagtttaacaaattgaatctctcagtacaaagagaaagggactcataaatagttgaataatactttgcaaaataagagtcttatctatagtaattaaggaagtgcatccaaattcatttataaagatgttcattcagtattgtttgtaattaatgatctaaaaaattgtacattcataaacattcagttatttaaaagaataagaaattatattaaaaaattataccatttctgtataaaatgcatatacatatcacacattacacactacatatataaaaagaaagaataaacactaaagaagtaagaatgttacatatgggtattttatttctgtttgactcatccggatttttccacagtacataaactgtattttccctgccctgacactatctgccatttctctaaggaaatcctgtttccttttattagaaaatagtgtttaaaagccaagatctgggtgttgggtatcctcatcaccattaggttatcattccttctagaccctctcattggagagagcaaagtaatatatgtatgtatactaacccatgtgtacacacatatctgtaattgtttatatagatacaaacacatatacaattacatatatacacacacagaactatatatgtataaatatatatgtatatatacagcatctaaacatgaattcctactggataatctataatcataattatacattttcaataatcataactaccatttaaacaaaataaaaattcctaaagcaagtgaaatgtgattataactaaaaggtcaacattttgttcattgtttagatattggacaaataagtatgaattgttgattataatcaaaaagtttgcagaagctatttttaaaaactattagtgtttctgaaataaagcggcatatttttattaaataacataggatatgtatgcatatcaggggaagaatgacagcatattaaagccaagaatgaaaaacataatggggaaaacttaactttattgacctcaaagaagacttcaagcaagctctgacataataaaaatgtttatttgcaaagtttgttcaatgaaaactcaccaggagggcacttatacagtgaagaatgaaggtgctgaattcttcatatctaagggttgttgtcagaaatctaccttgctgagcaaagaagacctcacggagtgtggtgagacttggagatcagtaactgaattaaattgagtgaaatttagtgaaccaaaccattatgtaatatatttgagatattctggctccatgtaaattctggagtttggacattattaccatcacaagcaattgcactgatacactttgaatgttatactttcattcttgtaattaattcagcagatgttcatgaagcatctattaatactgtgtgctcctaggagctcaccacctaaaaggaaggcagacaattcaatacaattgagtaaagtaaaataatggwgatgtacacagtaaaatgtatgagttacatgtaacccattctgaagggtgagagttggttccctggaagatgtagtatttgatccaaagktgactgagtgtgaattaggtggattaaacaggagagacaacaaaggatagttgggccaatgatagggtggatatttcttcaatgaaaagttacaacgtatatgaaaagaagcagcatatataacatgagatgggaaatacaagcagtttgctggttttgaagcttagagggcaatgccaagtggtaagaaatggtacagtaagcagggaccagattatctaggaagccttatgagctaaggtaaagaatttatgctgtatgcaacaagaaaccattacaggttttccatatgtgagtggtagagtcaaacttatattttacgttattctagtggcagtgtggaggatggatgtgaggggataaacagaattaaaggtgaccagttggaaggccattgcagtagttcaagcaagagatgaagagaacttggaccaaggcaatggtagtgagcatggagaaggaggaacaaattgttatgaaattgaagtaaaacctgcaagatctagaactgagacatagaggctataaggaacagaaaagtcaaagtaaaaaaaaaaagtcaaggtaatgcccagatctctagttagagtgaaacaattcaatcatgtaaaatgtatttattgagtatttactaaatactgggctctgtcctaagcattgggttcagattgttaaaggaaaaggggcatgatcttttcccttatggggcttagaatccagagcacgatacaggaattttaataaacaccataataaatatatgaatatataaatataaaacattctaagggctttgactgaaaagaacaatatgatgtcaggagaaaaaaaaattgartcactaagaaaggtgtatctgaggaaatgacatttaagcagaagtttataaatccagtccaagaataagaaaaagaatattcatgcagtgggaataacatgggaggtaatgagagcttggactcctcaaaggctgacaggaagccagcatggcttagaataaaacccaggtgaggtttaggagttggatagggactacatcccatgaagctgtgagggtcaggtgaaaatatttataatttatttaaagtgcactgagaagccattgcttgtttttaagcacaagagtgacaatgaaggctgaggaggtttgaatgaaggaaaataatkggttttgttttagattaacatgttgattttagatttctgtttttcatcacaattctggacctagacctattaacctcacaggagagttttgtgctggagatatttctggagaaacatctgtgtttcaaatacagacagataaagaaattataaagactgaggaaaagcctcaaattgcataaagagaaccaagagtatcatggaagccagggaagtggattattttgaaaaagaagtatgaccaacagtgtcaaatacaacagagaagctcagtaagagtaaaggtgagaacagttttagtggaatgatggaaataaaagccagcttgcagtgggttgtgatggaatgggaagaaattggtgataatgagtgtagaccattctttgtagagctttagatgcaatgtgagaagagtgattagacaaaagctatagagaaagtgggatcttagaaacatttttattgttagttttttaaagactcgggcatatttacaggatgttggaaagaaaccaatagggaatagattgaagatgtggaaggatgacagatgaagcagaatttcacaggagatgggaggggaagaagtcatcagctcaggtggagattctggtcttgaacaggaggagtaaccattatctcctaaaactggaggtaggtcctaaaaatgaacatgtaaaatatatagttatatgggtaagaaaacaggaaattcatttagtcaacaaagatttatttagctcctataatgcatcagttgagagaggttactatgaaataacttcagataatctttgagagcaagaagaataatgattgaaaagaagttttaaagaaagttgtgatgatttagtgttgatattgagaggaacagaaaagaacagagcacaggaaagtgaatgtttgagagatgatgctgtgggcttagctgagactggaaaccaaggattcatggtgacacgaatctgcatttctgctgattatcttcagtagctcagtcattcatgtgtaagatggagaaggtagattttagcctccataaaaagacttctttgggaatgtccatagcagttttatctgcaatatcctgaaaaagtctgcaattcaaatgtccatcaacaaaacagtggaaaacctaattgtttttattcgcaataatcaaaaggtggtaactcaaatgtccattaacagattaattaatgaataaacaaaatgtgatatatacatacatagaacattattcatcttgaaaacagaatgaaatgctagtatatgctacaacaacaatgagccttgaaaacattatgctaggtggaataagtcagatacagaaggataaacattgtgttattgtgcttatataaggtacctagaatagacaaatttacagacacagaaagtggaatataggttactgggggctcaggtatagcagagaggggagaattgggagtagctgttcaatggatatagagtttctgtttgggatgatgggaaagttctggaaatacatatagtgctggtggttgcataatactgtaattgtaattaatgctgctgaatggcacacttaacaatggctaaaatggcagattttatgttatctatattttactataacaaaaaatacatagagcctgggcaacatggtaaaaccccatctctacaaaaaaatacgaaaaattagctgtgcacagtggtatgtacttgtagtcccagttacataggaggctaaggtgggaggatcacttgagcctgggaagttgaggctgcagtgagctttgggcaacagagtaagaccctgcctcaaatatatatatatatatatatatagttattagtaacctcaatgctttcatctttcctcctagtcttccttctttctaaaatttttaggtataatttatatacaataaaatgcacaaatcttaggtatttgatttaaagtgtttaacaaatatacgcacccatataactactatccaaaacaagatatggggtattcccattatcctagaaagtttaccctagaaatgtccccatgtacatttctagtcaattcccagacttctaacatcatagacttatttcacctgttctggaaaattataaaagttgattgatacaacaaatgattttttgagtgtgacatctttcactcaacatacattttggggattcacccatgttgtatatatcagtattccattcctttttaatgatgacctcatgtcacatggcctcagccatttcagcaaagtcaaaaatagaaatgggattaactaggaacgaaatttgtggacaagtcttttgtcttatggaatgaatacccatgatatacwtgggaaacccactaggttcttgaagattttatactaatagaaatgttgccagagtgtattaagaaggacaaagacagtatgaaatgaaaaaaggctgtcagatctccaaaattccatgggcaggaaacagctgaatatatgtgccaactttcatgaaaaagggagggtgattcagagggtggtgccaggaactggggaggatgaaaccaggagcaccgaaggtggagctgtgattctaaaagacagagccagaagccaggagggcagaaactggaaagcaggtggcagagctgggagctgctgctgattattcccaggccttgaaaccagatgaagtttactcagtcctatttcaaaattgcttggaattggtaattcctgtttacctttcattttctcccttttgaaccagaatatctataacttatcctatgcctgtctcaccattgtattttgagagcagataacttgtttctttaatttcatagatccacaaatggagaaaagttgtgcttctggatgggttatatctggagcctcaccyatacctaatttagatgatgagatatgggacttttgagatttagatgagatgttgaactttgagttgatgctgtaaaggttaacctttcgggaaattgagataagtgaatgtattttgcatgtgggatagatgtgaatctttagggatgaactgtgatagggcgaataatggtccccaaagatgttcatattctaccagaacatgtgaatatgttatmttacatggcaaagggaaattaagtttggagatgaaattaagggttctaatcagctgatcttaaagtagggagattattctggattagttgagtggtcccaatcaaatcacatgagctcttaaaaatggaagggggatgcagaagcatttgtcagagagataccacctgaggacttgacttgcttttgttggttttgaagwtggaggaagggagccatgagtcaaggaatgaggcagcttgaaaacctgggaatggccttcagcatacagccaacaagaaaacaagggcctcagttctacagccggaaagaactgaattctgccaacagcctgcatgagtaagaaaacagattctccctagagcctccagatagcaatgcagtcctgctgatgccttaattttagtagagtgagacctttgcagacttctgacctatataactataattaataaatctgagttgttgtacgccactgtttgtgttgcaatttgttaatggcagtaacagcaaactaaaayaaaaccagtcaaagatttcaactcttgtgggatcacattcccccaggaggagacagtcaatatatgtaataaataaattatatagtatgtgagaaggyaataagtgatatgaaaaagaacaaacagtaaaagggagtgagagtgtgattttaagtgggrtagctaaggtaggccttattgagaaagggacactggaacaaagtgggggtttgtgatgtaaatttagcagttcaagtctaatttaacagtattttattaaataaaacaattggttactcaatttgtttgaagccctagtgttaggatttaaattaagatacatattttttctagatattatctaacatagaaaaatggttgtttattttggtggctaagcattgtatttaaaagattgtctttttaattcttttcattattagtctttttcttatagtttccatatgttaaaatatgcatatattttttttcccagatatattattttggtaccttctcaaagttttactaaaagtgtaatggagtactttcactgttatctttccattcctaacaagatctttctagtttcatgagactcaaagtgatagagtagaaaaagcaagacactttcagaggcaagttctgtcccatatatgctacaaactctagcaagccagtgacctactcttttttttttttttttttttttgagacggagtcttgttcttgttgcccaggctggagtgcaatggcacgatcttggctcaccacaacctctgcctcctaggttcgagcaattctcctgcttcagcctcccaagtagctgggattacaggcatgcgccaccatgcctggctaattttttgtatttttaktagagacggggtttcaccatattggccaggctggtcttgaactcctgaccttgtgatctgcccacctcggcctcccaaagtgctgggattacaggcgtgagcccccgcacccagccctgacctactcttaacttcagtttccatctgaaagtttagaaaacttatacttgtcttcaaggatgttacaaaaattaggtaagaaaatcttgtaaattggctgggcatggtggctcacgcctgtaatcccagcactttgggaggccggggtgggcgaatcacgaggtcaggagatygagaccatcctggccaacatgrtgaaaccccatctctactaaaaatacaaaaattagctgggcatggtggcgtgtgcctgtaatcccagctactcaggaggctgaggcaggagaatcgcttgaaccaggggagttgcaggttgcagtgagccaagatcacaccactgcactccagcctggtgacagagcaagactctgtctcaaaaaaaaaaaaaaaaaaaatcttgtaaattatttttaaaatcctttcaattattttcacagattagtctcttttccttgacctaaatttctaaaataaaataaaatatgcaatatttttgaaattatgtaacaattgattgtttcaatatagggcaaattagaagttaataaagaaaaaagttctatttgagtaaagcacacatttmctgaggcctacattttygttcctaaggttttgctttgagcaacttagggcatactgtgtgaggcagcatggaggcaggaaagctcagcttctgtgggagaaagaacaggggcctcctattagtggccagtggatcaacactcccatgttatgcttagaactttattactatgaaaagctctttgatttgtcttttcaactctcttataaaatgaagataataaatcacttcaaaaatccaaatgtttttttttcctgttcccaaagcttttgtagaaaagataaaaaagggagaaaaagggaggtgggrtraaggacagagacatgttttagactcatgccctgaggttatgcagaaacaactgtcacaaaggttaaaacaaaaartctttatctttttctcagtggatagcaggagaaaaatgacayaggaaatagctacttcaactgagggagtcaaatctttgccttacttgtttgactcaatttactttaattggcaggtaggttcttcgggaaagagaaactatttggaacaaaaagaaccgaacagcctatttgaaagccstgtcttaacagcagatctgaaattgtacacatttattttcccatattgttatttattaaagaaggggattaaattaccttgcctccacatatctgatgaaaagggatagctacattttatttcataccaaattggatacattgcttaacctcttatagcttccatttttttaacctgtaaaaaacaatcctacactggtatgttaaaagatcattctaaattaccatatagtaggcttttaataaatatttatatcagtgtggtggtcatcactgttaatacatgaaattattattgctagtctaatcttgcaagctaacagtagggctctagtttaggcagctcattggccaataatttgctaataaatcaagcaatgaaataaatgtaaaaagttttacatatcctaaaaaatgtgatagatttggtactggtgggacatagagtatcagaccaaacaggctgtctgaacagattttctctgtaaaaatcatatatagatgacataaatttcaactctagaacctattcagcttcctcagtgctgcctacacctgttacatctcacaatcagcaggaatatgtcatccatagtgaaagcctggaaccaaactaggttgccagagccaaggtaatagggaagatagaatgactccagaaactgcctgaggcaagaaaatgatatgatattgaattgaaagatagagcaaatggtattaacattttctttacagagatgataagaagtcagagatgaacactgaattgaataggcatttcctttgttttcctagtcagtctcattaacttctcagagcaaattattttaaattaactggggtcaccattcctttcattcagttatgatttactcagcacttacgatgtactagacagcatgtaaggcactggatgtatagaaatatgaaattgaatccgtgccctctagaagctcataattttaggaggcagacgtttattgcacgatgtgatgggtactatgagagagtaagcagagaagtacagaagaggcatctcacccagtctgaaggatttgggaagagtttgttggaagagatgacatctgagccaagacaaaaaatgaaaagacaatgatcagagtcaagcttggggaaattttacgtgttatttagagatatgtgataactggttaattcagggaattttagcaaataaatgctggaccacagaggaatatgggggattgtgagaggcaagctggacaagtagcatgggaccagatcatgaggacctttatatgccatgttaagacagtaagaagttggcgaaaaattctgctcatgatgccttagttaaaaatcatacaaataacttctcaccttttatttacatggaaaacaagaaagtctttgagaacagcacatacagagaagggggtgtttactagggattatgatgactatgatactgagcccttcaattccagtcttcaagaagcaattcccacttccatccaacccctaggagtcagggcttctgacagcacaactatgtttttgcagagtgtttgtattctttggttctcacctttaagtacttgtcttgatggaaagaaagattaaaggtattttactagaaaagtcttaatgcaattgtagtgggttgaatagcatccctcggaaattcatgtccttatagaacctcagaatgtgacctcatttggagatagcgtctttgcagatgcagttagttaatataaggtcatacttatactaacttggataagggtgagccccaaattcaatggctattgtccctataagaaaggcatgtgaagacaaaggcagaggttggagttatgcttccacaagccgtggaatgccaaagatggcaggcaaccactggaagctgggggagaagcaagggacagtttctccctcagagcctatgaagggaaccagccctgctaacaccttcatttcgacttctggcgccctgaactgtgagaaaatacatttctgttactttaagccacccagattatggtaatttgttaggaaactaatgcaacaacaacaacaaaaaagtatcttagtgataatgaaaatttttctaaatagggctttgtccactccaaaaatctcaaactggtcttaatggatagatgagtaattcttaggaattttcatagtaattacacgatctataatgaaaagaagtccatataaatttcaagatcttagaaatctggtttctatactcctgcctacttactcaagtacttatttattcccagtggtgatacataatcatttctacaattaattttctctttctatttaaggttattttccttgtcttatcttgaagaacttgatgtttcctataatgaacttacttttattccaaatgaaattcagaaactcaggtattttggaagtacacagaaagttatatgccccttaattatatatttaataatgattgtgatagagaaaatcgatcctttcatttatttaatagccataaaatgtaatctgtgaagtacaaagtttaccaaacatgtaatttgaatgattggtgtacagtatttttaagacataacatttccagaaattatttaaagaaagtgcagatgactacttaacagaacgataagctacttatgtccatttgtctgtgtgtgtacctgtggctcttattatgtttcatttattttttgtgaggaaatacatttacgcaaaatgctaataatacaaaatataattttaatgcaaagcttcaattctttctaacattaataaaagtctgaagtttatctatgtccttctaggtcagtactatactgttttgattgtgacttcagaataatttttaataactagtagggagattatttttcagtaatagtctcttaactattctctttagaacataatctttcagatcattttgtataatttctagcacatccagcagcacacataatcacagagttagaattttaattgcaattgcatagagtttactcataaatttgggagaatttatatttttgatcaatttttctactctaaaacttttttttcattttttcagatcttgttttatgttcttcataggaatttatgactcacgtcatatttttcttaataaccttttctaagtgttttatgattgtgattgttactatgaatgtaatgtaatatttctcttatttccacttgtttctaattattgtcagtacagaatagagaaaaactatgtacttctttacattaacttaaaactaatgtgtgtaaccaagttcttctgttagttctgatttagttttactacattttattttgtttcctaggaacgtaatcttccatttagcagaatgagataattttacctttgcttttaaaatatttagatcaattatttaatttcctatgtgacaatctctatattttagtaggagaattcagtctgttcatatttattatgaccaacatatttaatttttgcttttcattttactttgtacttattatttatttactttccccttttcctacctatttttttaaggatgctgtttgttctctttttaaatttttgaattttatttttaatttttagagacaggatctcactctgtcgcccaggctggagtgcagtggtatgatcatagctcactacggccttgaactcctggactcacaattctcctgcctcagcctcctgaatagctgggactataggtgtacaccagcatgcctcgctaatttttttatattttgtagagatgggggtctcactatgttgcccaagctggtctcaaactcctagcctcaagtgatcctaccacctctttttttctatgttattaattttggcattctattgtactaccctaatctgctatttggctatctttccttttcccaaactcataatcaaactcattttctttaatattttataaaggcaatataaaaagtacttcccccaccatgatggtctgtctccccactgctgccttccactgttcgttgagacctttagaacagttattttctttggaaagatgctttctttccaaactcatcttccccttatccaactctaggctttgctgaaatagtttagaaacttttgtttcagattctcattagtattttcctttgcatcatgtctctttttattaaagaatgtttatttagcacttaaatcttacaagcattttagttcattctccttttatatttatctgtatgtatttcaagactcactgtttacagctgtttcgctcctttcctctcacctggaacctggccgtgtctcttttgattcattggctgtttagcgtttttccttaagtattttcctcagatggaatacataggtaattttttctctgaatctttaaccctgacaaataaatgatgtcctgagtgagtggacaagctttcattcagcgtgtttcacagtagcctccatcattgtgtcctcctctagtttccagggtgctggggaggcacctgatgccagtttgattcttttttcttcctaagcgacttttcttcttgactggaaagactaagattctcccataatctttgacctttcagaattttatgagattacgcttacaagttgtctttttcttaagctgtctttcccggaattcagtgaattatttgaatcagccagctcaaacttctcttttctagttcagaaaatatgtttaaatagttcctgtccttctccatctgtttcgtattttcttcctaaaatgcctattgtttacatgttaggtctcctagatctgtcttccatggtacctagatttttcctcatggtttttatttatttatttatttagttagttagttagttttgaattatttcttctacttcgtctttgcctctaatttggatccccatgaagatcatgttcttctttcattcatccacttaactttttagttttacacatcatgcattttggttccagaacatctctgcgtgtctgtgtgtgctgtatttgaatcttgtttccccacccccctccccaactttgtatccatccctccacagaagatgcttgtcccaggacctttgctttgtgtgttctatgtgtttttctcttctggccactctttcttccatgcaagtccaatggcagtcacataacaccactcagaatgctaagaaagtgagtggtggatgaggaggaagcttctctgcacctcagggtgctcagctgccaaggcagtctcaacacagagctattctagctttaaggatggcttagcagccaggtgcagtggctcacacctgtaatcctagcactttgggaggccgaggagggtgtattgcctgaggtcaggcattcaagactagcctggccaacatggtgaaaccccgtctctactaaaaagacgaaaattagccaggcgtggtggtggtggatgcctgtaatcccagctactcgtgagactgagtcaggagaatcacttgaacccagggggcagagcttgcagtgagccgagatcaggccacttcactccagcctgggcaacagagtgagactccatctcaaaaaaaaaaaatgtttagcctgcctagctctcttagaactcattgaggggaaggaggcagctaaacaggtgtgtcctccgaggtaaaccaactcaggcagggagagcctcaccatggctattcaggtgagccatggtgaaccttcactagcatttgcctagagtgtgccacactcattctgattgtccacatagaatttgtatttctcagcttgggctactataacaaaacaccataggctgggcagttataaaaaacagaaatttatttcccacaggctgggaagtccaatatcaaggccccagcagatgtggtgtctggtgagggcccacttcctcatagacagccatcttctcactctaatctcacatgacagaaggggtgagggctctctcaagtctcttttataagggcactaatctcacgcatgagggctcctgccctgatctagtcacctcctaaaggccccacctccaaataccatcaacttaaggtgaagatttcaatatttgaattttggggggacagaaacattcagaccagagcagggctctctgctgccggcccctaggcttgtgatttgcgcagaagaaaaaggtgacc

SEQ ID NO: 5750 - DNA, 29618 bp, Homo sapiens
aattgagtttggatctcttttacaaaatgtatgatttttaaaataaatcatttctactctttattcagtgtgtgcatttcctgacctttgttttcatttaagacaggacaacagttctgagagcagttctggatgtaagtctgttaagtaagatattaatctccttaattacggaaattacatagaaacctttatttttattttaaagtaatacacacatcatttattaattgttgtttccagatatattaattacaagcatggttttagacagcattggaaaagtatttatatggtaaataaaataacttctagttgtcaaggaaagtgaaaaacaggataagttcaagcaagacaagactcatgtctgtgtttcagaaccttcagatcagcctagaaccttctgagacaaggattctgaaaacttttagtctttatttgccattttatcttcaatgctgtttttaaaagctggttctcttgcaatccctggtcccccaacactgccctgataggccaattgtctaggcagcagttgtggcaacagctggaactgcctgcactttctgggcactagtgctggcataaggaccttgccaatcatgctgagcaggagtgcctagcttcccttcacgcgaccctcccaaaggtggctcagatctggaaggtccaaagcccatctcgtggcacattaggtatgaaccccaagtgtttatacctacttttgaagtaggttgttgtctacttttgaagcaggttgttgtctacttttgaagccttgcatttttacatggtccacacccatatccatagcaaaataatagttaatatcagatagctaacacttaccgagtgcttgctgcctgccaggcacaatccccacctgtgatttaatttccataactttgtggaggtgataatattgtaactcccatttaacagacaaggaaagtgaggcacagagagactcaattacacacatagaggcacatgctcaggcaacacgtggccagtgcagataacaggaaaattcactgctcttccctctcataatacattttaatattatggaaatgtggtccttgaaaaagtggtcattgagcacttaccaggtgctacggatacaattcctctgcagcttgcattctagtggggagagacaggaaacaaatgctaaaatgtgcagggtgccaggagtggcccattccctgaaagaaaaggaaaggggagagtggttgtgtcaggagattctctctgatagggcagcatctgagcagagaccagaggatatgaggggagtgagcaacagggctatttgtgggggaagacagtaagtgcaaaggccctgaggcaggagcgtgcctttgaaaagaaatggcaaggaatggctggaggacagcaagtgcagggaggctgggaggagacggaggaaagggcaatgagatcctagagggccctggccacactgaaagaagctcctgtgaaacggagtctctcagaataggtcccttttaaagtcacctgaaaccaggtgtcagtgcctgcctgcctgccttccctccttctttcctttctttctttctttctttccttcttctttctttctctctctctctccttccttccttccatccttccttcctttctctctttcttctctttctcactttcttctctttctttctttcttctttgtttctttgtttgtttctttctttctctctctctcgcttgcttgcttgctttccttccttccttccttccttccttccttccttccttccttccttctttccttctttctttctttctttctttctttctttctttctttctttctttctttctttctttctttctttctttctttctttctttctttctttctttctttctttctttctttctttctttctttctttctttcttttctttctttcgaagtcttgccctgttgcccagactggagggcagtggcacgatcttggtttactgcaacctctgcctcctgggttcaggtgattctcctgcctcagtctcttgagtagctgggactacaagtgcccggcaccacacccggctaatttttgcatttttagtacagacagggtttcaccacattggccaggctggtcttgaactcctgacctcgtgatccacctgcctcagcctcccaaagtgttgggattacaagtgtgagccaccacgcccggccctagtgcctttcttacttccaaacacatgtttctgaactgcataaggagcctggaaggctgatggcagccaaggctaagtgccattgtgagcactgtgagactctagcagagttctggggtcctggtcgccccaggtgactctcgaatgggagcagctgccctccagttgcaatgctggtctctgagatgagtgactgtaatgaagagattgatgataaccccatgtcctcagaccttcattgtttctgcggaagggaactgggaaagtcttccaccaaggaatcttttgtgaggcagtgagcttgccttcctgttttctgtaattcctcccattctcccatgtgcttgcggcgagaggaggacgtgaggattgtgttaaagggtgatgagagagcaggagtggttgcagttctggaaaaagatctaataaaacacttacctgcctgaaggcagtgtgctgaaatgaagaggcacattcaacagcattgtcatacattggacctgtgaggggtgtcattgaattgaccacttaggatgtttaaatgtttatttaaagttgcccttggctataaagcctgaagtgggtgttggagtagtcaacgactaacccaggatggatttgtgccaatacacaagtgacaacatctttcacagctgaagagtcggaggataaagccatgcccacagatcgttgtcacacaggtataaccttacattttccaaaatagtcttttaagtgccagcattgttgagtggcatgcactttttgaattatgtaatctgggcatattgtatacctttattttaaaaattttgtttaaaaatgccaatcacgtttattttactttatacatataagtaacattttttctatcatatataatttaataaaatccaatctcactgtgaacactgtactgctgaaaattcatttttactataaaatagaattctgtaaattgctttaagaaagcatttattggctgggtgtggtggctcacacttgtaatcccagcactttgggaggccaaggtgggtggatcatgaggtcaggagatggagaccatcctggctaacacggtgaaaccccgtctctactaaaaatacaaaaaattagctgggcgtggtggcaggcacttgtagtcccagctactcaggaggctgaggcaggagaatggcatgaaccagggaggcagaacttgcagtgagccaagatcgcgccactgcactccagcctgggtgacagagcgatattccatctcaaaaaaaaaaaaaaaattatttatatagtacttatatattatctatgtactttttcccagacacacacagtgaacaagtgatcactgggctcctttcccaggcacagtttttgtaagtaattgtgaatgcaggatacctaatatctttgatcatttaagtttttacataaaactaactctagtaggagaaaaacaaaggtgcgtaagtcacgttcacatatcttatgtagtcactttgattgtttccttggataatgatgctctgacagagtgctattgagttctcttagttccttccttccttccttccttccttccttccttccttccttccttccttcctttctctttctctctctctctctctctctctctctcacccaggctggagtgcagtggcatgatcttggctcactgcaacctccgcctcctgggttcaagagatcctcctgccttagcctcctaagtaactgggattacaggtgtgcaccaccacgcctggctaatttttgtatttttagtagagacggggttttgccatgttggctgggctggtctcaaactcctggcctcaagtgacccgcccgcctcagcctccaaaagttctggaattataggcgtgagccaccgctcctggcctcttagtgcttttgaatgaaataaaaacccgtaattattttaagaagtcttcttctatgtaaaaattagaactaggctgggtgtggtgactcacgcctgtaatcccagcactttgggaggccgaggtgggtggatcatctgaggtcaggagtttgagaccagactggtcaacatggcgaaaccccatctctactaaaaatacaaaaattaggcgggcatggtggtggcgtgtgcctgtagtcccagctactcgggaggctgagtcaggagaattgtttgtacctggaaggtggaggttgcagtgagccaagatcgccattgcactccagcctgggcaacaagagtgaaacttcgtctcaaaaaaaaaaaaaaaagaaagaaagaaagaaagaaaaaattagaactaaacaggtgttcttgtctgtccaacatagactggtagactcagagggagtattccaatgttcggaaactgaaaactttatttgaggtcaacagaaaagaagttgagatcaagtatcatgttttgtcctggagccaaatatgtagactttgctgttgagcctggcttgacactggacctttgattgatgttaactgtgactcaccctctcttgcctcctttcagtttccaaattctctctgcttgggtcaaaagtcattgcttgccagaagtttaatagtgtgtgcattgtgtgtatgtgtgtgcatgccaatatgtatgcaacccatacaatgcctggaacaccaatttagcttcatattttaacagaccatgattccaacatcatgtcaaagtcttatatgttaaaagttctgcatccacattagaaggtactatggatcactgtgtatcccatgccaaatggtacatgagctctctttctcctctgggtcctgatattttaaacaaagaaacagtgtgccattatgggcccttgattctgtgcaaagtcattgatcgttacccatccttgaggtttttttcttgaggcagagtcttgctctgttgcccaggctggagtgcaatggcgcgatctcagctcactgcaacctctgcctcccgtgttcaagcgattctcctccctcagcctcccaagtagctgggattacaggcacctgccaccatgcctggctaatttttgtatttttagtagtgacagggtttcaccatgttggccaggctggtctcgaactcctgactttgtgatctacctgccttggcttcccaaagtgctgggattacaggcgtgagccaccatacctggccccatccttgacttttaacatgtacagagcaaccaataacgagtccttcctcaaagtaaagtgaaatgaataataaatgtctaagactttgtggttaaacctaactccacactgaggtgggtcctgtccctgttgatctaaattttcctccactaggggtctaatttggagcttccctacagaggattgtgtgctgcatcctcagatccatggcgcaaggttttttccacgtgtgaaaagaagataacagatgggaaagagctatccagaattggtgtgggcgctggtaccaggcctggccatggagaggactcccccatatttaacctagggcatctattttctgcagccttgctgcttaaaatggggtctgggaaccaaggtaccatgaggatcagcatcaactgagagcagcttgttaagacgcgaagtctcagccccactccagacctgcagcactgtaatctgcagtaggcaggattccaaggcaactcttgttcacatcagaatttgagaagcaactgttctagaatacactagggagccatatgagatctcaggatcaagtgtagagtgacttgaggtttctccttggttgagagctcctcaaataagataggcctcccaggttaactaatttcagagcaatttttyagatttagaaaattggagtcaggcgcagtggctcacgcctgtaatcccagcactttgggaggccgaggcgggcagatcacctgaggtcaggagttcaagaccagcctggccaaaatggtgaagcgttttctctacyaaaaatacaaaaattagtcaggagtggtggtgtgcgcctgtagtcccagctgaggcataagaattgtttgaaccagggaggaggaggctgcagtgagctgagatcttgccactgtattccagcctgggtgacagagtgagactctgtctcaaaaaaaaaaaaaaaaaaaaaaraaaagaaaaagaaaaagaaaaaacaaaaattgggttcattttgggttttgttgcacaaatatacatatttaagcacctgttaggtgcaaggcattatggcctgaggggaggtggtttggatattcataatggaacgagattcctagaatatagaacaaagctgcaatgtttaaaccatttttctaaacttttgtgtaattcagcattgaatctcctttctcatctttacctattgtaagtccagttaaaatgagggtagacgtggatggtgaactgaaagtagcaaagtagacagatgcaatggtgrctacaaatcccactttctgatttgaaatgtgggattgacagcagttgaaaaataaggattaggtctataataaactgtctttattaatgarctatagtttragtaattaacacaaattcagaataagtagtaccatttaatgrgtttatgtttttaacaagtacadtaattagaaaggcctcatgcacacttcctgggaagctagaatagctgatcatattctgctaatgcggagggaggttcccccaagaacaacagggacaatggcatgggaaaggctggacgtccttcctggctgatgttttacacctttcttcttgggttgattgtttttttcctatgtagaagatttccttggacttggccttcagaaaacctaaatttaaagttcagctttatcaggggagcctgggmgaatggttacattaacctctttgtggcctttgaaacatacatagaaaatatcaagggatagwtgtaaaaatgaggataaaaacatctaaagtgctaagtagaaagtaactgagtagaatggaagcctgtagagcaaaaaattagattgtggtttgagtgagtggtttatgcctgtaatccgagaaatttgggaggccaagatgggaggattgcttgagtccagaagttcaagaccagcctgggcaattagcaagaccctgtctctataaaaaattaaaaattagctggatgtggtggtgtgcacctgtagtcccaacratttggtaagctgaagagagaggatagcttgagcccaggaagctgaggctgcagtgagccacatcactccagccaaggtgacagatggagatgctgcctcaaaaaaataaagttagattgtatttgcatgaagggcatgtagttagcctacaggtatgatgctagtgcttatttaattttctgaaatcttttagaagaaggctgcttgtgccacrtggggtacctgtgttcttttggctgtggagtttgcrcaggaagaggtttggagatccaggagcctgaagtcagatgacaggtgccttgacctctgtggcatgtctctttggactctgtgaaagttatttaattgctgtggttttcyagaagaatatgaagataattgtaaggtgccacatgcactgcttggactcttacagttctgacagttattcctgacaaatttcaaaaccaaagtctgtttctacttgtaggatatttctaagatatcccctgagaaattaatgacaatggagaagcctcttgtttgccagaatttattgtagaatggaaataaatacagagtgatgagtgaaccagaaactgtaattaccctagaaatacatattctttttcttttcttttcttttcttttctttttttttttttgagacagagtgttgctctgtggcctaggctggagtgcagtggcacgatcttggcttactgcaacctctgcctcctgggttcaagtgattctcctgcctcagcatcccaagtagctgggattacaggtgtgtaccaccatgcctggcttatttttgtatgtttagtagagatggggtttcactgtgttggccaggctggtctcgacctcctgacctcaagtgatctgcgagctttagcctcccaaaatgttgggattacagacgtaagccaccacgcctggcccagaaacacatattctawaaaccaacttgaattagcagcagagatgtatatcccttagatatggtattttctttctttctttctctttctttctttctcttttctttctttctttctttctttctttctttctttctttctttctttctttctttctttctctttctctttctttctttctctctctctttctttctcttttctctctctctcctttttttttttttgacagcattttgctgtaatgcccaggctggagtgcaatggcatgatcttcactcactgcaacctctgcctcctgggttcaagcaattctcctgtctcagcctcccgagtagttgggactacaagtgcgtgccaccacgcccggctaatttttgtatttttagtagagacggggtttcaccatattggccaggctgttctcgaactcctgacctcaagtgatccacctgcctcagcctcccaaagtgctgggattacaagagtgagccaccgtgccgggccagatatggtattttcaatgtttcaaaatagtgcattgtgttctcacattttataatcctatttctgaaaaaacaatagtttgttaaccttgtagcttattccaaagaagcagctttggaggatttgcagaagtggagtcatgggagggcattttctgagctctatgggccctggtgattgtcagacactcagaggatcctttaaaagtttctaggactaggaatggaaagagagaggagccaggttaaggcaatcaggtggcgatggcaatgcccagtgcagttaagtgctttgttcctgtatttcctccagacttgctgtcaaacctggacaggagccgaggaggtgggaggcaagggccagtgcatgtagtggggttcaaattccagttctacccyttcctagaggaggacttgggcaaatggagtagctcctctgaggttctctgtccataatatagtgataagagggctttctggggggaaggtggtattcagtgaggggagacaactaaactattagcttatttctgtaaatgttctccagttccaggttggagaatgattcaagttagcaaaaatgatgaggaggttggaaagctccaatgaaaccatggtcagtgggtgataagtgtgtgttgcagtttgataacatgaaagactgaaamtgagagagagttgaaaaataagtctttagaaaaatagagtttagggactggaagcctcaatgaggtagaaaaccagggtggagtaaggaggaactgaaagcaaaagaaaagcacgtgtgtgacttgagagtgagatttccaaagtcagtttcagttaccacccaagcaatcactaacccttctaaaktgtcattatttcgtatattgatatggtattttattaattaatacactttttttttcaagatagagtttttctctgtcacctagrttgaagtgcaatactgtgatcatggcttactacagcctcagcttcccaaacgatccttctaatctcagcctsctgagtagctgggaccacaggaatgtgccatcttgcttgtctaactaaaaaaaaattttttattttagacatggagtctcactattttgcccaggctggtgtcaaactcctgggcccaaggaatttacttgttttggcctcctaaatccycttggattataggtatgagccactgtgcccagtctaagtagaattttaaaaatctccttttctaaagaaaattgmatttgttgatagtaaagttttaaaattgggamgttatattgaaatgtrtctggtgcaaccagtggagtttaaattatttttgaccaaaatggattctgaagaaatggtatggatagaaaacaaagaatgtaagttttatcttgaataaaaactagttttcagggtggggtgagtggaactgagggtagaaaagggtgagaaagcaaatataataattgtctcatctctataacatttaaagatttgattaagtgaaacaaagccccagctgctggagcagaggttccactygggttccacagacacccacagcccaaatccctggaggtcagtggggctcacagtgagtgtggggatgcttctaatagtgggtgtgctcagctgggagtgggtttggtttggtttggtttggttcaaaggcagcagaagtctgcatcttagctgtcttaatgtgaatgtgggrtcttgtgacagggtctcttctgtatcctgggggtggatctgcactctgcctgatggcytagctactttgccagaccctgcctgcttggtcttcaccaggttgctcctgctgtgtatgattacagccttgrcatgggactgcatttcccttgtttaatgttggtgctgggaagccctcttgcaaccactcctttaatatcctcctttctcctgggagaagctggagagagctacaggtcmtgaggtcctcctctgggagaagggagatggagagaaacaccagatacacctccatctcctgcagctgttttgagtttgatttcttattctatttgaaggaaattttttagaataacagatacatgtataataaacacattttcgaacgtaaagagggaaagtagsaatgggatggaagtgagaccactgaaattcactggctccatgtgggagctcagggccatagtgtcatcatctacaaatggcactgaagtttctcctgccattgatacaagtttgcagcagatgttatttctgcatcatttgcattttcagttatgatacttcacctctttctcagtatcacacacaattcagtgttgactatgatattctgaaaagcacacaggccgggcatggtggctcatgtctgtaatcccaatgcttttggaaggagaagcaggtggaycctcggtgccaggagtttgacaccagcctgggcaacaaagggagacctcagttcttttttttttgaggtggagtcttgctctgtcacccaggctggagtgcaatggtgcaatctcatctcactgcaacctccgcctcccgggttcaagccattctcctgcctcagcctcctaagtagctgggattacaggcacgcaccaccaccccctgctaatttttttaatttttttgtatttttagtagagacggggtttcaccatgttggttaggctggtctggaactcctgacctcgtgatgcgcctgcctcggcctcccaaagtgctgggattataggcrtgagccactgcgcctggccgagaccccatttctataaaaatttttaaaaattagccaggcatggtggtgcgttcctgtggtctcagctacttgggaggctgagrtgggaggatagcttgagcctgggaggttaaggctgctgtgagccatgatggctgcagtgagtcatgatggtgccagtgcactccagcctgaatgacagagtgagactctgtctcaaaaaaaaaaaaaaaaaaagcaagcaagcaagcacacagatgagtttagtagatggacattaaaggagttttaaccaactcttttatttcttctctctcttaaaaaactatatgttgctgacaagaaattatatttcttctgtcatgtagaatttttattttgctccataaatgtaatgacattgggatatcatggatctgttttctgtacacctacttatcacttaaataacttttgaatcatttttcaacttgtttctattatatccatcaagttatatgtggacagatgatttggtaacaaccaatgctggcacagaatgagtgctgtgcacaggtcatccattgaagtctgtctcctgtcatgtctttgtctctcaaaaggaaactgttttggaactcagtcatgtttagaattctcagtctcagtttaagcataagcctctcctatggatgtggctgaattttactctagatactatcccattcaattagccagtttaaaacaggccagtttattcaaagctaaaattacagctgcataaagaggtagtttggactctctatgtcaggaattgggttgttttttgtggtattcattgctatgttcaaataaatgaacctgaaaggtgtgactttttcatcactgcagatgcctcagtaatagggatatttaactggtagcacccagaataacagatgttcttctacactgagtttcttggctgtttaaaaagctactttataatacctctggtttacttgtttagaatctattttaataatattttgcattgtaagatgcttctggtctctgctctttttttcaggcctaaggcaatagctaattgagactatgcatcactattaaggcatcttcactaaagggcgctgtggaaacgctgcctgagatgcagacacctgtcagaagggggctaaatttcaaacaaggaacgtggtgttgcatcacaataaagtaagtgtccagagggaacttctgcagtactgtgttttccaacgtgctgagtgatattgtaggagactattattttgctggaatttctatgaatacatctatgaatacatttaaaataaaaagtgttttttgtttttttttttgagatggagtttcactcttattgcccaggctggagtgcaatggcgctcccttggctcacacaacctctgcctcctcggttcatgctattctcctacctcagcctcccgagtagctgggattacaggcatgagccaccacgcccagaaaattttttgtacttttagtagagacggggtttctccatgttggtcaggctggtctcgaactcctgacttcaggtgatctgcccaccttggcctcccaaagtgctgggattacaggtgtgagctactgtgcccagccaaaatgtgtttttttaatatttaattttgtggccaggagtctcacgcctgttatcccagcactttgggaggccgaggcgagtggatcacgaggtcaagagatcgagaccatcctggccaacatggtgaaaacctgtctctactaataatagaaaaattagctgggcatggtggcatgtgcctgtagtctcagctacttgggaggctgaggcaggagaatcacttgaacctgagaggcggaggtggcagtgagctgagattgcgccactgcactccagcctgaagacagagcaagactacgcctccaaaaaaataaaaaaaagaaagaaaaaattgttttggtacatagtaggtgtatatatttatgggatatgtgagatattatgatacagaaatgcaatgtgaaataagcacttcatggagaatggggtatccatcccctcaagcgtttatccattgagttacaaacaatcaaattacactctttaagttattttaacatataccattaagttattactgactatagttaccctgttgtgctatcaaatagttggtcttattcattctttctaattattttcttggtagtcaaaataaaatgtttatttttatgacttctttttttttttttttttttttttgagatggagtctcgctctgttgcccaggctggaatgcagtggcgtgatctcggctcactgcaacctctgcctcccgggttcacaccattctcctgcctcagcctcccgagtagctggggctacaggcgccaccgctaccacgcccggctaattttttgtatttttagtagatacggggtttcaccgtgttagccaggatggtctcgatctcctgacttcatgattcacatgcctcggcctcccaaagtgctgggattacaggtgagagtcactgcacccggcctccatataccagtgatagcagtgttttatttacagtaattataggttttttttttttttgagacagagtttcactcttgttgcccaggctggagtgcaatggtgtgatctcagctcactgcaacctccgcctcctgggtttaagcgattctcctgcctcagcctcccaagtagctgggattacagaggtgcctgccaccatgcctggctaattttttgtatttttagtagggacggggtttcgcgatgttggccagcctggtctcgaactcctgacctcaagtattctgcccgcctctgcctcccaaagtgctgggattacaggcgtgaaccaccacgcgcggcctcaaactcatatttgaaatttagagagattgccaagaccctagagttttgcatgttctcacaaattgatttcgttagttcaaatttcataccactttttctaactgatgattcttacaccttgacaggtgactgagttcaatatgattagagctgaaccatttcaaaaagcagcacaagtggcgactgccagtaaccgataataaccgagtttaatccccctcttctgctccttccctctgatggaattctcattttccctggcctcccccattgacattcatccaatgcccatgctgctggatcagtcttcctggagccatatctaacttagaaagatgaaggacttccaaccttttgggagatgacaatgtgttatcaaaatcaacaaactaatagattgacttcctttgcatatttttgcaatgttctgtgagatatcaagtcacttccctggtagtttcttattcagtatttcactgtactgctttaaaaaaaaaaaaaagtcaggcctcaaccctaacagagtcacttggagatcttgttaaaaagttgagtttagagtctgatacaggttttgagatggccctgagaacttaggttttttcataggctctctgggcaacttttatggggcagaggtttagaaagctaggagtaagctgccaggtatcaggaaaccactagatggcagggccatcccttggagccygttcttcaatcaagaaagtggtcagagaggaaagtggagtggggaagagtccaagtacacatgttaaatgcacgttaataagtggatggtgaagatgagcttaggtgttgggtcctagcgggagagtgggaaggattcctgtcacttctcacctctttctagctttatctccagtatttgaaatgcctggaggatccttaactgaaactctccactagtcaactgtgctgtactatagcacaaccactttaaaaaggtgaaagtaggaaaactagctcaatgagagggctaatatttttatggggccaatgatttgaattggtagacatatatgccytcctacatgatataggagatagagtgcaaaaatcaaaccaaagtgttttttcctaccctcactcaccacacactactcctcacatgccvagcaagcaagcaagcaatttttctgcagattctgcagtgcacaccagctgggtgtcctctaattcaactcaactcttacactagctatctagagatactgtcagatcccacaggttaagggctcagtcccacaagactgtcccccacttcagaggccwgttataagactgaattgccagaacttctgatccactggctacaaattggggctcccaagaccctgcccaggggttcaattaatttgttacagtggctcacagagctcagggcaatactttacttacatttactggtttattagttagagatataataaaggatgcagatgaacagccagatggaaagatactcagggagctatctggaatggtcccagcactggagctcctgtccctgtggagttagggtgcacacactcccagcatgtggatgtatttgcaaacctggaacctctctgaaccctgtccttttggttttatagaagctttaatttgtaggcatgattgattacatcactggccgttagtgatcractccattttcagccctcctccctatctgctggttatggggtggagctgaaaatcctaactttccaatccagccttggtttttactgtgacccactcctaacctgaagctatccaggggccctcagctaccagtcacctcattaacatataaaggattatatgctaattatatagtatatattattatgttatataataatataatatatatatctataattacatgctatattatatatgctatctagtaatatagttagcatacactcctttatatgctaatatataattatgctatataattagcgtatacactctaaacactccttagattccaaggattttaggagctttatgccaggaaaagataaggaagaccaaatgtatatttcacaaaaatcacaccttctaagtgtatgacactttctaagaaattagcagacattacaaatcagatataaaacagatattaccatcccatgaggcttttttttgaaatgtgcatttccccctaaaaccaggaagtggcataatggagatgagagctcagatctcttgcttttctccttagtggtcactgaggtcactaagtgtcttggtgtgccactaacatttagataaagacaggtgtgtaagaccaaaactgtatctttctctttttaagccacttgaattatttttgatgtctgaatttttcaaaattccaacctaatttgtgctgtcttcaaaacagtcttattattggaactatcactgtgaatgaacattacactctaacagtggtatgttatatgaaatggtaccatttagtccttaaaattgattggaaaacagtgattggggarcatttaaatatattttaaaagtgagagaagtaacaattaatgctatactttttttaataaggagagtatattttcattgtaagtatctattaatgattgaaatgttcagaggaactactgaattcatcatctgtgtttagatgaagcaaagacgaaacccccttaacagttactcagttttttgattacccttgctggcgacttgaggaaagagtggataaaaactgccactgccagctgggtgcggtggctcactcctgtaatcccagcattttgggaggccaaggcgggcggatcatgaggtcaggagttcgaggccagcctggccaatatggcaaaaccctgtctccactaaaaatacaaaaattagctgggcatggtggcaggcgcctgtaatcctagctatttgggaggttgagttaggagaatcgcttgaacccgggaggcggaggttgtagtgagctgagattgtgccattgcaaacaaaacaaaacaaaacaaaacctgccactgccaatctggagttggagttatcaaaactgatgatatctggaagagggcagaagatgttaccatctgcaagtttaggatgctgaagaagtggcaagaaaaggatcagagccttgccacagcccagaatttatgtaagtgcttgaaagacatcatctctcttgaagtccaagatgtgttggaaggtgagcagaaaattatatcttagttatttgtctggaatcaagctgtgtctttgggaatagytatagaacatgtggcttggttatttataagcttgggttcagagagttatgcaaatgcaaaagcargcaaggggctgctgtcctcttagtaaggatggtgtgtgcagctgagtcagaggaagggttggaagcccagccccagtgctgccctagctttgggactgtaagtaaaatctcaacctaacttgaagcctctctgttcccatctgtgaaatgggttcagaccctcctatgtcctgggctgtggtgagaatgaaaggagaccatgcatgtcaagatccaggcaggtggtctggctcagtaagggagcagtcatgtcaccctggtacttaaggcagggctggtagcattgagccttctgggccttctgtggcactgaagcaggggtcatgggggccactgggtggcgccagcaatattcaaccagcaaagagggcaagggagaaagcagagcccagggagggctggaggggatcgttcctggtgttgatccagaaaaccacagggttccttgtcttggttttcaagcacttctaattttgtatgtgtgtggatggatgtagcacattgtcataactgagctcaaatcaattcaagactttgattattatatgttgttactacaacgaatatagtgttttttttttctaagaatcctcagtaattcagagagaggttttatttaaaattctatttagatttttttattcctggccgggcgcggtggctcatgcctgtaatcccagcactttggaaggccgaggcaggcagaccacgaggtcaggagatcaagaccatcctggccaacatggtgaaaccccgtctctactaaaagtacaaaaattarctgggcatggtggcatgtgcctgtaaccccagctactcaggaggctgaggcaggagaatcgcttgaaccagggagtcagaagttgcagtgagccgatatcacgccaccacactccagcctgatgacagagcgaggctccgtctcaaaaaaaataagtacataaacaccccagaaggttatatcagaagtcaaagtactatgatctctctgcatgcttttcagacatggtgagcgagcgttctgaacccycgggcccactttgcctggaggaccactgaggttttctactctctagtcttggggtgctgaagcctcaagagattagaaacaaatgcaattctctcccacctagcaatttgggatgcaagctcaaaggtgagctcctcatcccctggagaagtacaactggccamacactacttttcttggactttcacrgtggaattatttacttttcatggggaagaatgctactcagagatagctttcacagaaccaagggaaagmtgtcttcttttcttgaaaaagacttgcctcaggaaataatgggcctcattggctsctgctaattggtgaaatgtktttkttttttttttttggtctgtgtagatattgtcactacttcagcatcatgagtgtggtgggtgattaatattctggatatattttacattatttgatccataaattcataaatcatggatgatgagaagaaaaggaagtctgctttttgacactgctcttctttgtattatttacttacaggtcctgttttaaagcatcctattccttggytgtctttcctttggctctttggcaatagttggttttgatcccagctctttggctcctgggccaaggctgagtgagtgccagacagggtaaactagttcaccaggtgttcacacaggttcaggacaacctgcattgtccccacagcccttttgccacaggaataattatggttttctcccttccaaggatgggaaggtgtgtttttatttaaaaccaggcagattcctaatacttcctcatttgtgcatttctcttgacaagggatttttctgcacataatgactctcatttggtccttttgctgtattcctttcggggaaaagtttcctcccgctgctttttcatgagaaagcacgcttcactccattctctaaagagaacacagcagttgctgaatttttaatttgttcccatgagaatcgtggtttccagcagtcagcctaggccactacccgttttctggaagtccttcttagggtgaaccagcacactgcttgctgaagagcttgatcccagggattcactgctggaatcatgtgtttttggttgacaggtgttctcagcctccctgtctatatgtcaggatttgagaagtcctgatcctggctctgcagccgctgatgctaacacggaggccctggggttaaattctaggctctgagttttgagatttctcctgcttcttaagtgagacctccatttccaccctggagcccactgtagatttagacctaatttgttctggtcctgatgtaagtcctcagttaggaagtctagagttagtcagccacctttattctttgcaatcccattcttgctgttttctgtaacctctagcacaagtttccttttcagaagggaagacgctctatgcatttatagcagtgttttcttttcgagcaagcctggaaatcaacaggtggttccattataaaaacaactggagagaggggcttagagtaattcagcaagttttcatttttccttacccacgaaaaccttttgtgaaaggaaatcttacctggaacacgcactggtaaaatattcaaaagtggagctgctgtggtggggtcattgaggggagagggatttcgagggcttaccgaggagccctgcagggcctctgacttgctcctggyagggtagcttggaaaccagcagatcaggtcattatttggatttcttgaagctgtggtgcaggaatgtgtttctaagacatctgcaacctaatgggaagtaaaacactttcccacccctaggtgtggaatatttattggcacgttgtttctgaagcatagacatatactcagaccacaggtatttaaattatgttaactaaatcaaaacgtttatgaatttggatttttccccattatgaacatgtataattattttgaactaagtaagcatatgcattttcaattttttaactctttatttttataattgtgaataagtttctttcaaagactagagacttattttttaaattttatttttatttatgtattttttgagacggagtcttgctctgtcacccaggctggagtgcagtggcacgatctcagctcactgcaacctctgcctcctgggttcaagcaattccctgcctcagcctgctgagtagctgggactacaggcgcacaccaccacacctggctaatttttgtagttttagtagagacagggtttcaccatgttggccaggctggtctcgaactcctgacctcaggtggtccgcccacctcggccccccaaagtgctgggattacaggcatgagccaccacacctggctgagacttctttatttctatctagattaggaaaagacatgagaattgtgggggctcatgaagattccctttgtttctgtatcatttttaagttcctggggctgggaacacaaatacgtgggtaatactacattgcctatatctgaggttcccacagtttagcaagagagagaagggagatacataaataattgggatgatatttatatggttatagggaaagcattcccttgacttagacagtgacttcaacatgagcatagctgctggcacaggctgagaccaggccacttaaaatgttaattatgtgagcttacataatcttattatttattatttttattttttgtagagatggggattttgccatgttgcccaggctggtcttgaactcctgggctcaagcaatccttcatctcggccttccaaaatgctgggattacaggcatgagtcaccgcacctggtcaacttcaataattttcttcactttccacatccataaaaagggttattaggatggttatgtttatttgtggtaaactcttaggaacatgcctggcatttaggaagcacaaytgagcagttgctactactttttttttgtctaaaacagattccattaatatactgtttttgatattacatagatctaattcatactcatatttttaatgtaaaattgaaagatacataaatataactaaagtttttgtgcctgttctcaccacatatatttcaaaacatttatacgcatcctatttcacttttttaaataaaatatttcaagtacatagaattcaatttttggacaatgcggccatatttttttcttacttatcatattgtaatgcagtttgctttaaactaggaagccaaattatgctagccagaaccaaaagtattttttaatttttaatttttttttttagatggaatctcgctctgttgccaggctggagtgcagtggtgcgatatcggctcactgcaacctccgcctcctgggttcaagcaattctcctgcctcagcctcctgagtagctgggactacaggcacacaccaccatgcccaactaatttttgtatttttagtagagacagggtttcactatgttggccaggatagtcttgatctcttgaccttgtgatccgcccgctttggcctcccaaagtgctaggattacaggtgtgagccaccgcrcccggcccaaaatgtttagtcctcaaataaggataataactgaatggcccagtgtgacacagagaagaggacttatgatggctgtgggtgctggcccccaacaaagctggtgttcttttctttttgtctgtagtttcttatcctcctttgggtgtctaagggtcttttacayctcttgagtttttcaatactyacctttggatgtctggccagaccatgtcctagaactgttctgtcttcccaaagtcctggacctttaatggggcagckgacaactaaatatttttcatgttaattctctgatttagtcattcttaggtgtgagatacactttcaaggtttagtttcttttgaataaagtagtttgttaatcaaacgaatctccaattgactggggggtatttttagggggatggtccttggttttgataagttactttgctcctggcctggctcagtggctcatgcctgcaatcccagcactttgagaggccgaggtgggtggatcacctgaggctaggagtttgagaccagcttagccagcatggtgaaaccctgtctctaaaaatacaaaaattatctaggtatggtggtggacacgtgtaatcccagctactcaggaggcggaggcaggagaatcgcttgaacctggagggtggaggttgcagtgagccgaatcgcgccactgcactctagcttgggtgacaagtgaaactccgtctcaaaaaaaaaaaaaagttactttgctctccaccctttgttcttggaaggcagagaccctgccttttgccctcatacttcacaccaggcagccgcttgtgccgaccacacttaatatgctgagtgccatgggggacagcacatcagcgggtgttckgatgtcttgtgagaactgtgacaaatttatgttgagtaataactaggtgytggcastgtattgtgtcatttaatcttcacaataacacagttaattaggtcccaccgttttctgaatttcatcaatgaggaaatagcagcaaagaggaggtaamaaattyggtgcaggtgcttagcccaaagactaataatacatttcaaaatgtgcttacatttattgtgcacttactatgtgccaggtgcaacgctagccctttgcacgagttgttccattttaccctttctctgatcctttkaggtagattctagtattaccttcctttttcagaagaggagaccaatggggagcattggaatgatttggttgcaagcatactacacwacttgtaaactgcagrcacaggcttaaaaaaagtgaaaaactaaccatgcaataaagaatggaatgaaccatgaagctgtttctgtggccagtcatgtttttgaagcatatcccatgctaatttctagaacagaagaaacacacgtgttcttgtgtgtaaacccagtccatggaagagaccgtctgcttgtccctcctgatctctgggcccagacaaccagtagtcaccattccaagtgaggggtggctgcaactctacagccccgttcgtctctcctcactgtcaaagctgctgagaccccagactcgacacttgaaagaaacccatgtctgtgaagcacttgtggaccattcaagattgtggaagaatcactcaagagaaggagataggtgatgggatctagcttctgatggtttctattttattgaatgtctaatagggcaagaatttgaaaaacgagaatgtttgccatgcaggaggacctgggaaggagataacacatttacagggagaaagattgggattcagttgggaggagtaactgaggaaaggggtcactcaaaatattttgtattttaggtcctttttctattaaggaggaatggattatcaaagccttaacattaaattgtattgtgtcaggtgaattgctatggtttgaatgtggtgtgtccccctcccaaactcacattgaatttttttttttttttttgagacggagtctcgctctgttgcccaggctggagtgcagtggtgcgatcttggctcactacaagctctgcctcccgggttcaagagattctcctgcctcagcctcccgagtagctgggattacagatgttcgtcaccacacctggctaatttttgtatttttaatagagatggggtttcactatgttggctaggctggtctcaaactcccgacatcaggtgatccacccacctcggcctcccaaagtgctgggattagaggagtgagccactgcacccagcctcacgttgaggtttaattgccattgtaacagtataaagatgtgggacctttacgaggtgattaggcaatgaggactctgccctcatgaatggattaatgctgttatcatgggagtggattccttataaagggacacgttcagcacccccttgctctctctctcaccttccgccatatgatgatggggcacaaaggccatcatcagatgttggccccttgttctcgaacttcccaacctccagagcagtaaaaaaataaatcactgttctttacaaatggcccagtctcagatattctgttacagcagtacaaaatgaactaagtcatgaaacctaagatttacatgatttacagcagtggtccgcaaccttttgggcagcaggggctggttttgtggaagacaatttttccacagacccggggggcagggggcaaagatagtttcgggatgaaactgttccacctcgtattatcaggcattacttagattcttataaggagcatgcagcctagatcccttgcatgtgtagttcacaatagggttcacactcctatgagaatctaatgctgccactgatctgacaggaggcggagctcaggtggtaatacttgctcacctgccactcacctactgctgtggggcccactgcccaacaggccacagaccagtaccactccatggcctggggatcggggactcctggtttagagaattaaaaagatggaatttaacatttagctcattaagagcacatctcttaagccaaagtaaggcaattatccatgtggttcaggcaaaagttctatacagttttaaacaaatggagagattttctggttgcaaattagagacaacttttctctcagagcccaaagggtcacaaaaattagaataattaggctagaaggcctcttagtgacattttttttctggttgaagaatactatgaagtatttttctaatgcacagcatacttttagtcttatgttgaacaaaaataataaaccctcaaaaaccatgactcacttggctgccttagtagtaaagcatatcttgtcttactagggtccctttaaaatgagatgaaagggactaggaaaggaataagaatattgtggcattctttccagagtaattttgttgaagtctcatcagagttttcaattttcccacaatgtatattttaacacttaaaagtacattagaaaaattgcagaatcactttaattcaatacttttatttttagaacacttaaaaatatttttcaaatacacttgataaataatttaataaatataacataaataaatataagttagctcagatgctttcatgattaccaagttatataaataaatattttaaaataagttatgcttacatgtttgtttccacaaacactttggtacagaaatagcttataaatatttgcccttctattaaagtgaatgaaaaacaccttcaggatggatattttcccttcttagcaattcattcatgaaaacttaaaaacaatttatccacagtaaatgtcaaaaatacttgatcagaggtatcatgtggatgtaatagtcccatccttctttccccctccctagttcttaatccacatcctatcaaagtttcctcatttcaaagttttataaaaatgacaacggtttggagggacctcgctttttaggaagcattcagatagctcatcactctatcaatagtcactgcccgaattctgaaagcatgaagaagtatgcagagcttgattttagttttataaaaatccggttcttcaagggaggatttttgtggcacagtctcactgttgaaattcagggcctaggagaatgaacagtaagcatgacttacatggtattccaaaattcaaatattcattcataaaaatgagtgaagccagtacatgtctcagagcctgcaactcagtcccttatgccactcctaaacccaatccaaatctactctcagccagatcaccaggcagaatgagaaaagaaatactcattttccaagcacatccatcttcaatgagctctgaaaagacccttaaaactatttagaaaaaatcatcagtgggagttgtgtcttagaaagaaacagttcctttaaaatgacatctgctgcaatatctaattaattttatatatgttacattaaaaagcccacttctgtttagcacagggaggtgatggattgctattgatcagaactcactatcagtaacaggcctgtttactgaagacatgccatttgtgtcagataaacctggcaatgaatttcccaagtttagcactttgatttgataacagaatataaaaccttacatttgcacccttgatgaataaatactttcatatcttcctcacaaaaagtctaaaagaaagctagaataaagtcaccccattttatactggaggaaactgaggcacagaggggttaagtgacttgggaatagttgtctggttactggtagaattgattctagcacccaaatcacccaactcttggtcctaaaaatgaaatagcaactacagctctctagatgctaacattctttgatacttggatgaagctcattgcctttcaaacaagaaatctggcacatgcacacacacacacacacacacacacacacacacacacacacacgaaaagaataaaagtaaaacaattacttttcagacaatgatttctgccaccatatttttatcccatgtcctcgtcaccaaagcagtcaccctcgcttatataaatatttgttttatattagcatctgtgttatggtgattcagaacataacaaagcaagttcttgcctatgaataacattatagatgccccagatgataggtcattcttttatttggttcacattttggttcacaatgggtcataatcaggcaccaatcttgcttgtttcccagcaatatttgcagatatgcaaactggccccttgcatgcaaatcctggagcacgtcctggagcctttagaggtgagtgagaaggtaagtgtagtgaaatcctcttgaaggattttaagaggcagagcctcagacaagtggtttaactctcctaaggtttggttccctcctttgtgcagatcccatatggttgttttgaggctgacataagaaaatgcacaaaaacatttgccgagtgtgggggataccacagagtgaatactttggagtctgcttttcataatgtgatctgctcacatttgtgctccctatagacggcaccctcaaggctgtcttcttgaaaatgtaggtctgtcaggcctttaaaaggcctccagacctctttttatatctctttatcaaagaccctggctggttatctttagcatgaaaaaggtgctctcactgatagaatgaagtcttacctgcatcagctcatcaataactgccagcatgttttgatctagaaagatctgcctcttaggatccatcagaagctttgcattcatggtcttgaactccacctggtacatcttcaagtcttcataaatactactaaggcacagggcctgggtgacatgacaagatggggaagtatccattgagatgggctaaaaacatttcccccattgcatttgaggaaagagctgtgtgtcttaccatcataaaagaggtctttctggaggccaggcaactcccattctagaggaaaaaataatcagacatcagtgatatgaattcatcatacaggctgaaacttttcattttttgacttacagttatgaaagaggtctctctggaatttaggcaactctcattctagagggaaaaaatcatatatcaaagtattaattcttagtataaatctttctgactcttcaggtctcaaattttttttattatggtaaaaacacatatcataatatttagcatctgaactatttttaagtgttaagtgtattcacattgttgcaaaaaaaaccattttttaaaaataatttttctcccaaatctaacttctgaagtaggaccagttaaaatcccataatgatggataccagaaacgtgaatttttagaagcaggtgagatttgatgcacagtttttaaccacactgcatgctctgggaggaaaatcctttataccttggttaattccaatggtaaacaggcctccactgtgctggttttatcttttgtgatatcttcatgatcaatctcttcagaagtgcaagggtaaaattctagagtttgtctggcctataaaaaatgaaggagaaactcagtttataacattgataatgcacctggcaccccacaaggctggtaagccagggtgccaggaaggctccggctggctgcccttgacctctgtcactttgacttgcaggaaattctggttcttcataatacaaaagaaaatagattccttacattctgtctctcaccctcctctccctaagcttggggcatgtttctctggattacatattttttcattatgtaaacacaataaatcatgtcaacagcctgtgctaaccagcctccacacctcactgtgacacttgcttctggtgaaaattgtttcttcttttgctaaagtgactgtattctatgaatacctatttcaagtataacttctaaagggggaactgttaaggtcacagtttgatggatataacaaacatgcaaacccttaagacaagctgagatttaatttgcagtgcacacacgcacacacatacacagagatgtcatcttagtgtgttggaaagcaccgttgggtaaaattatgaaatgtatcttaggaagtaaaggactgtatgattgaagattacgatcatttttccattcaacagcctaatgggtggcaggcactccattaggtactaagaacatgacagagaagaggaccatgtataccctcctggattgcaagtttagctgctgagacagacaattgcccaaatgaccaggaggcatcagtaggtgagacatggtgagaagggcatgaagcttctgaggaggggcaggaagggaagcaaagcttcctag

SEQ ID NO: 5751 - DNA, 27954 bp, Homo sapiens
gtgggctgtccacgcctttaccattttcctggttgttaacatgttcctgatcagcactgggtgctgtcccaggtgctgagaggattctcccacaatgccctttgctttccccatcagagggtttatggcacccaattctcattcacattctgtctctcctttctcgttcttctctatctctcctctctctgtctccttttctcttcctctctccctctctgtcttctctccctctctcttcctctctctcttcctctgtcctcttttctctctctctctccctctcacatctctctttcccttcctttctctttcctctctcttcctctctctccctctccctccttctgtcttcctctatccctctcttcctcttttttcttcctctcttcttgtctctttctctcctctctctctccctctttctctttctctctctcttcctctcccttcctcttcctctctctcctcctttcttcctctctctcttcttgtgtgtgtctctctctctctgttctctctctccctctccccccaactctctctccctatacacatcttaagaggcctcagcagtgtaaggtaagtttagcgaccctgttgctgtgtagagataagcaaaggggggcaaggagctccagtggtcccagactccagccatttgagtctttgcagcccaagcactgccccagcttcttgacagccccagccatcaccaaagggcacacagataagctgcctccaccaaggcctgtgcagatggtaggtttttgagtaaaatagatacgatccttgtctgaagccactgagttttagaataatttgttatatggccatagtaaccggaatgattgctgtaggtttattttattttattcatccttgctgcatgcaacacatgcatggctcagtaactagaaggaaagaagagaagaagggagggagaggcagagggtggacaggagaggatggtaggaaggaaagacaggaaaggagggtgttggtggccttgcctgcaagctgagcagacaccacgcaaacaggtgacctcccagttaagatggaggggactcagggctcaggaggggcagaaggtccccgtgtcggaaagctgggcaagctttctgcaggaaatgatggggatcacggccatgtgagccggcaagatttccctcagccagggaggagactccgggctgtgggaacagcttaagcagaaggcatgggacaggaatgcatatgagagatattgtgggaggagggagggctgcctgggctggcatgcagggtatgggaggggtggaagggctgaggcgggagccatcagtaaaaggacccagagcgcggctccaatgccatggtaggaagcttggcgttgactcagagggcgctgggtaccgctgaagagtgttgagccaaggagggtcatgtcacgggcagatacatgttttagaatttcttcttttctggctgagatgtagagtatggactggagagaagcacaggggacataggaaaggtagttctagaaagaggggctgtcccaccagggaaagtcaaccaactgttccccagtatccattcctcccttccagctcatggcactaaagccactgattgattagctgggtgctatcaatctctctctcatctctctctccctctttctctccccctcatctgtgtcttttctctctctcatctctctgtctccctctttctgtccccctcctccgtgtctcctctctctctcttctctgtctcatatctctctcattgctctctccctctttctctccccctcctgtgtctccttctctctctctctttctcccccatctctctttctctcccccttcctctctttctcctctcactcttcctgtttctctctttctctttcttcctctctttctccctgtctctctcttcctcttttcctttgtctctctctctccccccaactctctctccctacacacatcttgagagacctcagcagtgtaagataagtttagctactccacggcctggcacggtagctcacgcctttaatcccagcactttgagaggccaaggcaggcagatcactggagattaggggtttgaaaccagcctggccaacatggtgaaaccctgtctctactacaagtaccaaaaaattagctgggcatggtggcacgcgcctgtagtcccagctactcggaaggctgaggcaggagaatcgcttgagcctgggaggcggaagttgcagtgagccgagaccacacctctgcactccagcctgggtgacagagtgagattctgtctcaaaaaaagaaagaggaggccgggcactgtggctcaggcctgtaatcccagcactttgggaggccgaggcatgcagatcacgaggtcaggagatcgagaccatcctggctaacacagtgaaaccccgtctctattaaaaatacaaaaaaattagccaggcacggtggcgggtgcctgtagtcccagctactcgggaggctgaggcaggagaatggcgtgaacccgggaggcggagcttgcagtgagccgagatcgcgccactgcactccagcctgggcgacagagcaagactctgtcaagaaagaaagaaaagaaaagaaaaaaagaaaagaataaagggagggagggaagggaaaggaagggaaggaaggaaggaaggaaggaaggaaggaaggaaggaaggaaggaaggggaggggaggggaggggaggggaggggaagggaagggaaggaaaggaaggaaggaaggagaagggaagggagggaagggaggggagggggaaggggagggggaggtgaggggaggagaggtggaggtgaggggaggggaggggagggcagggggacgggaggggagggcagggggaggggaggggaggggaggggaggggaggggaagggagggaagaaaggcaggccctgatgttcagggagctgagagtgaagtcaccggctccaacccaggatccaaactcaagtctgtctggggtcctatccccgtcaccaccccccgccccgacccatcccccagagacctgggaaggagccaggctcctccggtttcaggaaagggctgcacaaaccaccccgccacgatccctcccagagaacaaacagctcccggccaccggcagtctccctcctcctcctgccaggctggttcccagacccaccctccctgtgtcataagcgcctctccccgcactctcaccagggctggctgttctcagaggaacgcccaggaaaaacctacccgaacccctttcagctgggaaggggacccgcctgggcttcctcaccgccgatgagacctccctcgtcgtacacttagagctgcctgtgttttccttccttccttaagcgggctgggaactctagacactcagggatgggccagcccattagagtaagcattcggccacctctaggctgctacggtcactgctgctgtcaccatcaacgtgactgtctcacacctcacttcctccggccagccacacccctgcagatttaacccgccagcctccctaaggtttcctctgcctgaaatcctctctgcattcctggctcattctcgaaattgaggtcaaagctcagatgccgcctccttccctgaccaccctacctgaagcagccgcacctgcctgctcctagtcacgccgttccttcacctgtttcgtttcctccacagggtttaccacaatctgaaagtcttattcatgcaggtgtctacttgtttatctccccaccacacctactaggatgacaatatcacaagggctggggtttcatctgtctcctcctcctctgtatctccagcacatgaaacatgcttggcacactgtaggtgcttaagtatttgctactacatcactttgggattttgcataggacactcccaatgcttagaatgtcaatctttgcttcattgtccttggcaaactcctattcatcctttgaaaccccatccatttatcccttaaccaggaaaggcttctgtgcctcatacaaccacccataaagctggattagggctttctctggggacacccttgccctgtgccacacttccattagcgcacatatcccccatgaattgtgcacaccagcagggtctagagtacggcacacattttgtctcaggagctacgtattgaataaataaattaattactttttttgagacaaggtcttgctctgtcacccaggctggagtgcagtggtgcaatcgtggctcactgtaccttgacctcccaggttcaagcaatcctcccacctcagcctcccaagcagctaggaccacagatgcaggccactatgcctggctaatttttaattttttttttggtagggatggaatctccctatgttgcccaggctggtttcaaactcctaggctcaagggatcctcctgcctctgcttcccaaagtactgggactataggtgtgagacgccacactcagcctcattatttaatatgtaagtagctatatctctctgagacccagccccatctaatttataacctccctccttctcaagaacatgcctcagctcccattgccagggaatctgacctttctccttgtcataggattttttttttttttgagtcagaatctcagtcagtcacccagcctggagtgcatggcgcaatggctcgctgcaacctctgcctcccgggttcaagtgattctcctgcctcagtctccctagtagctgggactacaagcgcacgccaccacacccagctacttttgtagagatggggtttcaccatgttggctaagctggtctcgaactcctgatctcaagtgatggcctcccaaaatgctgggtaacaggtgtgaggcaccacatccggctgtcataggaatttgtcagcaaatcctacagactagaggatgtgtgttgggtggtgtgggggtggggataacggaggagatggggggtgagctcttcaagccccaggggagaattctgttccgttcctgggacatcccaggtgagagggaagaaaggccagccccccaagacagctatcccagactgggacagaggcaaaccctgaccacagagccctgtcactcacccaagaacaggtgccaatgacagaatagccaggccgaggggggagagaggtgcttcggtgatggatttccctggtgacttgccaagacagggctttactgcctccgccctggactggctgagtcagactgtgcaggggtggacactttgactggtatttgggaggcatttgctgtgggttacagagagggaggggcctcctttgcggccagagaaggaggaaagaggccctgggccctgggacttgggacttgggtggaggctcgggtttcggtctcacctgctgctccagaccatggcctggagggccgcctgcgccacccccaaagcaatgagatagcccctcctccctcagacccaggagtccaggcccccagcccctcctccctcagacccaagagtccagaccccagcccctcctccctcagacccaaaggcctcggacccataccaaatgcttctatgagatagttttctccccttgttcatgaagaaatgagcccaggcccagtcagatctgcatctgtgtcacagcccagggccactgtaaccttaggctactgacttccctctctgagcctctgttttctcctgtcaatggggcaaggggtctgctccttccctcaaaccccaactcaggtacagtcaagcacagaaaatacttgtggcatgaatgtgatgagaacacagaattgcagaagccaaagaaagagaagcgtaagggccctccttccacccctacctcccccacccgctgctacacgcaccaggaccacctgctgggtagccaggagctcacagtctagccccgctggccacccctgcagcccccatccttcactcaggcagttgcagggcccagaacacccctatcttctaggattgacactggctgtcaaactcatccttcaaggtgattcctrgcctgccctcctcctccaggcagcctgtcctcctcctccaggcagcctgtcctgaccctcagcagcctctcctggccttggcagagcccctcgtgtcctcccttgcagcacgcatgggaagaaaggccatcgtcctcgccattgctaacaccagccttgcgtttcctctttgccaggtactgtattgacaactctctataacctgactttatcctcccaataagctgggtgtggtgggtggctcatgcctgtcatcccagcacttcgggaggataaggcaggagtatcacatgagcccaggagttggagaccagcctgggcaacataaggagactctactatatatatgtgtatatatatttatatatagtctgagatgggaggatcaccccagtaggtcgagactgcagtgagctgtgattatgacactgcattctagcctgggccacagaactagaccttgtctcaattaagaaaaaaaatggggataataggacccattccataggatgtggtgaggattatgcatmcacacacacacacacacacacacacatttatgatgtactgagaagatataagcacacaataagtatctccaaaattatcaagtggcaaagccaggattcagacccacacctgcccgaggctctctgccatcagaccacactatatctctttctctctgttccttcatccccatcaatcgaaggcaaaaatgtgccttctctgatttccagsctcactcagcatagaccgtggaggcaacatatcttgaatgaagcaacaaagcagtaatgcacatgaatgcaccaaatgccaaaagctcgtttactcaacaagtatctctccaacactttctatgtgctagacccaattctgtgtgctgcagattaagtggaggactgatcacacaaaaatctttgcccttgtgaagcttgcattttttttttttttttttttgagatggagtcttgctctgtcacccaggctggagtgcagtggagcaatcttggctcactgcaatctccacctcccgggttcacgccattctcctgcctcagcctccggagtaggtgggactacaggcacccaccaccaagcctggttaattgttttgtatttttagtagagacggggtttcaccatgttagccaggatggtctcaatctcctgacctcgtgatccacacgcctcggcctcccaaagtgctgggattacaggcgtgagccaccacacccggccgctttttttttttttaagatggagtctcgctctgtcacccaggctggagtgcagtggcacgatcatctcggttcactgcaacctccacctcccaggttcaagtgactctcttgccttggtctcccaagaagctgggattacaggtgtgcaccaccaactctggctaatttttttttttttagtagaaatggggttttatcatgttggtgacatggtgtgatctcggctgactgcaacctccacctccggggttcaagcaattttcttgtctcagcctcccaagaagctgggattacaggtgtacaccaccacccccggctaattttcatattttcagtagagacgtgctttcaccatgttggccaggttggtctcgaactcccaacctcaagtgatcaatccgcctcagcctcccaaagtgctgggattacaggcatgtgccaccgtgcccagcctgtgaagcttgcattctaacggaggagacacagacaaaatgaaccaggaacacagtgggtaagaaggtgaaaagttctccacacaaaaatgaagtagggagagaggaaagagactacaaagaagttgggttgccgggggcggtggctcacacccataatcccagcactttgggaggccgaggcgggcagatcacgaggtcaagagatcgagaccatcctggccaacatggtgaaatgctgtctctactaaaagtacaaaattagccgggcgtggtggcgcgcgcctgtagtcccagctactcaggaggctgaggcaggagaatcacttgaacctgggggggcggaggttgcggtgagccaagattgcgccactgcactccagcctgggcaacaagagtgaaactctgtctcaaaaaaaacaaaagaagtcgagtaagggatgccgccatttgaaacagggtggtcagccagtcctctgagaaggtgacattcaggcaaagaccaaaggaggcaagaaagtgaggcatgagggtatctggtagaagagcattccaggcagaggaaacagcaagtgcaaaggccctgaggcaggaccgggtctggatgttccaagagcagcaaggaggccagtgtgctgacacacagaaggaagagatgagatcagaatcacgtcccttaaggccttgcaagatgtcagctttttttttttcttcttttttgagacagagtctcgctctgtcgcccaggctggagtgcaatggcgcaatctcggctcactgcaagctccgccttccaggttcacgccattctcctgcctcagcctcccgagtagctgggactacaggtgcccaccaccacgcccggctaattktttgtatttttagtagagacggggtttcaccgtgttagccaggatggtctcgatctcctgacctcgtgwtccacccgcctcggcctcccaaagtgctgggattacaggtgtgagccactgcgcccggcctgttttctgttttttgagrtggagcctcgctctcttgcctaggctggagtgcagtggtgcaattatcggctcgccgcaacctctgcctcccgggttcaagtgattttcctgcctcagcctcctgagtagctgggattacaggcacccgccaccacacctgkataatttttgtgtttttagtacagatggggtttcaccatgttggctgggctggtctcgaactcctgtcctcaggtgatctgcctgcctcggcctcccaaagtgctgggattagagatgtgagccactgtacccatgcaagtttcttaacccttctcttcctcattttctcatctgtgagacgaagacagcctcccacccagacacactcccctcacggggctctggggagaaatgatgtggaaagctttgctagtaacctctacagcatggagggagttctggaaaagtgatttcagaaaggtgtttatgcctggaaagcctgttcatttttgtgatgtccttggagctgggccaggcattatcgagctaaatcttagcttttgtcagaataggggggtcattgagggaaatttccaaaggaaggtggaacgggatgggtggggaggtaagggcatgagcagaggcagtgatcgtgggcaggaggtgtccatagaagacgggctgccactggccctggagacagaaggtcagccccgggttcaaatccctccttaaccaagtgctgaaatggacaagttgctcaacctctctggccttcagcttcctcatctgtcaagcaggaatcaaacctcgaacttcctcccgctgttagaatttcaagggagttttaaagacagagctttcaactctgacctgtgaacaagtgtgacatcaaatgtactgttcgttgctattattctgttgctacaaggcagacagttagtttcccagctcccctgcagtccccccagcccctcctagatctgtctgccagccccgccccggggtcactccagccaggctgtgccaggtgaatgctcaggtatgcggaggcggaggcaggacggccctgggagggagcaggaggaggggccggcagcctggaagggaaaggacagcggagagcagggcagagcctgagcaggcaggtaaggagatccgggtcaggagagaagggggctggggcttgaccaatgggtctgagggacggggggactggggtctggactccagggtctcatggaggaggggctgggggtctgaactcctgggtctgagggaggaggggctgggggtctgaactcctgggtctgagggaggaggggctgagggcctggattcctgggtctgagggagggactgggggcctggtctcctgagtctaagggaagaaggattgggggcctggactcctgggtctgagggaggaggagctggggcctggactcctgggtctgagggaggagtggactggggtctggactcctgggtctgagggaggaggggactggggtctggactcctgggtctagggaagagggactggggcctggacttctgggtctgagggaggaggggctgggggcctggactcctgggcctgagggaggaggggctggggcctggatgcctgcattgagggaggaggctggggtaggaattagaggctcctactggccaggccttcacatgtttgctggctcccagggcacctccaggtgggcaggagctaccactcagcaccatgagcaccgccacagggtaagcgcccccggaccccaggtcccagccccagcacgcctcccgcctcccctcgcctcctcacccacacccgcttgcggcagcccagactgtttgcggcggcccagactctggcccaagccccgacactcaggaggaagccagagcctctctcctccctgcccagcctggggttasgggcccccactgcagagcagacaggcctgagctccagttcggccctcacactcagtgctgatgtaaccctggtcagaggacatcacctcctggagcctcagcccctcctctgtgacacagggacaatgttgaaaaattggagggatagtgcattacaggacttagctgaccacctcactgacagcaggtgctcaactcataggagtcgctattgcgattgttatgttgttagtaaatattaaccctttgctagaaaatcagggctgtttataatgaagactcaagtcccccagagtaagcagggagaaaaacaatgagagatgagtcaaaatacctgcatggtaggtagtgagctctctggcccagaggtaatcaaattgtggtgacatcagactggcaggagcrggatgaggaacaggagtttgggaaaaagggtttttcagttcccctgacgccacctgatcgctgagcttctgttatgtgcrtgcaagtggggattcaagaattcttaggaaaggtaatcttaggaagaaattgaggacgggaggagacagagaaggatgtggttgggaagcacctggcccatgggagtgggaggggaagcagataattccctgtctacttcagataccactaatgctattrtaaccattcccatttattgagcaacttctgtgtgctaagccctggcagcatcttaagaatgataataacagttaytgaggcttcaaaatacttcacctgcatcatctgactgaatttgcccaacagccctaccagatggttactacgttacagaaagaaaaactgaggcaggagagattaaatcctcttctgaaggtcttatggcaaggaggcagtagacagagggtttgaatcccggactatgccatggtagagatcacactcccctaccacccagcaccaccgcctgacctgacctgtcttttttttttttttttttttttttgagatggrgtctcactctgctgccaggctggagtgcagtggcacgatctggactcactgcaacctccgcctcccaggttcaagtgattctcctgcctcagcctcccacgtagctggsactacaggcgcccrccaccacacccagctaatttttgtatttttagtagagacagggtttcaccatgttggccaagatggtctcaatctcttgactttgtgatccgcccacctctgcctcccaaagtgctgggattacaggcgtgagccaccgcgcccagcctacctgtcttcttaaagtccagctctggctctgagctctcctgctctaataataataataataataataataataataataataacccttccatcgctccccattaccttcgtcatgaagcccttgctgccctgcttggcatttccacaggatctgcccccagtcccacagtctctctcwttcctcttttcttcaccagcccagaagctgccccaaagccaagcgccaagtctatctatggtgagcggggggcaagggagccccaggcccatagaactgggtctaaagaaacaggacctggcatccagggtcttggaggaggaggggctgggggtctggactcctgagtcagagggaagaggtgctgggggtctggactcctgggtcagagggaagaggggctggggggctggactcctaggtttgagggargaggggctgggggyctggactcctgagtcagagggaagaggtgctgggggsctggactcctgggtcagagggaagaggggctggggggctggactcctgggtcagagggaagaggggctggggggctggactcctgggtcagagggaagaggggctggggggctggactcctgggtcagagggaagaggggctggggggctggactcctgggtcagagggaagaggggctggggggctggactcctgggtcagagggaagaggggctgggggtctggactcctgagtcagagggaagaggggctggggggctggactcctgggtcagagggaagaggggctgggggcctggactcctgggtcagagggaagaggggctgggggcctggactcctgggtcagagggaagaggggctgggggyctggactcctgggtcagagggargaggggctgggggsctggactcctgggtcagagggaagaggggctgggggcctggactcctgggtttgagggaggaggggctgggggcctggactcctgggtcagagggaagaggggctggggggctggactcctaggtttgagggaggaggggctgggggcctggactcctgggtctgatggaggaggggctgggcctggactcccaggctcattctctttctcccctggcagagcagaggaagcgttactccacagttgttatggctgatgtatcccagtacccagtcaatgtgagtctggggtctgtgttcccccaggacatcttctggggcaaaggtggcctcaggagatagggcttttgaaagcagctaggcccccaagcaggaagcatgtggaaagtcagtttgcccatccataaaatggacctccgttgcctcacctcagtcatggatatgaagycaggrgcctcgggtccacttaatctgccagcctttcctccaggccagctgttgtgctggacagtgggaccacggagrcaaatcaagacacagccctgcatgaggaaggggtagacaaggtccagaggaatccacagaggcgcctggtgctctaatggaggtggcagggggcatggcrggagacccgaggaggcatttagaaggagagagctatratccagactccttccctgcccgcaaggagcctccagtctgtgagaagccagactcaggtgctagtcactctgatgaaagggaaacaaagggcactgggaggaggagctgatttgtggaacaggtgatcaaggaaggcttcctggaggaggtgtggttagtctcaggctgaaagtctgattattctgggggattctgagcccacctggcatcatcttgggcctcactgctttctccatggtccgtaccagcacctggtgacgttctgcctgggtgaggacgatggcgtgcataccgtggaggatgcctccaggaagttggccgtcatggatagccagggccgagtctgggcacaggagatgctgctgcgagtgtctcccgaccatgtcacgctgctcgacccggcctccaaggtgccggggggcacgtgggtgggaggagtgtctggggcagggacttcagggggtctgggtgtgaatcttggctcctgcacgtccttcctctgggaactctggcgagggaccccagcccccttcttgagccttaatagcctcatctattaaacagggctgttatccctaaccccctaaccgcctgaggttgccctgacctgctggcccacactcccgtcgccatttagtagtaccatcatttcggggcctcagtttaccccgccatcccacccggcaggaggagctggagtcgtacccactgggcgccatcgtgcgctgtgacgcggtgatgccacccggcaggagccgctcgttgctgctgctcgtgtgccaggaacccgagcgcgcgcagcccgacgtgcacttcttccagggcctgcgcctcggggtgagcagatgggctggctctgggggtggagctggaactgggcggagcctggagccggggcggaaatgggtggggcctctaggtggggcggggcctggggctaaggcgggatcagagcaaggaagggcaggggacctgggaaggaagttctggaaggcagtggggtttgagattggacccagggtcaagatagaacatgaaggtgggatgaggacatgaacagaacatggccaagaaggatctgggggagcagccaggacgaggtgggggcgaggaaccacccggactgggtctccatgggcggggtcgtggcttagggcagggacaggtgtagggcgaggggtgagttcggggcgtggacgtgcgtgggttcacaggtgtgaacggtagccgcacgtgggctgggactgagctgaaaaatcgrccaggggcgaggcccgggtaggaagtgggtgcggcgtggggaggcgtggcctgacggtgtgattggcaggcggagctgatccgagaggacatccagggggctctgcacaattaccgctcgggccgcggggagcgcagggcggcggcgctcaggtgagagggaagaagttggcagggtctctgggaagccggtttcccctccttgtgcctcagtctacaacaccagcctggaacagaacaagagttttgcatggagtcaagcacaccctagtcgagtcttgtctgtacctcccagacgagctgaccccttctccagaactctgcttcttttctctgttccctgtccaggccctcagtttcactctagagaggtgctatccctccgtatatcggatttctccctacctcgttgaacttgttcactccctttgagccttttgagcctgtgtgtctcgttctgcgccctggatttccccctccctggacccctcagtggacccagtcttggtgtccccgtcgccctccgcagggccacgcaggaggagttgcagcgcgaccgctcgcccgccgctgagaccccgcccctgcagcgccgcccgtcagtccgcgcagtgatcagcaccgtagagcggggcgcggrccgcggacgaccccaggcgaagcccattcccgaggcagaggaggcgcagaggcctgagccggtggggacctcgagcaacgctgactcggcctccccggacctgggtccccggggtcctgacctggcggttctgcaggcggagcgggaagtggtgagccgctaaggaaggggtctgggggcagggccaggcgactggaggcggggctagggcgtggaagggcggggccggctgcgggacgggcgttctctggtcagacttctgcgttatggaagaggggctgggtcgggggcggggcttggttgtggggcgtggccaggtgtttggggcgtggcctgatctggggaagtgtataggtgctcaggttcagggcttcgacggggatggttttggaactcgggagccctgagcgtccccctcctctgtcccctaggacatcctgaaccacgtgttcgacgacgtagagagctttgtatcgaggctgcagaagtcggcggaggcggccagggtgctggagcacssggaacgcggccgcaggagccggcgccgggcggctgggggtaaggggcaccctggcgtgggatctgaaccccctcccgatctcttccaaatgtccccgctctccccaggctctcccctcccgccacttgccagggctgacctcaccgccatcttaaccgggtgtccacctctctctgcctgcctggtgctggccccgcgtccccatcgccgcscccgtctgctcccctcagagggcttgctgacgctgcgggccaagccgccctcggaggccgagtacaccgacgtgctgcagaagatcaagtacgccttcagcctgctggtgaggacgcgcccgcccctgggccggggcgcgggcacgacgaacctgtcccgtccccgcacccacgccaaccacctccctccccacgccccaggcccggctgcgcggcaacatcgccgacccctcctctcyggagctgttgcacttccttttcgggcctctgcagatggtgagacccgccccaggccctcgggcccccctgcagcgggaggaatcgggttcgacttgtagaaggtgtggcggcacagcctgcccctcctgctcccctgacagattgtgaacacgtcgggggggccggagttcgcgagcagtgtgcggcggccgcatctgacatcggatgccgtggcgctgctgcgggacaacgtcactccacgtgaaaacgagctctggacctcgctgggggactcgtggacccgccccgggtgaggggcggggctgggaggcagggggcatggtgattggaggagcataaggcgctgggaggtgggtggcatgatgattggaaaataggactaggagagtagggagggrttagaggcgtggcttagttgtgttggggcggggcttaggacagatgccaagattcaattggaggaaaggccaggaattaacgtgaaggaaagatttaagaccaccagaccaatcggattgaaagaaaaggggggcttaaaggaatagaggggctaggggctacggggcaggggcggggctacgcgaaggggcggggcttctggaaggtttggtctataactttggtgatgggacagagtctgtgcactgcgggctggcagttccgcagggaaagggtcagaacctgaaaccgaccttacggaaaacctgatttggaatcaggtgagatttagaggctggataaggcaatttttttccagagagagagatggatggggtctcaatattttgcccaggctggtctggaactcctggcctcaagcgatcctcccatcttggcctcccaaaatgctgggattacaggcgtgagccaccgtgcccggtctagaaatataaattgctgttgagttgggcttagagctaccggcaggacttggtgaaaagtggcggggctagaatcgttggaatacagcgagctttaggggaaaacttagtgaagttaatgcaggaacgaagttgggggctgtatcaggatccctgagctcttggccctgtccctggccgcaggctggagctgtccccggaggagggacccccatacagacccgagttcttcagcggctgggagccgccggtcactgacccgcagagccgcgcctgggaggacccagttgagaaacagctacagcacgagcggaggcgccggcaggtgacccaagcgacacagcagggccgaggctgggaagtccsggggcgcggccggtccgcctggccccgcctgacccgactgtcttacttcctacagcaaagcgcccccsaggtcgctgtcaatgggtgagtgtccgccccagggcagggcaagggggtcaaggaggggtgcgtcccgggggctcccgatgctgactccgccccctttttttctgtgtttttccttctgtcttcctggctcttctcaggtgggtgagatggtgatggggcgggccggggctgggagagagggaggagcagggtgggagggggcgggacccagacttctggggctaagggagttgggaatggagacccggattcctgggcctaagggaggaagggggctgggagtgggtaaagtctgagaggttggatycctggatccccaaaaggctggaagaagccagtttgttttcccagggcctgggaagcaccatgcctgggctccctaggaggacagagccctggatattggaggggagaggctggggaattggacctttgggttttgaagaagagcccaagtctggtgcttgggatcctggagacccagaggagcaggcttgggacttcaagggcttgggggcaagtttctgggaaagttaggaagtggtagtatctctgggcccccgagaggggtaaaggctggacgattaaactcttggttttccagaggctctaatgcaattgtctaagtcgctgctgggtgtcggactgggttaaaaggtttgagggttaaaaggataagattgaagcttgagacctggactcctaggtccctgggggaggaaagaacattccaagtcatggttctaccaagcagtgggggctcagactctgggtcctgggggagggaaggaggtagatggactagaactctagggtccttgagcaaatagagggcagactggagggaagcaacgtgggaggagacgaaaacaaagcagtgaggctggaggagacaaaggggggtctgggtgagggcccgagcagagggtctcagcagggacagcgtgctgggagctgccggccccacacagggggtgccgcggccctgaagaccccccctctcccctgcacaggtaggcctgatccaggctgaggtccctcttattgggggtcagagctgaaatcccacccctgcccccagctgcctgatatcgcaaccctggtccctgttcacagcttcaagtcactttctccgagcctcaagttcttttttgcagggaaactgggaataatgattatccgttcccggaacagtgagaagtctgtggtgttgtaggaactagcagttaagggcttaaggctgtgaccaggttcaagttcaagtccagctgcctgcaaactaaggcagcattattcagacctgggctaccctggtcccgggctggcgatgccactctcttactctgtgacctttacatccctgtgcctcagcttcctcctctgtgaaaatggaggagatcatagggtctctgggggaggaagaaactgggggagagaggggagtccaaattcatggttctaccaaccgttgtcataaagatcaaattaactaatatacgtaacagaacagtgcccagcacacagtaagtggtacagaagtggtagctattgttttttgagacagtctcactctgtcatcaggctggagtgcagtggtgagatctcagctcactgcaacttctgcctgccaggttcaagcaattctcctgcctcagcctccagaatagctgggactacaggcgcgtgccaccacgcccagctaatttgggtattttttagtagagacagggtttcaccatgttggccaggatggtcttgatctcttgacctcatgatctgcccgcctcagcctcccaaagcgctgggattacaggcgtgagccaccgcgcccggcctagctagtgtttttattatgcttatgagttatgatatataaagcccagtgcctattagatgctcaataaatgacagctgtttctagctgtgtgatgtgggcaagtcattttctcgctctgagcctcattctcctctgtaaaatggaatcgatggtgggatagtacccactacatatgcctacagcacaatgccaagcaacggagggagcaaatatattcagtctgttattcttgtttcaaatttctattaacagtattaacccggcccctgctgtgcccccagcttggctctaaccccagctcacaccagcaccctgcagcccagagcaatggggctggctgcctccttatctccaaccctcccgcttctcctcagtcaccgagacttggagccagaatctgagcctcagctggagtcagagacagcaggaaaatgggtcctgtgtaattatgacttccaggcccgcaacagcagtgagctgtcggtcaagcagcgggacgtactggaggttagaggagcgggaggctgaggggcasgaattagccagccctagctgcagacaggctctgaaccctctgttctttaccacacccaggtcctggatgacagtcgtaagtggtggaaggttcgggacccagcggggcaggagggatatgtgccctacaacatcctgacaccctaccccggaccccggctgcaccacagccaaagccctgcccgcagcctggtgagccagcgcagacgctgggatcttgagggtggagaggctgggaccagatcctgggaacaaggggcgtggggatcagctgtcaagagtgctggagcaggtggtgactgggggttcaraaatgcatctccagaaaggggagaggctgggactctgagtcctctccctaacccaggtactctcctctccttcctttcagaacagcactcctcctccaccaccagccccagccccggccccacctccagctctggctcggccccgctgggacaggccccgctgggacagctgcgatagcctcaacggcttggaccccagcgagaagggtgagtggtggggacgccggctgcggggagcggtccttatccttgctttccaggcagagaaacgggggctcagaaagagcaaagggactcccgtcccattctggggacgctggagcgcccccccgccccgccctctggccccaggacccctcgccctgagcccgcactccctacctcccggtttcccgcctgcagagaaattctcccagatgctcatcgtcaacgaggaactgcaggcgcgcctggcccagggccgctcgggaccgagccgcgcagtcccagggccccgcgccccggaaccgcagctcagcccgggctcggacgcctccgaggtccgcgcctggctgcaggccaagggctttagctccgggtgagtggggccrgggccctctcggcgcgggttgatacggacgctgggagcggagcgttccgatcggccgggagtcggggggcggcagtcgtggagaccacagggagccgggattagcccgaagtgagggtctgtctggtagcaacacccaatggcaggctgtgattgccatgttttttcagactccgactggattccttagggaaatcccgtaccctttgaaagcaggatgcggccacgccccccgggtggcaacattgtgattggtgggtggggttcaggaggtgtcgggcctgcccccgctagagctagaatgctgttctgattggaccatcgccgggtgggcgtgacatgattgtccgggctggggcatccgccgaccggcctgaccgcgcccgggctgccctcgctcaggaccgtggacgcgctgggtgtgctgaccggggcgcagcttttctcgctgcagarggaggagctgcgggcggtgagccccgaggagggggcacgtgtgtacagccaggtcaccgtgcagcgctcgctgctggaggtgagccggaccgctggtccctgggtctgggtagggttgggatgacgagggctcggacgccaggacaaagcgatttccaccccgccctccaggacaaagagaaagtgtcagagctggaggcagtgatggagaagcaaaagaagaaggtggaaggcgaggtggaaatggaggtcatttgacctgccaggcgcccttcgcaaagagtgacgaggccccgtgggagaacggactcctcagactctccccaatagcggaagtcgatcttctgaaggatggccaatctgctccggccctggtcttcccccatcccggtggacagacttaacgatccttgctgcagtccctccggagaggatctggactggctgggagtggggagggcgtggagacagtctacggaaagcgctagcagacccccgagagggtgcagtggagccctgagcattgtaatatgcggcccagcctataaacagcctccgtgcttagcagatggtgtgccaactgctgtcctctacccggctaccagggggctcagaaacctgcccctcgacccagtcacagcctcatggaacctggaaaatgttccaccctctttggtttctctctgaaccctcctttccatccccagggtcccaaaccaggctccctcctgacctcctagccagcctagtccagcttgccccaccttcacgtttccctggctcgcggctgctgggcatgaggctttgtgtctcccttcccgcctcaccaacgttctcacttcattccttcctgcgtcctggccctgcccctctccaaacgctcccaagcgttcaacctctgaggtttgcacctgctgtctctgctggctgaaacggccattccctgcctggcgaactcctgttcagcctccctggcccagctcaaacactcactgtggggaagcctgccctcatccccgaagctagtttcccagcatccacttctccattttgtcccccacctcctgccacggccctaccaggtagaactggctgcctcccaagcatgccacagctttctggccactctttgttctgggagatggcagccaactgaaaacttcctaatccctcaagaactagctccttctccctctggcaagccctgtaactttcttttccccattatccaggtggctggtaaggtctgcttttctctggatcccactgttttccagactggatattctctgcctttgggaagaatggccctttctctttctcccctggctctgccttccccagattactgagggcctctgggcctctgggcctcaagcctctcccggagttgttccaacctgggccaccagatggcgccctccaagatgggaaaggatcagagagacgcccccccacccccaccccgccccccgcccttggggcaggcaggagttctcagtccccactttgccacctcctgcctggttccttctggttccttccttcctctttggatctccaagagtccttctcctatctgccccgtccctagatcctattcacatacttcccttggctccctatggctcaccggataaaaccaggccccagcttggcagtcacaggttgcccactcggctcaccagcttctccgaccacggggctcagcttccctcctcctgctgccaagcttggttcatgtggttgcttctgcccagaatactctcagcccctctaccacttgcccggggccccacccctcattcttagtaggggaataggaaaggtaggcaattcccccaaacctctttgctccattcccgcacccccccccgccccccaataagcccccgtggctctcgccacctaggctgcaaactgaaatgcctgcaggaacccgacaagagacccaagtgagccagccgggcctcagccctacccccgtcacaggccagcttgtttgaacattctggcagctgtatcttccaatattctcagaacctgaccatctctcaccatcttcactcccatcaccccagccagagccaccctctctcttgcttggatttcaccagtagacccttagctggtccccccaatcctcaccaccaacccccagcctgttctccatgccagagggacctgttaaaacctaagtcaggccatggccatgctccaaaagacacccagagctccaatctcacagctcaagcccttcccagggccaagtctccacacagccaccgtgacctctctagcttcattccctgctttctccagctcctcagcttcctgcagcacaccaggtgccctaccccagggcctccacacacacagctcccatcatccctcaaatacctacacagctccctccccagggtctccacacacagagctcccatcatccagagcacccttccctcaaatacctacacagctccctctccaccaccttcaaccatctgcctgcaccagcttttccgtgaggcctgcctagaccactctattcaaaacacatgtgcacacacgtgcacccaccttcccaacccctttcttttctccagagcgccgccaccttgaaatacatttattttaacatcggatgcccccctcctaaaagtattggatctttgttttgttcagtaatgatcagtcacactgtactcactcagtcctgttcttcctgttggtgttatactaattgttgaatgaatgcctcatctcagaagatggctcctactcagctctagtcaacggtggctatgcaggactgaaaagttcatattgtcacagattcctgttctttcaaaagaaggcaaaattctttttgtttttttttttgtttgtttttgagatggagtctcgctctgctgcccaggctggagtgcagtgactcgatcttggctcactgcaacctctgcctcccaggttcaagcgattctcctgcctcagcctcccaagtagagtagatgcgattacaggcacctaccaccacgcctgctaatttttgcatttttagtagagaaggggtttcaccatgttggccaggctggtctcgaactcctgacctcaaatgatctgcccgcctcggcctcccaaagtgctgggattacaggcgtgagccaccacacccggccaaaattccagatttttacacacaaatttctccaaatgttaaatgttggcaattgactaaatttgtttcaaagacactgatggcaaaacccaaactccccagctccacatccttggccccagaggtcttgcccgctgatccctcctgccccatcagcttcccctcagccccccgcctgcgatcacgcgggctccgtcttggagccttcgctcccgctgggggctcatcctgaagctccttcaccacacaggtgagtaagcaccagcccatcccccggcacccacccaagtggcccagtggtttggtcatggacacgcacggccccccagcaggagcaggaaacagtgccctccctctggctgggaacacagagcttgagtggcaacttcacgacttttatttgtggtgcctgtgctttatctcgaaaataccttctccccctgccccagacagtgggcggggagggggcagcaaaaaatagaagacgtccctccctattgcacatggaccctatatacaggcccacctggctgaggctggcgggactcttggcacattcttggatccctgctcaggaggggaggggtgacggggtggcatcacacgtgagatggggacctccaggcggccactctggtcctggctactgatccttgcacttcttggtcctcagttccttcctggtcccgtctctggccctggtcccctctggcaacgtccccctgcttggctcggcctcccacctccatcctggcctcgggtggccccctcggctcctggggactctgctcccctcccagtccggaggtcccaggggggctatggcttctctgagacttcccccggagccctgtcactcgtgttcacacgggggaaggggtgcgtgtggcagaagcagctgtataaatacgggtgcgggaaagtccctccgggtcacttggagagtttgctgatgacgcggatcaacgctgcattctcatccttgaggcgctggttgtcagcgcggaggtcagacagggcctgggggacggcaagggtcagctgggcagccctggcgggttgcacccccacccaccctcggccctctgcccacagcccccacagcccccaccttcagctcctcctccagctctgcggccttgcgttccagggccctgcgctcctggaatgaacagggaaagtgcagaaactgagtgaggctgaggagggcaggggaaggccaggggccagctgggaagggcaatgtggctcccttggtccaaacttagggatgtgaggctggggacgcctctggcccccatccccactgcccctactcacgaatctctccagttccaggagggctggcctctcagcgaagcgttcttgcctctggtgaggacacagaaagcacaggggtcagcagaagaagccagcactgctctgaagggtcctaggctcctgctgggcacccgcccgcccactaggcagcccacaagcccttcccccacgggccaggccccgccaccggcaggcccacagccccatcccctcgctcagactccgcctccgagatctcggccccgcccctcaagtgaagcccagccccgccggcacccccaggccaggctctacctcccagcagtctaagccccacccaggcggccctgccagttcccgtgaccctggcctcggcgcccttacctgcgtggcccgctccagctccaccttgagctgcgccagccgcagcgtggtctcggtcagggcctcgcgaagccgctcgttctccctgcgcagctctgcatacagctgggggtcaggtagaggagggtcaggtggaggatggggcgatgctgggggggcggggaagccaggaagctgggcacccagcaggcaaagccccgacggaggggtgggatcgcaccgtcctaaagcctccgtctggctcttccgattctggctcaggttctgggttgaggtcccgctgccaccgctgcctgcgggccgaggggccgccctccagggtgctggggcaggggaggagcgcgcgtcaggggccggcccggcccgcacgcagaccccacctctcccaccccgcccctacctggactcctggctgcggtcagccggctccgcctcctccccctgtgggcaggtagacgggggttcaatgggtatgggagggactttagcgggtatgggaagggctttgcccgccccccggcccaccctctgcaccagctcggccccacctgagcccctcacctccgcaggccccctccactcctttccgaccttgcggtgctccctggccgcctgcggtcccggaccctgcccgtcgggcgcctctgctgggggaggggcaggaatcagcccaggcacctccagagccccctctcggtgcctgggtccccgggtcaagcccccaggaaagcaagaagactatgggagaaactggatgattccctgggaatgacctccccgagagcagacctcacctctctgggcagggctgtcagagttctccactccagggacgcggggccttcgggaagggtcctgtcgggagggggaggcgagtcagggaagcaggacatcccgcaccaccccactcgccctcgctgacccctctcaccaggctctgcgccggcttctctgactctggggccttccctgcagccttctctgcctccttcaggtctgtaagagtcacaccctggcagggaaaggggacagtcaggggacgctggggtcagggcccagcccctcctccctcagacccaggagcccaggccccagcccctcctccctcagacccaggagtccaggccccagcccctcctccctcagacccaggagtccagacctccagcccttactcctccctcagacccaggagtccaggccccagccactcctccctcagacccaggaatccaggcccccagcccctcctccctcagacccaggagtccagaccccagcccaccccacacctgtgtggacctccgagactggcgcatgagacgggagcgagcttttctctgggattccgactcctcatcccgcacaggcatctggtaggacctgagggaagggtcccaacctcagacagggaacctggggaccctgtcccattccgtggctgacaccctccgcgggaagcaagttctgtgggaggggactccaactcccagcagacctgaggccagctctccctcaggagcccacccaaagccccgggactcctgcttcacatcgtctctccctgctgggggcgggggcggcagcttcctgccctggcctcttcacctccgtcggtcccgggagtccgctgggggcgccgtggaggctgtggggacgtttggcttcgctggggattcaggctccggaatcctggagggaggcgaggagt

SEQ ID NO: 5752 - DNA, 46732 bp, Homo sapiens
  misc_feature (1)...(46732): n = A,T,C or G, or insertion/deletion polymorphism (see Tables 1-2)
gctaatttttgtatttttaatagagacggggtttcaccatgttggccaggctggtctcaaactcctgaccttgtgatccacccgccttggcctcccaaagtgctgggattacaggcgtgagccaccgtgcccggcctccttgttttttttctaaaacaagtactgagtataaaacaatataaaacaatatgagacggtttctctcttccctcaccagcactttgggaggctgaggcaggtggatcacaaggtcagagtggatagcactttgggaggttgaggtgggaggatcccttgagcccaggagctcaagtccagcctgggcaacatagcaagacccccatttccaattttagtgtatgtgctgccaaagcaaatactctgagaccctgtttctacaaaaaataaaaaaattaaaattagtgcttggaaaaaaaaattagtgcttgaccaggaggcaagcacacctcctcatcctctcatggatgtctgtctgtagaaagtaaatggagacagcttcattttacccaactgctccgttttaggtccgctcctgagcttctgttgttcccagccatgcaaccctgggagccgactcccggctgcagagccttgtcagaagcaggcaatgtacacagagacccaaggcctggtgtagacaggctttcacagacctgggcattttgttgaattgtttttgaattgtggtttcttatcagttcatccgatactctgttctaaccacgtagttcctcttttggatctccaaacccctttgcaggttccatctacccgaaccaaactcacttattccaacagaagtctggtgtttcttgttttttttgtttgtttgtttctttcgttttgttttttgagatgttgtctccctctatcacccaggctggagtgcagtggcgagatctcagctcactgcaacctctgcttcccgggttcaagcaattctcctccctcagcctcctgggtagctgggattacaggtgcctgccgccacacccagctaacttttgtatttttagtagagacgggatttcaccatgttggccaggctagtctcgagctcctgacctcaagtgatccacccatctcagcctcccaaagtgctgggattacagccttaagccaccgcgctcaaccagaagtctgtttaaatccatccttctccccagccacccatgagttatgtgaccttggggttgctacttaacatttcagtctcaatttcctcaatagaacaaaagttagaagaataacaaaagatagttttatttttatttttatttttattttttgagatggagtcttgctctgtcacctaggctggagtgcagtggtgtgatggtggctcactgcaagctccgcctcccggattcacgccattctcctgcctcagcctcccaagtagctgggactacaggcacccgccaccgtgcccagctaatttttttaatttttagtagagacggggtttcaccgtgttagccaggatggtctcgatctcctgacctcgtgatccgcttgcctcggcctcccaaagtgctgggattacaggcgtgagccaccatgcccagcacaaaagataatttcttaatcccatgcatttgagtcttaaaaaaatattctatataattccaaggtcaaagaagaaataacaaagggcatttttaaaaatgctagaactgagtggtggtgaaattgctgttgaaatgtgtttgttgcactgatggaaatttataaatgtaaatatttatattaaaatataaaataatgggccaggcatagtggctcacacctgtaatctcagtactttgggaggccaaggcgggagggccatggagcccaggagttcaagaccggcccggtgtacaaagtgagacccagtctctagttaaaaaagagggggagtgggccaggcacagtgtctcacgcctgtaattccagcactttgggaggccaaagcaggtggatcacccgaggtcaggagtccaagaccagcccggccaaggtggtgaaaccccgtgtctactaaaaatacaaaattagcttggtatggtggcgggagcctataatcccagctagggcaggagaatcacttgaacccgggaggcagaggttgcagtgagccaagatcatgccactgcactccagcctgggcaacaacagagagacttcatctctaaataaataaataaataaataaaagaaaatacaaattttttaaaaaaggtactgtggctgggcgtggtggttcacacctgtaatcccagcactttgggaagccgaggcaggtggatctcagatcaggagttcaagaagagcctggccagcatggtgaaaacctatctgtactaaaaattagcctggcatggtggcaggtgcctgtaggaggctgaggcaagagaattgcttgagccccggaggcagaggttgcagtgagccgagaccacaccactgcactccagcctgggcaacagagcgagagtctgtctcaaaaaggaaacaaaaaaaaaagtacctccaaattatggtagggtgtccatattaagaaggtagaaaaaggtcgggggaagtggatgcctgtaatcccagaactttgggaggctgaggcgggtggatcacctgaggtcaggagttcaagaacagcctggccaaaagggtatggtgaaaccccatctctactagaactacaaaattagccgggcgtggtggtacatgcctgtaatcccagctacacaggagtctgaggcaggagaatcacaggaaaccggcaggcagaggttgcagtgagctgagatcgcgccattgcactccagcctgggcgacaagagcaaaactccatctcaaaaaaaaaaaaaagaaaaaatgaaaaagaatttattgaaatgtgcagtctgaaaactgctcctgcacattttcattcatccttcctattccctccatccctcaattttttttttttttttgagacagagtttcgctcttgttgcccaggctggagtgcaatggcacgatctcagctcactgcaacctctgcctcccaggttccagccattttcctgcctcagcctccagaatagctggaattacaggcatctgccactacgcctggctaattttttgtgtatttttagtagagatggggtttcaccatgttggtcaggctgatctcgaactcctgacctcaggtgatccacccgcctcggcctcccaaagtgctgggattacaggcgtgaatcaccacgcccggcccctcattttcttttttttctttctttcttttttgtttgtttgtttttgagacagagtctcgctctgtcgcccaggctggagtgcagtggcgcgatctcagctcactgcaagctccgcttcccgggttcacgccattctcctgcctcagcctcccgagtagctgggactacaggcgcccgccaccacgcccggctaattttttgtatttttagtagagacggggtttcaccgtgttagccaggatggtctcgatctcctgacctcgtgatccgcccgccttggcctcccaaagtgctgggattacaggcgtgaggcaccacactgggccccctcactttcttattctttctaggataggcaactgagcgcggcagtgaagagctgggcttccggaagctgacagctgtttgtgatcttcaagacctcagacaggttttctaaatatgccttgccttcattttctcaaggaaagtgaaaaatgggtaggatcatggcaatcactactgtgtagcaatgtttagaggacttaataagtaaacacagggtcaagcatggtggctcacgccggaaatcccagcactttgggaggccgtggtgggaagattgcttaagcccatggggttgagaccagcctgggcaacatagtgagacctccatctctataaaaaatacaaaaatctagtcaggcgtgatggcgtatgcctgtagccttcagtaagctatgattgtgccactgcacaccagcctaggcgacagagtgagaccctgtctcaaaaagaaaaaacgaaaagaaatatagatgtacatatacatatgttggttctaaaacatgaaaaaggctgggcgcggtggttcgtgcctgcaacccaagcactttgggaggccgaggcgggcggatcacgaggtcaagagtttgagaccagcctggccaacatagtgaaaccccatctctactaaaaatacaaaaaaaaggctaggcgcagtggctcatgcctgtaatcctagcactttgggaggccgaggtgagcagattacctgaggttgggagttcaagaccaccctgtccaacatggtgaaaccccatctctactaaaaataagaaaattagccgggtacagtggcacgcgcctgtaatcccagctattcaggaggctgaggcaggagaatcgcttgaactctggaggcggaggttgcagtgagccaagattgcgccactgcactccagcccgggcgacagtgccagactcagtctcagaaaaaaaaaaagcaaaacaaacaaagaaacatgaaaaaaagctataaaacccaacttttttctttttttttttgagacggagtctcactctgtcgcccagggtggagtgcagtggtgcggtctcggctcactgcaacctccgcctcctgggttcaagcaattctctgcttcagcctcccaagtagctgggattacaggcacccgccaccacgcccgactaattttttgtatttttagttgagacggggtttcatcatcttggccaggctggtcttgaagtcctgacctcgtgatccacccgccttggcctcccaaagtgctggaattacaggcgtgagccaccgcgcccggccaaaacccaactttttagtcttatttatatggtgtttttttttttttttttttttgagatggagccttgctctgtcgcccaggctggagtgcagtggcgcgatctcggctcactgcaagctccgcctcccgggttcacgccattctcctgcctcagcctcccgagtagctgggactacaggtgcccgccaccacgcccggctaattttttgtatttttagtagagacggggtttcaccgtgttagccaggatggtctcgatctcctgacctcgtgatccacctgcctcggcctcccaaagtgctgggattacaggcgtgagccactgtgcccggctatatgtttacaaaattaatactgccagccaggcacggtggctcacgcctgtaatcccagcactttaggaggctgaggctggcagatcacctgaggtcgggagtttgagaccagcctggccagcatggcaaaaccccgtctctattgaaaaaaatacaaaaattaaccaggcgttgtggcgcatgcttgtaatctcagctactcgggaggctgaggcaggggaatcacttgaagccggcaggcggaggctgcggggagccgagatcgtgccgttgcactccagcctggggaacagagcaagactccattaaaaataaaataataataatactgtgaatgtgaaactgatgaacttggtgcttttcatgcgtctcatagttgacgtgtcattgatatttcacttgaaatacggttggatttttattaataatatacctggggtgatgggagaaggtagccaatcacagctgaggcttctaagcggtgattctcagcctcggccgcaatcacagttatctgggactctcgaaagaactccagggtctgggcagtcccagtgtaaccaatcaagcagaatctctaggcgttcgtgctttgaaatgaggctccacataggtaagtttaacaggcagtcaagatggaggaccacaggtggagatccggaagctcaggtgaaggaccgccccccaacaccccccgcccccaaaagacctctcagtaattccggtggatacaggaagtgctcagcaacgattacgccccgagggccaatcacagggctgcggccgagaragaagccttawtagagctttctcaacctgcagccctcatctccgccggcgagtagggccaggtgttgggaggtgagtagctctccggcagctctgcaacttcatttctttatttctccattccacagttggtaaaatttctccttttatttcatatattttttttctgagacggagtctcgctctgtcgcccaggctggagtgcggtggcgcgatctcggctcactgcaagctccgcctcccgggttcaggccattctcctgcctcagcctcccgagtagctgagactacaggcacctgccactatgcccagctaatttttttgtatttttagtagagacggggtttcaccatgttggccaggctggtctcagtccgcctcggcctcccaaggtgccgggattacaggcgtgagccaccgcgcccagcctttttttttttttcttctcttttttgagggtcttactctgtttcccaggctggagcgctgtggcaggatctcggctcactgaacccttgacctctcaggttcaagcagtcctcacgcctcagcctttgaagtagctgggaccgtgggagggtgccaccacatctgttctggctaataatattattattaccactgtttgcagagactcactagatgtagggtcttaatatgttgccgaagctggtctctaactcctgggctcaagcgatcttcctgcctcagactcccaaaattctgggattataggcaggtgccaccgcgcccggcctaaatcttttcttctgttagaaattaagtggttctgcctgtctcagtggctcacgcctgtaatcgcagcgctttgggaggccgaggcgggaggatcacctgaggtcgggagttcgagaccagcctgaccaacatgtagaaaccccatctctactaaaaatataaaattaggtgggcgtggtagcgcatacttgtaatcctagctactcaggaggctgaggcaggagaatcacttgaacccgggarggcggaggttgcggggagcctagatcataccattgctctccagcctgcgcagcaagagagaaactgtctcaaaaaataaaataaaataaaattcagtggttctgactggggaaagagtagcagatgcttagatctagagagactctagttaaggttggctcataagaggatagttgtgtgtgcttttatttctgttctcttgggggatttaggatagagctatagagagctccaaaaaaaaaaatatattggaacaggtcagatgctgtggttgctgtgtgtggagtcctgggcagtgctaaggttttgtgtctaatgagtcctcttaacaagaaggtattgttttttattcactgaggtgagggagcctcttagcatcattctagtccagcttccggacctgagtcttatgcaaatacctatgccagttgccattctcacgctattcacagctatcatataaagaggtgttataccctttctgtaaagtttttgttgctactgctatttttttttttttttttttgagacaaagtctagctctgtttcccaggctggagtacagtggcgctatctcagctcactgcaacttccacctcccaggttcaagcaaytctcgtgcctcagccttctaagtagctgggactacagccgcctgtcaccaacctggctaattttcgtatttttagtygatatagggtttcactatgttggccaggctggtctcaagctccagacctcaggtgatcctcccaccttggactcccaaagtgctgtgattacaggcgtgagccaccgcacccggccctgttgttgtttttaaaatagagacagggtcttaagttgccaggctggtctggaacttctggactggagtgatcacccacctgagcttcccaaagtgcggggattgcaagcgtcagccaccacccccagtgttgtgtttttgtttgttttaccaggctggagtgcagtggtgcgatcacagctcactgcagccttaacttccctggctcaggtgatcctcccacctcagcctcctcagtagctgggactacaggtgcatgccactatgcccagcacaattttttttttttttgtatttttttgtagagacagggttttgccatgttgcccaggctggtctcaaactccaagcaatcctcccaccttggcttcccaaagtgtttggggttccaggtgtgagccatggccccccggccagcttcagtaaagtaaaagccacacacctgtgtcctgagaccaggctccaccactaagttatctttaagcctttttttttttttgagacagtttcactcttgtcgccccaggctggagtgcagtggcgccatgtcagctcaccacaacctctgcctcccactcccaggttcaagcgattctcctgcctcagcctcccaagtagctggaactacaggcacctgccaccacgcccggctaattttttgtatttttagtagagacggggtttcactgtgttagccaggatggtctcgatctcctgacctcacgatccgcccgcctcggcctcccaaagtgctgggattgcaggcgtgagccaccgcgcccggctgtgtgtttgcattatcatattcagcccagttttcacgaagtttcttgtctcctgggtgatccacgtagctccccasttccttatctgatctatgcttgtcctttcatkgttgtgttactactttgctataatgagagagtgttttcgctttataggttaacttttagaacctgagcagcccctcagggaaaaccctgacagtagctggttattttgcaattagaaaaactagctgggcactgaggcaggtgaatcacgaggtcaggagttcgagaccagcctggccaacttggtgaaaccccccatctctactaaaaatacaaaaaaattagctgggcacagtggtgaatgcctgtaatcccagctacttgggaggctgaggcaggagaattgcttgaatccgggaggcagaggttgtagtgagccgagattrcagcactgcactccagccagggtgacaaagtgagactccgtctcaaaaaaaaaaaaaaaaaawatacaaaaagtagctgagcgtggtggtgggtgcccataatcccagctagtcrggaggctgaggcaggagaactgtttgaacctgggaggcagaggttgcagtgagctgagatcgtactactgtactccagcctgggctgcagagtgaaactatctcaaaaataagtaaataaaagtaaaatgagttgaggtcttgctctgttgcccagatgggagtgcagtggcacaatcaaggctcactgcagtttcagtctcccaggctcaagcaatcctcccactgcagcctcctgagtagctgggactacaggcatgtaccaccacccactgctaacttatttttcatggagatgggggtctcactatgttgcccaggctgggagtttgttcttgaagaagcagggtagatggtgagtgtccttgttcgtggcacagcaggaactggcatttgagacaggastgctaatcacyatccctctccactcctcccttgattgtcatcacagctcccacgtgggacaagatggtgtcttcggcrcagatgggcttcaacctgcaggctctcctggagcagctcagccaggatgagttgagcaagttcaagtatctgatcacgaccttctccctggcacacgagctccagaagatcccccacaaggaggtagacaaggctgatgggaagcaactggtagaaatcctcaccacccattgtgacagctactgggtggagatggcgagcctccaggtctttgaaaagatgcaccgaatggatctgtctgagagagcaaaggatgaagtcagaggtgagyggaaatcggtccacactgtgtcctaggaggaagcaggcgtcctctccaggactttagaaattcagaaggccaggcgcgctggctcacgcctgtcgtcccagccctttgggaggctgaggcggttggaccacctgagggtcaggagtttgagaccagcctgaccaacatggtgatgaaacagcatctctactaaaaatacaaaaatttgctggacgtggtggcagacacctgtaatcccagctactccrggaggctgaggcaggagaatcacttaaatctaggaggcgggggttgctatgagccgagatcacgccattgcaccccagcctgggcaacaagagcaaaattctgtctcaaaaaaaaaaagaaatggcattgaggcttggagagggactgcttgttctgaatgcaggtgctggatcttcataaaccctggtgtctgtcctggtccttattttctacctacttctttttttttttttttttgtccttttatttttttattttttattttattattattattttttttattatactttaagttttagggtacatgtgcacattgtgcaggttagttacatatgtatacatgtgccatgctggtgcgctgcacccactaactcgtcatctagcattaggtatatctcccaatgctatccctcccccctccccccaccccaccacagtccccagagtgtgatgttccccttcctgtgtccatgtgatctcattgttcaattcccacctatgagtgagaatatgcggtgtttggttttttgttcttgtgatagtttactgagaatgatggtttccaatttcatccatgtccctacaaaggacatgaactcatcattttttatggctgcattgtattccatggtatatatgtgccacattttcttaatccagtctatcattgttggacatttgggttggttccaagtctttgctattgtgaataatgctgcaataaacatacgtgtgcatgtgtctttatagcagcatgatttatagtcatttgggtatatacccagtaatgggatggctgggtcaaatggtatttctagttctagatccctgaggaatccccacaccgacttccacaatggttgaactagtttacagtcccaccaacagtgtgaaagtgttcctatttctccacatcctctccagcacctgttgtttcctgactttttaatgatcgccattctaactggtgtgagatgatatctcatagtggttttgatttgcatttctctgatggccagtgatgatgagcattttttcatgtgttttttggctgcataaatgtcttcttttgagaagtgtctgttcatgtcsttcgcccactttttgatggggttgtttgtttttttcttgtaaattattttctacctatttctatcgctttcaggtatcgtacagttggcctaacatatctgtggatttaaccaatcctagatcaaaaataatgggggcaaagacaattaaaaataacaatacaataaaatgcacatgaactatggttatttaactcttcttgagagaggatctcactctgtcacccaggctggaatttagcagcacgatctcggctcactgcaacctccgcctcccgggttcaagcgattctcctgcctcagcctcccgagtagccgggattacaagcatgtcccaccatgcctggctgatttttttttttttttttttgtattctaaatagagatggggtttcaccatgttagccaggatagtctcgatgtcrtgacctcatgatctgcccgcctcggcctcccaaagtgttgggattacaggcgtgagccaccgcacccagccagcaagtgcatttagaactactctactttctaccccataacttttttttttgtttgtttgagacaagtctcactctgycacccaggatggagtgcagcagcacaatctcagcttattgcaactcccgccccctgggttcaagtgtttctcctgcatcagcctcttgaatagctaggattatacaggcacctgccactgtgcctggctaaattttgtattttaatagagatggggtttcactatgttggccaggctggtcttgaactcctgaccacgtgatcaacccgcctcagcctcccaatgtgctggrattacaggtgtgagccgccatgcccagctacacttttttttgaaacggggtctcgttttcttgctcaggctggagtacaatggggcaatcacagctcactgcagccttgacctcccagacttgagcaatcctaccactatggcctcccaccacacctcgctcattcttgtatatatatatatttttgtagagatagggtttcaccatgttgcccaggctggtctcgaacttctgtgggctcaaccgatcctcctgccttggcttcccacagtcctgggatcagaaacatgagccacagtgcctggccagtgcagctttatttacagtaaccaagatatagagtcagtctaagtgaccatcagtggatgaataaaaaatgtgcccgttgggtaccctgcctactgcctgggttatgagattgttgggaccccaagccttaaaaaggaaacatggtaggccgggcacagtggctcacgcctgtaatcacagcactttgggaggccaaggcgggtggatcacttgaggccaggagtttgagaccagtcaggccaatgtggtgaaaccctgtctctactaaaaatataaaaaaatcagccgggcgtggtggcacactcctgtagtccyagctacttgggaggctgaggcaggaggattgcttgaaccagagagtcagaggttgcagtgagccaagatcgtgccactgcgctccagcctgggtgacagcaagactccatctcaaraaaaaaaaacaaacaaacatggtattaattacacaatggaatactcctcaaccttaaggaactcctatctttttatttaaaaattgccagttttatttcagctagagatcactttttagcataatgtttcctgtctttaacaatgggtgagggtttttttttttttttttttttggtttggtttggattttggttttgcttttgagtcgaagtttcactcttgtctcccaggctagagtgcaatggcgcgatctcggctcactgtgacctcctcctcccaggtttaagtgattctcctgcctcagcctccagagtagctgggattacaggcgcctaccaccatgcccgctaatttttgtattttagtagagacagggttttaccatgttgaccagactggtctcgaactcccgacctcaggtgatctgcccacctcagcctcccagagtgctgggattacaggtgtgagcaaccatgcccggccaagggtttttaactttagctgacctccggaggttacaagtttgaaaacggcaggaggaaacccagagagttgtaaacttacgaaggtctgggctctgaaaaagatacaaattttctttccatgccaatagcrctcacacagacatggtgaatgttcctgaaacccgccggactttctgtaagaagtgtggcaagcaccacccccacaaagtgacacaaggcaaggattcttggtatgcccaggggaagtagtgttatgacaggaagcagagtggctatggtgggcagactaagccgattttccggaaaaaggctaaaactacaaagaagattgtgctaaggcttgagtgccttgagcccaactgcagatctaagaatgctggctattaaaagatacaagcagccaagcgcggtggctcacgcctgtaatcccaacactttgggaggccgaggtgggcggatcacaaggtcaggagtctgagaccagcctggccaaaatggtgaaaccccatctctactaaaaatacaaaacttagctgggcatggtggtgtatgcctatagtcccagctactcaggaagctgaggcaggagaatcgcttgaacctgggaggcagaggttgcagtgagccaagattgtgccactccagcctgggcaacagagtgacactctgtctcaaaaaaaaaagatgcaagcattttgaactggaaggagataagagaaaggaacaagtgatcsagttctaartgtcatcttttcttttatgaaggcaataaaatcttgagcttatggtaaaatgcaaaattttccccccttctcctttttcagaagcagctttgaaatcctttaataaaaggaarcctctatcattaggtaagttacctcatttataacttttattcttcatgtgagatctggggactcsggcctttgttttaaggagaatgtgctgagcactaagaatgcaaagaaatgccggacttagcatccctgctcccagggcggagctggtctcscaggtgcgtagcagtaagacctgggaagctgaaacacgatcgcgtttgttggaaatctataaatacatacaaagcggggaagggtaagcttggcctttgaatctggataagstagagacttttcttttttgagatggaggcttgctctgtcacctaggctgaagtgcagtggtacgacctcggctgactgcaacctctacctcctgggttcaagcagttctcctgcctcagcctctagaatagctgggattacaggtacctgccaccaggcccggctaattttttgtggtgtttgtagagatggggtttcaccatgatggccaggctggtcttgaactcctgacctcaagtgatctgcccacctcagcgtcccaaaatgctgggattatgggcatgagccaccaccacacccggttttgtttttttttttttttttttttttttgaaacagggcttcactctgtcacttaggctggagtggtgcaatcatggttcactgcagccttgacctcccaagctctggtgatcctcctgcctcagcctcctgagtagctgggaccacaggcacttgccaccatgcctggctaatttttttcactttttgtagagacagggtcttgctatgttgcccaggctggcctcraattactaaactcaatcagtcctcctgcctcaccctcccaaactgctggggtacaggtgtgagccatgacacctggcccttaccagctacttatatcctgaagattattattatttttttwttttttgagatagagtctctctctgttgcccaggctggagtgcagtggcgtgatctcggctcactgcaagctccgcctcccgggttcatgccattctcctgcctcagcctcccgagtagctgggactacaggcgcccaccaccacgcctggctaatttttttgtgtttttagtagagackgggtttcaccgtgttagccaggatggtctcratctcctgaccttgtgatccgcccgcctcggcctcccaaagtgctgggattacaggcgtgagccaccgcgcccggcccctgaagattgtgttttgagatggggtcttgctgtgttgctccggcttgattgcagtggcacagtcatagctcattgcagcctcaaccttccaggctccagagatcctcttacctcagcctcctgagtagctgggactacaggtgtgcactgccacacctgactaatatttgtatttttggtagggacagtttcactatgttgccagatatggtgtcaaactcctggtctcaagtgatcctcccaccttggcctcccaaagtgctgggattacagacatgattcaccacacctggccatgaagactttttttttttggacaaagtctcactctgttgcccaggatggaatgcagtggcatgatctcagctcactgcaacctctgacctccgcctcccggttcaagtgattctcttgcctcagcctcccgagtagctgggattataggtgtctgccaccaagcccagctaatttttgtaattttagtagagatggggtttcaccatgttggccaggctggtcttgaactcctgacctcgtgatccacgtgcctcagcctcccaaagtgttgggattacaggtgtgagtcactgcgcctggtctcatgaagaccttttttgagacagagtcttgctctgtcacccaggctggagtgcagtggtacaatctcactgcagcctccgcctcccaggttcaagtgattctcctgccttagcctcccaagtagctgggattacaggcgcctaccaccacgtctggctaatttttgtatttttagtagagacagggtttcaccatgttggccaggctggtytcaaactgctgacctcaaatgaactgtctgcctcagcctcacaaagtactgggattacaggcatgagccacctcacctggtggtgaagactctaaaggctcttctcagatcagcctttgtcctgaatttcacatgcccgtgtccagttccctccccagcatcttttcaggagttccatggactcacctcttcattatccagggttaagctgcagatattgttattaggattccaccttgttctctctytttytttttttttttttttttgatacggagtctcgcttgctcttttgccaggctgaagtgcagtggagcgatcttggctcactgcaatctccgcctcctgggttcaagcaattcccttgcctcagcctcgcaagtagctgggacttacaggtaacacaccaccatgcccggctaattttttgttttagtagagacggggcttcaccatgttggccgggatggtctcgatctcctgacctcatgatccgcctgccttggcctcccaaagtgttgggttacaggcatgagccaccatgcccggctgattccaccttgttcttacattctttcccagttcattttaaatttatctacctcatcagaaactagggggttaggcctggcaggcagatcacctgaggttgggagttcgagaccagcctgaccaacgtagagaaaccctgtctgtactaaaaatacaaaattagccaggtatggtgrcacattcctgtaatcccagctactccggaggccgaggcaggagaatcacttgaacccaggaggcggaggttgcagtgagccgacatcacaccattgcattccagcctgggcaacaagagcaaaactacatctcaaaaaaaaagaaaaactaggcagttaatcctcaaagcctttccagtggccttatgcgtgagtagtttgtgtgtgtgtgtgtgtgtgtgtgtgtgtgtgtgtgtctttcacaccatgtgttctgaactacttaggaattctcaccagaaaggcacataaacctgggatcatggcctaatgtactttcacttttacatccagtaccttatcaacgtcctttttagtacctaatctaggcttcactactgagactcaggggtccaacttgagccatcttggagtcccactgccagcacagcaacaggcctgtaatgccgccctttttctccagggataacacggaaagaacgaccacctctagacgtggacgaaatgctggagcgcttcaaaacagaagcacaaggtgggtgtcaggacctccaatgttggagtcagctgaggaagccccccgttcttgctgctatctcctgttcctttgaagaaccccatctctctccaatcttttcctccactattcttaatgtgcccactgtctcctggagaatgccaacctcccttccrtaagaatagagggaagaacgaacgttgcagagaattagaactcagtttgtagaaagttaggagcacagcgcagagagtttttgtttttgtttttgttttgagacagtttctctgttggccaggttggaatgcaatggcgcgatctcggctcactgtaacctccacctcccaggttcaagcgattctcctgattctcctgactcagcctcctgagtagctgggattataggcacctgccaccacacccagctaatttttttttttttttttgagacgaagtcttgttcttgtcacccaggctggagtatagtggcaccatccctgttcactgcaacctccgcctcccagattcaagtgattgtcctgtctcagcctcctgagtagctgggactacaggtgcatgccaccacgcccagctaatttttttttgtacttttagtagagacaggtttcaccatctcattcagggtggtctcaaactcctgacctcaagagatctgctccacccacccccaagtctcccgaagtgctgggattacaggcgagagccaccgtacccggccttctttaaattatttaaaagttgacaggtggccaggtgtggtggctctcacctataatctcccagcactttgggaggctgaggcgggtggatcaagagatcgagaccatcctggccaacatggtgaaacccaactctactaaaaacacaaaaattagccgggtgtggtggcacccgcctgtagtcccagctactcaggaggctgaggcaggagaatcgcttgaacccgggaggtggaggttgcagtgagccaagattgtgccactgcactccagcctggcaacagtgcgagactccatcttaaaaaaaaaaaaaaaaaattgacaggcataaatgtatttatggtacattgctcagacaactttaatataaacaacttacagagaaaattgagtcttttgggtaggtgacttgcctgagctgactttgtgataggttttttctgttttttttgtttttgaaatagagtctcactctgtcatgcaggctggagtgcagtggccccatcttggctcactgcaatctctgcctcctgggttcaaggggtcttcctgccacagcctccccaggtgctgggactataggtgcccaccactatgcctggctaacttttgtgtttttagtacagatggggtttcaacagggtagccaggttggtctagaactcctgacctcaagtgatccacctacctcggtctcctaaagtgctgggattacagctgtgaaccaccgcacctagcctgtgatcagtttcagatcagccttgcttactccacattccctcttatcttcctggtagcatttttgtyttttcttgagaaagagttttgcccttgtcgcccaggctagagtgcaatggtgtgatctcggctcgccacaacctccacctcccaggttcaagtgattctgcctcagcctcccgagtagctgggatcataggcgcccaccaccacatctggctaatttttgcatttgttagttttatttttagtagacagggtttcaccatgttgggcaggctggtcttgaactcctgacctcaggtgatccacccacttcrgcctcccaaagtgctgggattacaggcatgagccaccgtacctagcccacattgacttttgatacagcaagtatttcttgctatggctctgtataatagaggtgagtaacttggttgaaggaattgtttgccctgttcatctctctagacacggccaatgtcattcctggcacacaatctttttttttcttgagatggagtctcactctgttgcccagactggagtgcagtggtgcaatcttggcccactgcaacctctgctacccaggttcaagcgattctcctgcctcagcctcccaaatagctgggagtacaggtgtgtgccaccacgcccagctaattttttgtattttagtagagacagggtttcaccgtgttagtcaggatggtctggatctcctaacctcgtgatccgtcygcctcagcctcccaaagtgctgggatgacaggcgtgagccactgtgcccagcctagcacacaatcttgacaaagaatttcggtgcgacttggggtactgtggtgcctgctctatcatcatgcttcagcaggaaatgtgggtgaatagtgcctggtggcatggcaggtaaagaaatgttttgttttgtttttttttttgagacagtcttgctctgtcacccaagctggagtgcagtggcgcaatctcggctcactgcaagctccatctcccgggttcacgccattctgcctcagcctccccagtagytgggactacaggcgcccgccacacgcccggctaattttttgtatttgtagtagagacagggtttcaccgtgttagccaggatggtctcgatctcctgaccttatgatccacccgccttggcctcccaaagtgctgggattacaggcgtgagccaccgcgcccagccgcgggtaaagaaatttatgaagacaatcgtaggtaaaggaaggcagatttattggagaaagtaggaaaagacattggcagagagaccccagcgggcaggttgtcatgagtagctcactgccaggagaccaaagcttcctgcagattttatagaatagggcttgggctgattgataatgtcaacagggggtttaacttgcggtcttctttcagcagaagtgtttgataaactgaggcgtttcatggcaaacagggagtttgtgagctctgtgtgtgatctggccaggaaggccaaacatcttgggccgtatctcctggaccataaaagcagacctggcccagtgcagtggttcatgcctgcaatcccagcactttgggaggctgaggtgggtggatcatctgaggtcagcagttttagactggcctggccaacatggcgaaaccccatctctactaaaaatacaaaaattagcctagacgcagtggcacatgcctgtaattccagttacttgggaagctgaggcaggagaatcgcttgaacccgggaggcggaggttgcagtgagctgagattgcgccactgcactccagcctgggcaacagagtgagactgtctcaaacagacctatagctgacctgtttcctcttgtttgtatgccctgaaccatggaggaaagcttatttatttattttattgagatggagtcttgctctgttgcccagggtggagtgcagtagtgcgatctcttactacaacctccatctcccaggttcaagcaattctcgagcctcttggcctcccaagtagctgagattacaggcatgcgccaccacgcctggctaatttttgcatttttagtagagatggggtttctgtgttggccaggctggtctcgaactcctgagctcaagtgatccaccccacctcagcctcccaaagttctgggattataggcatgagccaccacacctggccggaaaacacatttgtagcttatttgctttatctgatcccgtgccccccctcccccccgccccatcagcctgcctccttttctctaattgggactccacaggaaatacacctgattttgtgtcaatctcacatgagtttgtattttgtagcgtttacagaaacgaaaggaaatgtcatctgcctgggtaaagaagtctttaaaggaaaaaagccaggtctgtaccatatcttcctgcagggagcttgggatcagatttctctttataaacttgaagtcctcttaactttcctatgtaacacaaagcatttatttatgtatgtatgtatcgagacggagttttgctcttgttgcccaggctggagtgccgtggcgtgatctcgactcactgcaacctccgcctcccaggttcaagcaattctcctgcctcagcctcccgagtagctgggattacaggcatgcgccaccatgactggctaattttttatttttagtagagacaaggtttcttcatgttggtcaggctggtgttgaactcccaatgtcaggtgatctgcctgcctcgacctcccaaagggctgggattacaggcatgagccactgtgcccggccaacacaaggcattttgttattttggttttccctatgggtaactgattgcatcctctctcccttccctcctcaccaatgataaagacaaagacaataggtgcaggtatatattgaagacgaagttccgggagatgtggaagagctggcctggagatagcaaagaggtccaggttatggctgagagatacaagatgctgatcccattyagcaaccccagggtgcttcccgggcccttctcatacacggtggtgctgtatggtcctgcaggccttgggaaaaccaygctggcccagaaactaatgctagactgggcagaggacaacctcatccacaaattcaaatatgcgttctacctcagctgcagggagctcagccgcctgggcccgtgcagttttgcagagytggtcttcagggactggcctgaattgcaggatgacattccacacatcctagcccaagcacggaaaatcttgttcgtgattgacggctttgatgagctgggagccgcacctggggcgctgatcsaggacatctgcggggactgggagaagaagaagccrgtgcccgtcctcctggggagtttgctgaacagggtgatgttacccaaggccgccctgctggtcaccacgcggcccagggccctgagggacctccggatcctggcggaggagccgatctacrtaagggtggagggcttcctggaggaggacargagggcctatttcctgagacactttggagaygaggaccaagccatgcgtgcctttgagctaatgaggagcaacgcggccctgttccagctgggctcggcccccgcggtgtgctggatcgtgtgcacgactctgaagctgcagatggagaagggggaggacccrgtccccacctgcctcacccgcacggggctgttcctgcgtttcctctgcagccggttcccgcagggcgcacagctgcggggcgcgctgcggacgctgagcctcctggccgcgcagggcctgtgggcgcagacgtccgtgctycaccgagaggayctggaaaggctcggggtgcaggagtccgacctccgtctgttcctggacggagacatcctccgmcaggacagagtctccaaaggctgctactccttcatccacctcagcttccagcagtttctcactgccctgttctacrccctggagaaggaggaggrrgaggayagggacggccacrcctgggacattggggacgtacagaagctgctttccggagtagaaagactcaggaaccccgacctgatccaagcaggctactactccttyggcctyrctaacgagaagagagccaaggagttggaggccacttttggctgccggatgtcaccggacatcaaacaggaattgctgcgatgcgacataagttgtaagggtggacattcaacggtgacagacctgcaggagctsctcggctgtctgtacgagtctcaggaggaggagctggtgaaggaggtgatggctcagttcaaagaaatatccctgcacttaaatgcagtagacgttgtgccatcttcattctgcgtcaagcactgtcgaaacctgcagaaaatgtcactgcaggtaataaaggagaatctcccggagaatgtcactgcktctgaatcagacgccgaggttgagaggtgagaaccrtttcactctaccagtcgttccatctttagcctcatcccatgcccccttaggaagaggccagagcctcctatgcactgtggcttagggtcaggaattccctcttgttggrctctttgtttgtttttgttttgagatggagtcttgctctgtcgctcaggctggagcgcagtggcgcgatcttggctcmctgcaacctccgcctcccgggttcaagtgattcttctgcctcagcctcctgagtagctgggactacaggcgcctgccaccttgcccrgctaatttttatattttcattagagacgggatctcagcatgttggccagtctggtcttgaactccgcctgacctcaggtgatccacctgcctcagcctccaaagtgggattacaggcatgattcaccatgcccggcccaaatatatttttttaagacagggtcttgctgtgttgctcaggctggagtacagtggtgaaatcagctcactgcakcctcaaacttctgggttcaagtgatgttcctgagtacctgggatgacaggtattaagtgtgcaccatcatgyccagctaacttaagtgggggtttttttttgtgtttttttttttttttttttttttggaaagacaaaatctcactatgttgtccaggctggtcttgaactcccaaagcactgagattacaggcatgagttaccacacgccctgcctgaatatttcttattgatatgtatagatatgtatattcccaatctttttttttttttttgagacggagtttcactctttttcccaggtcggagtgaagtggctcgatctcggctcactgcaacctccgccccaccaggttcaatgattctcctgcctcagcctcatgagtagctgggattacagccacccacgaccatgcccagctaatttttgtacttttagtagagacggggtttcaccatgttggccaggcaggtctcgaactcccgacctcaggtgatccacccgcctcagcctcacaaagtgctaggattataggcgtgagtcaccgtgcccggtctatattctctatcttttatcaatgatgtgcttagcattttaacttatttttaccctctattggatttttgtctaagaagaataggttctttctcctgtgatgcttcttgggtgttgagttgtctgatggtggtgctaataagtgattacatggtccagctttcaattgtactcatttgtcaggggtatatgcccagagaaaccctaaatacttcagcygtgatggacacacatttggtgtaaccctttyttctcttccctrtagatcccaggatgatcagcacatgcttcctttctggacggacctttgttccatatttggatcaaataaggatctgatgggtytagcaatcaatgatagctttctcagtgcctccctagtaaggatcctgtgtgaacaaatagcctctgacacctgtcatctccagagagtggtgtaagtagaaactaattcatgaactcaaatccttagggtatgaaaatggtacaatgttaacatcggagcaatattcagattcctgtactagactcttaagtgctcgagacacagggaattgagagagtcctgtccttaaatttattttgtgggataatcgtataaagtaatttctaggggctgggcatggtggttcacacttgtaattccaacacttcgggaggccgaggcagacagatcacttgaggtcaggagttcgagaccagcctggccaacgtgacaaaaccctgcctctactaaaaatacaaaaattatccaggcgtggtggcaggcacctgtaatatcagctacttgggaggctgaggcaggagaattacttgaacccaggaggcggaggttgcagtgaaccragatcctgccactggactccagtctgagtgacagagcgaractgcgtctcaaaaaaaaaaaaaaaaaaaaagaaaaagaaaaaaagggccgggcacaatggctcacgcctgtagtcccagcactttgggggcccaaggtggggggatcacttgaggtcaggagttcaagaccagcctggccaagatggtgcaagaccctgtctctacgaaaaatacaaaaatttgccaggtgtcgtggcaggtgcctataatcccagctactccggatgctgagggtaggagtcgcttgaatccgggaggcagagtttgctttgcagtgagccgagatcgcgccactgcactccagcctgggcaacagagtgagactccatctcaaagaaaaaaaaaatctgtaaagatggacaaaaatttaaacatggaaaaaatagttcctaaagtttaaatatatcgagcccctggtttccatttaagtacgatacaggtgtacacactaaagatttcactttcgttytcttttccctaggttcaaaaacatttccccagctgatgctcatcggaacctctgcctagctcttcgaggtcacaagactgtaacgtatctgacccttcaaggcaatgaccaggatgatatgtttcccgcattgtgtgaggtcttgagacatccagaatgtaacctgcgatatctcgggtatatctcttaatcattaaaatccttcatcatacaaacataagctaccacaagcttatgtggcaattttgtgtaaataagaaaaagttcgttattctgactagaaacagtactaagggcagatgacccaggatgcagcatgrgctgaacttgagtttcnacttgccttgaacagtaaacaccctggacaaccatacgtgaggaccctgaatccaaagaaactcccagaatctttatcatctttttttttttttttatgragtcttgctctgttgcccaggccaaagtgcaatggcacgatcttggctcactgcaacctctgtctcctgggttcaagtaattctgctgcctcagcctcccaagttgctgggattacaggcacccgccaccacgcccggctaatttttgtgcatttagtggagctggtttygccacattgccaggcyggtctcgaactcatgacctcaggtgacctgccctcctcaggctcccaaagtgctgggattataggcatgagccaccatgcccagccagagtccttatgttttggttttggttttggttttttctttttcttttttctttttgagatggagtctcgctctgtcacccaggctggagtgcgttggtatgatctcaggtcactgcagcctccacctcccaggttcaagtgattctcctgcctcagcctcctgagtagctgggattacaggtgcacaccaccacacctggttaatttttgtattattagtagagatggagttttaccacattggccaggctggtctcgaactcatgacctcaggtgatctacccccccacccccaccccaccccgccgtcggcctcccaaagtgaggcatgagccaccgtgcccagcccagaatctttatcttctatcagagatcattcactcatggttcatgcttctcctgtatgatgattcagaataccagctattgacatttttcaagcaagaacccttcargaacatcaagttgccccttttctgttagtcctctggtttgagagctctccccttgggaagctgtccagtggctgcccaggcgatgagaacctacatgcatcatggggttccatgaagcctcacttggccacactggtgtagtaggtggtcattggcctcaaattattgccctgggccaggcgcagtggctcacgcctgggaggccgaggtgggtggatcacttgaggtcaggagttcaagaccggcctggtcaacatggtgaaactctgtctctactaataatacaaaaattagctgggcatgttggcgcacgcctgtagtcccagctactcaggaggctgaggcaggagcatcatttgaacctgagaggcggaggttgcagtgagctgagatcacaccaccgcactccagtctgggcaacagtgtgagactgtctcaaaaaaaaaaaaaaaaatcttggctgggtgcggtagctcatgcctgtaatcccagcactttgggaggccaaggcaggtggatcacaaggtcaggagttcaagaccagcctggccaacatggtgaaaccccacgtctactaaaaatacaaaaacattagctgggcatggtggcgcgtgcctgtaatcccagctactcatggaggctgatgcaagagaattgcttgaacctaggaggcagaggtagcagtgagccaagatcacgccattgcactccagcctgggcaacagagcaaaactccatctcgaggacagaaaaaaaattgattgctctggctctactgatacaatcttaggctgcttaatgggatcttagttgaataggatgctgtacatcttacaggtattggaaggttgaatgaaaccaagcccatgcattcaatagtggctgctatcattactaaccgttgcaattaccctcttttctttttgcctgagaataatgggatgcagggtgagggggaatattgggtgaattaaagatttgggtcactaatttctttctttttttctcaagatatagtcttgctctgtctyctaggctggagtgcagtgccacaatcttggttcactgcaacctctgcctcccgggttcaagtgattcttctccgtcaacctcccaagtagctgggattacaggcacccacctgtatttttgtatttctagtattttgtatttctagtagagacagggttacgccatgctggtggccagggtggtctcaaactcctgacctcgggcaatccaccacacccagctaatttttggtatatttagtagagccggggtttcaccgtgttggctgggctggtctcgaactcctgacctcaagtgacatccatcttccaaaatgctgggattacagccatrtgccaccacgcccagctaattcttgtatttttaggagaaatggggtttcatcatgttgttccggctggtcttaaactcctggcctcatgatccacctgccttggcctgccaaagtcctgggattacaggcatgagccactgtgcccagccactcatttcttatgaatttattctaacacrttttccggatgaacagggcaccttgaaacataggttagtgggctgggtatggtggcttctgcctgtaatcccagtactttgggaggcctaggctggtgtatcgcttgaagtcaggagttttttgttttgagacggagtcttgctctgtcgcccaggctagagtgcagtggagtgatctcggcttactgcaacctccgcctcctgggttcaagtgattctcttgcctcagcctcctgagtagctgggactacaggcacgtgtcgccacgcccatctaacttttgtatgtttagtagagccggggtttcaccatgttggccaggatggtctcaaactcctgacctcctgatctgcccacctcggcctcccaaagtgctgggattacaggcatgagccattgccccggccaaagttaggagtttgagaccagcctggccaacatggtaaaaccccatctctactaaaaaatacaaaaattagccaggcaagatggcatttgcctgtaatcccagctactcaggaggctgaggcgggagaatctcttgaatctaggaggcagaggttgctgtgagctgagatcgcgccactacactccagccagggcgacagagcataaataactccctttcaaaaaaccaaacaatgaaacataggttagcggagtctgcatccaacattagagtcagattgactaagttctgtatttccagctgattcctgggcgatgttggtgccactggtctgaccaccctttgacaactgctgctccagataattcaagtcggggtataacacaaccagtgagatgtaaaccaaagacgattccacggttagattctcaagaatgacttgttctgccrggcgcggtggctcacgcctgtcatcccagcmctctgggaggccgaggtgggcagatcacctgagattgggagtttgagaccagcctgaccaacatggagagacccccacctctactgaaaatacaaaattagctgggcatgktggtgcatggtgcatgmctgcagtcccagctactcgggaggctgaggcaggagaatcacttgaacccaggaggcggaggttgctgtgagccgagattgcrccacctgggcaacaagagtgagactcagtctcaaaaaaaaaaaaaaaaatgacgtggtcctatttctcccacaggttggtgtcttgttccgctaccactcagcagtgggctgatctctccttggcccttgargtcaaccagtccctgacgtgcgtaaacctctccgacaatgagcttctggatgagggtgctaagttgctgtacacaactttgagacaccccaagtgctttctgcagaggttgtcgtaagtctctcctctcttmcagagcagctgtgctttcgatctggggccacagacgagcaatggtcatgcctgacttggctgtatggaacctctygctgatgtgaacacctgttcccatgtttagatccaggccgatggcctgtgaattttgttcttctctcattcctattccttcataggatcaccagtgcatgatagaaggtggggagttcacaagaaggggcttttggatgctggcacttgtggagctagccgggaaggttgaagttggacmtgtcaaccgtgttgccatttgtgattcttttstaggttggaaaactgtcaccttacagaagccaattgcaaggaccttgctgctgtgttggttgtcagccgggagctgacacacctgtgcttggccaagaaccccattgggaatacaggggtgaagtttctgtgtgagggcttgaggtaccccgagtgtaaactgcagaccttggtgtaagtccgtgctggctgcctgtgtgcgtgggtgtatatgcacacgccccccacctccgggtttgagtagggtggttatgagaacacttaattcctctaaaagttccaagcatgatgctaatgacaactggtaagacctgggtagatgatggtaggaaaaaagtataagtagtagtagagtagtagtaatattctatagggatttggggaatgtagctggttttcgggtttttttttttcctctttatgtatgtatgtattttagagatgggatctcgccgtgttgcctaggctggtctcaaactcctgagctcaagagatctgcctgccttggcctcccaaagtgctagaattacaggcatgagccatgtcaccccatgctgtgttttctcttaatctgtgttcttagaactataactgtaacataaattgcaygcaattggttgtaaatggaatcatttacttattttttaatgaatgatttgcaaatcaggtagtcttctgggccagtgtacgctcagactcccaatggaagctattggaagctacatgctcaatgtgatcctcctkttaatactaaaatcacaggacacgtggcctggcatagtggctcacgcctataatcccatcaccttgggaggccgaagcaaggcagatcccttgagggcaggagttcaagaccagcctgcccaacatggtgaaacattgtctctctactaaaaatacaaaaattagtcacgcatggtgggacatgcctgtaatcccagttactcaggaggctaaggcaggagaatcacttgaacttsggaggtggaggttgcagtgagctgagatggcaccactgaagtccagtctggccaatagagcaagactctctcaaamaaaaaaaattataggacaaatctttagaaaggaattggggcctggcatggtggctcatgcctgtaatctcagcactttaggaggcgggcagaacacctgaggtcaggagtttgagaccagcctggctgatgcagtgaaaccctgtctctactaaaaatacaaaaattagctaggcgtggtggtatggtcctgtaatcccagctacttgggaggctgaggcaggagaatcgcttgaagtcgggaggttgcagtgagccgagatcgtgccagcctgggtgacagaacgagattgtctcaaaaaaaaaaaaaaattgtatctgcactgatggtttctgttcagagattcgattttatgttaacatctctggtattttttttttttttttttaagatggagttttactcttgcccaygctggcaatggcatgatctaggctcactgcaacctccggcttcaaggaggttgattctcctgcctcagcctcctgagtagctgggattacaggcactcaccaccacgccgggctaatttttatatttttagtagagatgggatttcaccatgttggccaggttggtctcgaactgacctcatgatccgcccgcctcagccttccaaagtgctaggatttacaggcatgagccactgcgtccagccatacatatctctggtattctttgtctctaacatcacctccaacagttaggaactgtcctcttcctatgaagtaactaatctaggatatgtacctggcatctgaaaactacccacttaaatttaatgacatattcagttcatggctggagacgatgagtagaaggaaaggattcttcccacacccactatatctaggccctgaaacaytaaaaaagaagtcccacaagcagtgagatgtcaccgactcactaactgtatcttcaaatgaatgtctagtttttttggttgtgtgtgtgtgtggtgtgtggtgtgtgtggtatttttttgggggggggggggttttcttttttttttttttttggttttttttttttgatagtcttgctctgtcgcccaggctggaatgcagtggctccatctcagctcactgcaacctccacctcctgagttcaggtgtgattctcctgcctcagcctcccagggattaaggtgcatgccaccacgcccagctaacttctgtatttttagtagagacgagttttcaccatgttggtcaagctggtctcgaattcctgacctcaggtgatccacccacctcagcctcccaaagtgctgggattacaggtgtgagccaccgtgccggccccctcaattcaactttttgatccatgcccctattttgctaagttgtcaacttccctttagtcttatgtgggttttcctccattacagtcatggaagtttctagaaggccgggtagggtctttgagaggccgaggcaggtggatcatgaggtcaggagttcaagaccagcctggccaacatggtgaaaccctgtctttactaaaaatacaaaaattagccaggcgtggtgtcggagcctgtaatcccagcttacttgggagggtgaggcagagaattgcttgaacctgggaggcggaagttgcagtgagctgagattgtgccactgtactccagcctgggtgtcagagcgagactgtctcaaaaaaaaaaaaaaaaaagtttctatacattcataaagtttcaagatttgggggtgtgttttcacttctccatcgtcatggactccaatctgccatctatttccaaggcccttccaggtcctgtgtccctcagctagtggtatgcttcacttgggacccagagatacatgggcattatagttcaaattataattaagtttagaactctattgagacagaagaaagaaaacagagctaaggtgaaatatctctgataatctgtgttggttaatatctaggatcctagtaccagatatgttggagtgtgagctggtgtcttctgcctgtaagacactacctctctagcaactgaatttagcaaatacaatcgtaatcccagcatgttagggaggccagggtgggcagatcatctgaggtcgggagttcaagaccagcctggccaacatggggaaaccctgtctctactaaaaatacaaaacttagctgggtgtggtggcacgcgcatgtgtgtacacacacacacmcccctgtaatcccagctactcggaaggctggggcacaagaatcgcgtgaanccaggaggcggaggttgaagtgagccaccgtgccagctgagaatccttyttacttctccaacttctgttggccacctgcattccttggcttgtggcccttcctccaacttcrgcagagcatcttcaaacgttgccctggctcccttatcacgtcacctcctgctggctttgactctcagctccctcttatgaggatccctgtgattgctggacctacccaaataaaccaggatataaaccatcttaagatgctcagtcacctctacgaggtcccttttgctcgcaggtgccaggagttgggacttggacatctttaggggaggccattcttctgtccaccacaccaccccatgattccatttccatgtcaccactgtctctaagtgtgtctaacccayggctcaagagtcaaaggtgcatcacagcagtgagaactcacaggttcgggtttgctttcttcctgtggttgatttctaggctttggaactgcgacataactagcgatggctgctgcgatctcacaaagcttctccaagaaaaatcaagcctgttgtgtttggatctggggctraatcacataggagttaagggaatgaagttcctgtgtgaggctttgaggaaaccactgtgcaacttgagatgtctgtggtgagttaacttataagttcaacttcctatacttacaccttactgaatctgtggctagtgtaaaataatcagtgaagccgacttcccaagttatataattgagaggacctttatagagtcgatcgagcatttactaggatggttaaaggaataagttctagtctatgtctaagtttttgtttttttttttcttgaagttttgctcttgtcacataggctggagtgcagtggcgtgatcttggctcactgcaacctccgcctcccaggttcaagcaattctcttgcttcagcttcccgagtagctgggattacaggcgcccgccaccatgcccagctaattcttgtatttttagtagagacagggtttcgccatgttgaaggttcatctcaaactcctgacctcaggtgatccgcccatctcggcctcccaaagtgctgggattacaggcgtgagccactgcgccaggccctatgtctaagttctagtctgtgtyatgcaaagaacacctgtgaaattttaaggatacagtgcctcaagccattcagccaaaagccactgcccagcaccccacattcagagaggtgggaattgggccaggcacagtggctcatacctgtaatcccagcacttygggaggccgaagcgggcggatcacttaaggtcaggagctcaagaccagcctggccaacttgaaactccatctctactaaaatataaaaattagccgagcrtagtagtgggtgcctctttttttttttttttttttttgagatagtttcactcttgttgcccaggctgtagtgtaatggcgcgatctcagctcactgcaacctccacctcctgggttcaagtgattctcctgccttagcctcccacatagctgcaaataaacaggcatgtgccaccatgcctggctaattttgtatttttagtatagacggggtttctccatgttggtcaggctggtctcgacctccggacctcaggtgagagccaccgtgcccagccagtaggtgcctttaatcccagctacttgggaggctgaggcaggagaatcacttgaaccctggaggcagaggttgcagtgagctgagatcctgtcactacactccatcctgggctacaagagcaagactccatctcaggaaaaaataaaaaagaggtaggaattagatatcgtgccagaaaatgctggctctatcagcaggtgagtggtctcaacttggctatcttacaaatmccttgtgagttagctacaatcagatgcacttgaacctggaatcctatctgggaggcaatcttaaaagaatttgactcgggatgggcaaggtggctcatrcctgtaatcctggcattttgggagtccaaggcaggtagattgcttgaggccaagaatttaaaaacagcctggccaacacaatgaagccctgtctctactgaaagtacaaaaatccgctgagcatggctgtgtacctctgctcccagttactcaggaggctgaggtgggaggatcacttgagcctgggaggaagaagttacagcgaattgagatcacgtcacctcactccagcctgggtgacagtgagatcctgtctcaaaaaaaaaaaaaaaamaaaaaaaacaaaggcgcctttttaatcactcactgacacgtgtagaggmgcaaaaagtttgagttgctggttggcccaggaggtcaaggctgcagtgagccaagatggcgttaccacactccagcctgggcaaccgagtgagaccgtgtttcaaaaaataaagtggcagggtgcagtggctcatgcctgtaattccagcactttgggaggccgaggcaggtggatcacctaaggtcaggagttcgtagaccagcctgtctctactaaagagacaggtgaaaccctgtctctctaaaaccacaaaaatcaggcrggcatggtggcacatagctataatctcatctacttggaggcacgagaactgcttgaatccaggaggcagaggctacagtgagccgagatcatgccacagcactccagccctggcgagagagcaagactgtctcaaagaataacttcaaagatggaagttatttaacctctctgctcaaaagcctcagtgcttccctatgtcaatccaggtaaaatcctatattgacgatggcttcagggtcttctgtgagctggccactgcttacctatgacctcatcttgacaatcctccctgtctcactcatgcccgctgcctggatgttctattttacgtgtcagtcacatgtatcttcagggcctctgcacaagctatttctctgcctggagaactcccccccgagctctatgactcggtctcttcaccccctcacctccaaccattgtagccagaacccccagttattccctgtaccccttgcccttcagaacccctcatcgcctccatattttcctgttagcagatgagccctgagggcggagacgttttgtttgttttttgagaccggagtctcactctgtcacccaggctggagtgcaatggcgcgatctcggctcactgcaacctccgcctcctgggttcaagcgattctcctgccccagcctcctgagtagctgggattacaggtgcctgtcaccacgccyagctaacttctgtatatttagtagagacacggttttaccrtgttaggttggtcttgaactccttgacctcaggtgatccatccacctcggcctcccaaagtgctgggattacaggcrtgaaccaccgtgcccggcctgagacttctgttggtcatgcagatccccaacacacgagggtgggcttggcttgccggagggcatcgatcagcactggctgcattaacgtgttgatttctgtgtttccccaggttgtggggatgttccatccctccgttcagttgtgaagacstctgctctgccctcagctgcaaccagagcctcgtcactctggacctgggtcagaatcccttggggtctagtggagtgaagatgctgtttgaaaccttgacatgttccagtggcaccctccggacactcaggtatgatccatttacttccccatcaggctttctccagagtggtaggtttaggggaagcataatgacatggacctgctgtaggagactgatctggtagctggattacaggttcccgccatcacacccagccaatttctgtatttcacttggagaaacggggtttcaccatgttggtcaggctggtctcaaactcctgacctcaggtgatccgcccgcctcggcctcccaaagtgctgggattacaggcgtgagcaaccgcacccggcyaccttttttttttttttcctttgaggcaagaactcactatgttccccaggctggagtccagcagcacaatgatggctcgctgcaggctcgctccagctcctgggctcaagcaatcctgcctcagttcctgagtaggtaggtttataagcatgaaccattgcacccagccacggctgccgtctacctgctcatgatagccatttgtcactgggctgtgttttgtttgttgcattttgtcagggttttggggttttgttttgttttttctttctttttttttttttttttctgagatggagtctcactctgttgcccaggctggggtgcagtggttgctaactgcaacctccacctcccaggttccagctattctcatgcttcagcctcccaagtagctgggattacaggcatgcaccaccacacctaggtaatttttgtatttttagtagagacagggttttgccatgttggccagggtggtctcaaactcctgacctccgtgatttgcccacctcagcatcccaaagtgctgggattacaggcatgagccaccgcacccggcctgagttgtattttgataccatggcatcaaagaaccaagaagccccttcctaggaatgtgggaacttcagaaattctcacaagcaatatactctactgctggcttaaaataatctttatgtagaagaaacatagattacttgtttatttaacatgaaactcagcctaagatactttgtaagtcaaaagacatatggacactaagggtttttttaagctttaagtttgtttgtttgtttatttattatttattttggagacagttttactcttttttttggggtgcatcttttttctttttttttttttttttcctttttttttttttttttttttattgatcattcttgggtgtttctcacagagggggatttggcagggtcataggacaatagtggagggaaggtcagcagataaacaagtgaacaaaggtctctggttttcctaggcagaggaccctgcggccttccgcagcgtttgtgtccctgggtacttgagattagggagtggtgatgactcttaacgagcgtgctgccttcaggatctgtttaacaaagcatatcttgcaccgcccttaatccgtttaactctgagtggacacagcacatgtttcagagagcacggggttgggggtaaggtcacagatcaacaggatcccaaggcagaagaatttttcttagtacagaacaaaatggggggctgacccccccacctccctcccggacagggcggctggccggttagaggggctcctcacttcccattaggggcggccgggcagaggcgcccctcacctcccggacagggcggctggctgggcggggggctgacccccccacctccccgcccggccagagttttactcttgttgtccagcctggagcgcaatggcgctatctcggcttactgcaacctccgcctcccgggttcaagaggttctcctccctcagcctcccaagtagctgggactacaggcatgtgccaccacacctggctaatcttgtatttttaatagagacagggtttctccatattggtcaggctggtctcgaactcctgacttcaggtgacccgcctgcctcagcctcccaaagtgctaagattacaggcgtgagccaccatgcctggcctgcatctcctctgtttaactggtactccggggtccactgagtagaagttgccaaagtgggtgatagagcgggtaagcaggtattagagctatagcccagctgtactcagcaattccattttctgtgtatgataatcaacaagcatctcaaactgcacaatggctatataccattacaaggttaacctgatgttatgtttttctctatcagatcaacatggttgagaataagaggaatgaaaaaaaggattaaaaagagaaatgaaagtctttaatattacattttattatttacttcatttattttttagacaaaaatctcactctattgctcaggctggagtgcaggggcccgatctcagctcactgtaacctccgcctcccaggttcaagtgattctcctgtgtcagcttcctgagtagctgggattatagggatgcaccatcacacccaactaacttttatatttttagtagagatggactttcaccatcttgcctaggctggtctcaaactcctgacctcaagtgatctgcccacctcactctcccaaagtgctggcattacaggcatgacccaccacatctggcctcattttatatttaaaaataaaaaataagcaaatcaagccaggtacagtttaggcaacatggtaaaaccccaactctactaaaaatacaaaaattagctgagcatggtggcaggtgcctgtagtcccagctactcgggaggcagaggataggatggcttgaacccaagaggcacaggttgcagtgagctgagatggtaccactgcactccagcttgggcaacagagagactgtctttttttttttttttttttttttttttttttttttttttgagatcgcccaggctggagtacagtggcacgatctcggctcactgcaagctccgcctcccgggttcacaccattctcctgcctcagcctcctgagtagctgggactacaggcgtccgccaccacgcccggctaattttttgtatttttttagtagagacagggtttcaccgtgttagccaggatggtcttgatctsctgacctcgtgatccaccygcctcagcctcctaaagtgctggsaattacaggcatgagccatcacgccccacctgagactgtcttttaaaaaaaaaaaaaaaaaatcaatgtggaacactcctttgccacctagaataatcaggaaaggtgacccatgccctgtgcctccttaacagactttcaggtacttgggaatttgaaacaaatctccttgatgcacaaagtaaccttttcttcccccattgtaccccaggttgaaaatmgatgactttaatgatgaactcaataagctgctggwagaartagaagaaaaaaacccacaactgattattgatactgagaaacatcatccctgggmagaaaggccttcttctcatgacttcatgatctgaatccccccgagtcattcattctccatgaagtcatcgattttccaggtgtkggtgaactgcctgtgactcctctcctccccsgcccctacccctcagggataatgagttcattgctgggctagatgttttagccatgattctgcctctgttttatacctgcacacrtccttatctttgttacatatgaaatatctgtatcacgggtatattgagagaaataaaggtgagagcattcacaaatgaagctgttacttaataatgggctttgacaagttagagaaaagatatcttactgggtagaacctggggggtgggggaagtgacagtgtttaattgcattgatttctattgccttgtcaatctttgccttgccttggtatttcctttcttttttcttttcttttttttttttttttttttagactgagtttcactctgttgcccacgctggagtacactggcacgatctcagcttactacaacctggcaggttcaagcgattctcctgtctcagcctcctgagtagctgggattacaagcatcccccaccacacccggctaaatttttttgtatttttaatagagatgaggtttcaccatgttggccagtctggtctcaaactcctgacctcaagtgatccacccacctcagcctcccagagtgctgggattacaggcatgagccactgtacccggcttttttttttttctttttctttttcctcaagcatgagtgttgctctgttgcccaggctggaatacagcagcatgatgatagctcactgcagcctcaagctcccaggttcaagcgatcctccagcctcagcctcctcagtagctgggactacaggtgcacaccaccaaaccaggccaatttttgtgggatttttttgaagacagggtctcactatgttgcccaggctgatctcaaactcccaggcgcaagtaatattcctgcctcagcctcccaaagtgctaggattacaggtgtgaaccactgtgcctagcctgtcttgttacttgttgacctgcgtggatcactgcctgctgagtattacttgccagaggatttctcctaccaatctacaatattttaggtgcttcggtgtagctcatatatgaccatgtcattgctctgattttgctttttaaaaattctaacttaaaatagaatctcggccaggcacggtggctcacacctgtaatcccagcacttcgggaggctgaggtgggtggatcacgaagtcaggagttggagaccaacctggccaacgtggtgaaaccccgtctctactaaaaatataaaaaattagccaggcatggtggcacatgcctgtaatcccagctacttgggaggctgaggcaggagaattgcttaaacccaggaggtggatgttgcactgtgctgaagactgcactactgcattccagcttgggcaacagagtgactccttctccaaaaaaaaacaaaatctcatggtatgcatagtttttcactatagagtctccattatttccttgtgatacagaattccaaattcaacaaagcagcagtgcaagctctacgctgtaaaaccacaaacaaaacgaactgtactataaagacaacactagttggcaaagttgcttctcatggggagactttgttgctgtctgtgtttactggatgagcaaacaaatggacggtaagggggaaaaagaacagtacaaatttttattaaacactaatcatgtttttttttgtttgttttgagacagtttcttcttgttgcccaggctggagtgcaatggcacgattttggctcactgcaacctccgcctccccgggttcaagcgattctcttgcctcgacctactgagtagctgggattataggcatgtgccaccaagcctggctaattttgaatttttagcagagacggggtttttccatgttggtcaggctggtctcgaactcccgacctcaggtgatccaccagccttggtctcccaaagtgctgggattacaggtataagtcaccgcacctggcaacatttttttcttttttttttttttttttttttttttttttggtggcagaatcttgctctttcacccaggctggaatgcaatggcacgatctcgggtcactgcagcctccacctccccagtttaagcagttctcccatctcagcctcccatgtagctgggaccacaggtgtgcaccactgcacccaggtaatttttgcatttttggtagagatagggttttgccacgttgtccagactggtcttgaactcctgagctcaggtgatctgcccaccttggcctccccaaatgctgggattataggcatgagccaccacacctggtcaaaagtagttttaatatttaaatttaaaactaaaaaagttaatctctcttcctactttcatttcttcatcaggggctattggtttattcccaccgactagatccaagttctctgatactacctttaaaccactccatcactttccagttccactgcatacagtgtgggcttctgaggtttcctggttcaaggtgtccttgttcaatgcggcatgggtcattccctgagcattttttttttttttgacagtctcgctccattgcccggtttggagtgcagtggtgtgacctcggcttactgcagcctctgcctcccaagttcaagcaattctgcctcaggctcccggataatttttgcatttttagtagagacagggtttcaccgcgctggccaggctggtctcgaacccctaacctcaagcgatctgcctgcctcggtctcccaaagtgctgggattacagacataagctaccgtgcccggcctccagagcatctttattctcagtttcagcgggaagaagggggaaggttggtaaaaagagaggcacaaagtttaaaaaggacattgcgtgaagaaactaaaggtttctccttctccacactattgacatttgggatcggatcactactcgttgggaaacgtcctgtacatttccagggtgttcggcaccatccctagcctctaccccctagataccagctcacatcctcacagttaacagtgatcaaaaatgtctctgggcagtagaaaatatttcctgaaatgcaaagttttcttaggttgagaaccattgtaatctagccccatctttagagaagaaattgagtaacggatctacatccattgaggaactatcgacaccccaggggcccatgaaatgtaaactcgcactcacaattaaccatctttctccaacgtgtgtatttcatgtagccacactctcagatgcccacccccatgacctacaagtcctaaacagggaaacctgtggcacatgggttcatgtgtgtctgaatctatacgttcagagatgaacaagtactgctctccctatacctgtgaccactcgcctccgcccatcactgaattctgaaaatgtggcctcaggctcacagcagcattagcacttgcttgctctggatctcatcacattgatgatcaagaacaaagtattcactgggttctctgctaaggatacaaaaaaaaccattccacaattccacggccatgtttgcacccaggaaccacgagggctgggttagcccagatggtgggcttgggaaatgttcctggagcaaaaaaaagagccagaagtcatgagagcctgaccccctcccccaacgcgcacacacacacaccactctctacctccaagcctcattttcaggcttctcaaagctaaggtcactcccatgagctaagccgcgcttttctcaatcctcagctcttccacaagaataggaagaactctctcctgttcaagatcctgtggctcagctgcagctctggaagaaagaccccggtgagggtcttgcttttcacaatccccaatcccagaccacatcctgtgccccaaaacaacttccatggtaaccacatccttcaggaagtgaagtcaggcaggaagtcaagtcagaagacggaatgggctgggcatggtggatcgcacctgtaatcccagcactttgggaggcagaggcaggtggatcacatgaggtcaggagtttgagaccagcctggccaacatggtgaaaccctgtctctactaaaaataccaaaagtagccaggcttggtggtgcatgcctgtaatcccagctactctggaggctgaggcaggagaatcgcttaaacccggaaggcggaggttgcaatgagccgagatcgcaccattgcactccagcccgggggacagaaaaaaaaaatgtagctgagcatggtagtgcacgtctgtgatctcagctacttgggagtctgaggcaggagaatcacttgaacccaggcggtggaggttgcagtgagccaagattgtaatagtccaatgtgttcaccttgcccactgcctagacagagctgattcgtcaagacagggaatcgcaatagagaataattcatgcagagctggctctacgagagaccagagttttattattattcaaatcagtgtctcccagcattcaggaagagtttttaaggataacttggtgggtgggtgggaagccagtgagccaggagtgctgtttggtcagggatgaaatcgtgggagccaaagctatcttcttgcactcagttcctgagtggaggccaaaagataagatgggccagtttattgatctgggtggtgccagctgacccatcaagtgcagcatctgcaaattaagcgctggtcttagaagcagtttagggagggtcacaatcttgtagcctccagctgcatgactcctaagtcataatttctaatctcgtggctaatgttcgtcctacagggccaatctagtccccaggcaacaaagaggtgtgctttggaaaagggctatcatctttgtttaaactataagtttctcccaaagttcagcctatgcccaggaatgaaaaaggacagcttggaggttagaagcaaaatggagtcagttaaatctctttcactgtctcagtcataattttggaaaggtggtttcaagctggcacaactgcactccaccctaggagacagagcgagaccctgtcaaaaaaaaaaaaaaaaaacaagaagtgaagtcaagataggaggtaaattcggaagacaggaagtggtggtagaagacaagaagtgaagtcatacaggaagtaaagtcagaagacaggaagtgaagtaagaagacaggaagtggttgtagaagacaggaagtgaggtcatacaggaagtaaaatcagaagacaggaagtgacgtcaaaccaggatttgcagtcggaggcaggcaagaagtgaaatcagaagacgggaagtggctgaggggaacgtcttttctctctcctgctcagcccgaagtgaacaggtagcatcaggtgtgccatttcagtgactgggcacagcccaggcacccacatctctctgcagcgcctattcttggaacaccagagacctctacactattttctgttgcttttttccttcattttcagagatgagatcctggattgaatgacttgaattactatggaaagtgattgaccaaggtaagtcacaactatcttgttctttaattttggtgttgtttgttatgacttgttagccgtctagcactcatagctttgcatttccactctgcattacttgtatttttattattttgtgatattcgtaataatttattataaaactgtgttatttttggatatttttaagttaaaatgcgattttttaactaagtggcagtatgcaaagcaagtggttcagaactctcccccattaataagtcttctctcctgaaagaaacaattttgagacttcctgttcttaattctgtttaacagcatacttctaaaagaaaaagtgtatactgttattatttattgtgttacaaaaatatacacgcacctttcatgcacgtccgtgtgaagagaccaccaaacaggctttgtgtgagcaataaagcttttaatcacctgggtgcaggtgggctgagtctgacaagagagtcagcgaagggggataggggtggggccgttttataggatgtgggtaggtaaaggaaaattacagtcaaaggggggttgttctctggcgggcagagtcggggtcataaggtgctcagtaggggagcttttgagccaggatgagccaggagaaggaatttcacaagacaatgtcatcagttaaggcaggaacaggccattttcgcttcttttgtg

SEQ ID NO: 5753 - DNA, 45517 bp, Homo sapiens
tcataaactgcaaaattgagggtaagggtagtagccgagtggctgaggaatcttgactgtggcacctttagccacccacttcttcaaggtcaaggatttacagggtgacagaagctgctttttggtcaattaaggggtgcaaaggagagccaaccgcacagtgcaggggtaatgggggccttctgcactgtggatgggacgtcaaagaagcttgttttgagagtcttacattcttttaatccttggggcaacgtcaggaagtagacagttctcatcatccctactgcacagaaaggaaagtgaagctaacttttccaaggccacacaagcatccctgccccttaacctctattctaccaacctctactgagtcaattagaggagaagggagccatttgcttccactccaaggaccctcctctgtactaggccagctttccttctagaagattcttcatgcaaataggggatgtaacagggaaccacagacctctgctcaaaaccccactacccaaatcccaaactgcctgatcccaactcccctgatggacaaggacagacacttatttgcaaaccacatccccaatcaggtgccatgaccatagtagttggctgccagctctgggctctgctgcactatcgctgcaacctgcccaacagcctggctggggtcctagctgaaggtcccagcctctctggaactccgacctctcctgcacaggcttccagaatcaatccagctatgacagtcaagtttccatgtaacttttgagcaacctgcactttggagttcattacaggcaaattttttttttttttctttctgagatgaagttttgctcttgttgcccaggctggagtgcaatggcgccatcttggctcactggctcactgcaacctcctcctcccaggttcaagccattctcctgtctcagcctctggagtagctgggattacaggcatgggccaccatgcccagctaattttgtatttttagtagagatggggtttcaccatgttagtcaggctggtctccaactcctgatctcaggtgatcctcctgcctgggcctcccaaagtcctaggattacaggcatgagccaccacgccctgcccagacaaatctttttaagcacaaaagggcctacatgtatttaatctacaggacaaagtaaaagtcttatccatgttaacttagtaaccaagaagacctgcccttcactatggtaagcaaattattttcacaaaaacagttcttctagccctgtagctaaatgtacagccaaggttccaaacttttatctttgatcactaggataaattctaattttaagtctcaagattataagccagctcccaaaggtacagcctggataaacacaaacatcacttttttattcaatgagtactttctaagtacctatttattaaaacttaccatgtaccaacaacttctctaaatgctttataggtattaaactcatttaattctaacaaccttatgagttaggtgacattactaccccaatatacagaagctaaggcacagaggtaaattgcatgacccagtgatgcacagaggaggcagcaccgtgcttaggctctggagctaccatccacagcgagcttacaaatatacccaacttgccctgcacttcgccagcaaacactcgcagcacctactcaaaccatctgcctcttcacaaccagtctctttagaaaggagacttaatcaagaaaaatgccaccaatggagagagcaggcttaattatagcaaactaagggaaggaaaaaccaaacaaatcatataaatgtagtaagcccccctttgaaaggcccacttatagaacaactatgctttcttgcctacaaagcaaggtgggtcttccaacactaatgcacatccttctcccactttgcataatcttttaaaagacaccacccttctgcccagggcagggtcaggttcctctactcaggagcctccactcggtcagcttctcacagggccattgccattgaccccccaaagcagtaagttagtaactggtgaggacaaaggtctatggcacaggctgtgtttttggtcaggagctatttccctcacaacattggcaggcttaaggctccacctccttcaagtctttgcccgtaagtcacttttacaaagactatgactcccatatttaaaattgcagccaccataccacagaaactcctgtccctcttttctgctctggtgttctctttgtgcttcccaccagctcacaatgtgtttcacctatttaaatgtctgtctctacccatcagtatgcaagtttcatgagggtagggatttgggctgttttgttcactattagactctcagagctttgaagattgcctggcttaggggacacatacagctacttgttgagtaagtgaataaatacccacaaagaacagatacttgtctctaactctcagaccttcccccggttgtcaaattcaggctgcaaacttagaattccccgtgagggagaaaaggggctgttacttccaaagaaagataatttggcaactaaatccatcatgtaagtacccagtttcccacagagtagagcaggtagagaaggaatctggaatgctgaactttgttgatgtccgagctcccaggaaggcataaaaggagaataataatagaagaggacgagtcagggatagcattctcagcagggtgggaaacatgctaatgagaggaagactgtaaagaaaaagcaaagcgccagcgggggcgcagtggctcacacctgtaatcctagcactttaggaggtggaggtggacagatcacttgaggtcaggagttcaagaccagcttgaccaacatggcgaaaccccatctctactaaaaattcaaaaattagccgggcatagtagtgcatgcccgtagtcccagctacctgggaggctgaggcaggagaatcgtttgaacccaggaagtggaggttacagtgagacaacatcgtgccattgcactccagcctgagcaacagagcaagaccttgtctgaaaaataaaaagaaagaaagaaagaaaagaaaaagaaaagcttacgaaattccttttagcaagtagtaagtgctggttagaatgaaaaacatcatatactgggtgaagaccttagttttagttgagccattgccattcacccttggacaaatcacatcacttttctggcctcaaatgatttcctaatccgcaggatggaatgtgggaagtgggctggatttttaagaaattctaggaccggtgcagtggctcatgcctgtaatcccagcactttgggaggccgaggtgggtggatcacatggggtcaggagttacagaccagcctgaccaacatggtgaaagcccgtctctactaaaaatacaaaaattagccggacggggtggcacacacctgtagtctcagctactcgggaggctgaggcaggagaatcgcttgaacctgggaggtggaggttgcagtgagccaagatcatgccattgcactccagcctgggcaacaagagtgaaactctgtctcaaacaaacaaacaaactagctggacatggtggcggacgcctgtaatcccagctacttgggaggctgaggcaggagaatcgcttgaacccaggaggcagaggttgcagtgagccgagatcacgccattgtactccagtctgggcgacgagtgaaactccatctcaaaaaaaaaaattagctaggcgtgatggcgggcacctgtaatcccaggtactcaggaggctgatatgagagaattgcttgtatgcaggaggcagaggttgcagtgagccaagattggacacagcaagacttcatctcaaaaaaaaaaatagatctcaaggcagcagctaccatgtaaaaaaaaaaaaagataatgaatcattcatatatacattaactaattactgattattaatacaacatatatcgaatacttattatgtgccaggaagaattataaatgatcatctgttaggaacccatttaattctactaacatcccaatgacctagacattacttttacttaacatttgaggaaactttggcacagaaaggttaattaatttgcttaaaaccacacaagtagtaaggcaggaaacagggtttccaggtgtttaggatatagacaaaaataagacaatacatgtatttgcccttatggagttgataaacatatttaatttgctctccaattaacgaaagtatattcagtgagcacctattctcagtactggcccagatgcattattattgtactaaattatctgcactattattatgcactaaattatctcttcacaatcagtctttctaaaaggaagatttttatattaaaacaaaaagccactggaaaaggaagtaagtttgaatacaagcaaacaaaaacagaaagtaaagcagaaatacagtttagcaagccacatgttgaaaagcactaagcagtaagtattgtgatttctttttttttttttcttagacggagtttcgctcttgttgcccaggctggagtgcaatggcgcatctcagctcactgcaacctctgccccccaggttcaagtgattctcctgcctcagcctcccaagtagctgggattacagatgcctgccaccacactcggctaattttttgtatttttagtagagatggggtttcaccattttggataggctggtcttgaactccagacctcaggtgatccacccacctcggcctcccaaagtgctgggattacaggcatgagccactgggcccggacttttcaccaccgatgactttgtaattcactcaaaaacctattacaaagttaggagttacaggacaattacaatttagtaactgctgtggctggcaacagttacttacataacgggtgatgtgaaaggtcccaagagcaaactcagtaaggtcacacagaatatatctttccctccttcatctactagagggaatatatttttccctcttccttctactctcatttttcctcaccagtcacctcccagacaaaaagcagccagtgttacttcctgggagtaaagctggcaacgatacccactaattaagcattcagatgtcccgcaagggtagaacaggcagaggtcaagtggaatgcagaatattctcaggactcaggagccaaattacgtttcaagtaactctaggaccagggcagagagatggctgttagagagaagcacgagattgaagagaaaggaaaaatgtattagatttcacttagcgtatgataagactatggtatagtgggaaaagctatgagctggaaggaccctctgtcattatcagccttgtagtcttgtcaagccttgtcacctcactagtctccatctactcacctccaaattaacgggaattaagtagattggatttctgagttctgactaggggggctccaggaagccgcaactacccactctcccggcagaaagtcaccagcagctgcgcgtttgggagcatagtcggcacaggacttttccccgaagcacaggagccagcggctacagccactaggcagtccacttgcaaacgcaggttgtgcccgggttctctttctttggctgcaggtcttcaggtgttatgggcctaactcttccgctacaagtgtccctcccgcaaaaaatgggtccgggggacctgcacaccctcagagccctcgtccacagccccacactcaacaacaatgtcaggtgcttacgcggagatctccttcccgttcaggatttctgctggcgccatggcctttattagtccgctgcccacgatggacaccaccaatatcgaggttccactccctccgcagccaagcaggacaacccaacccacgtgcttagggactggccaggggatcacactactgcgcctgcgcccctgcccgcttctccccctgcagacgcggtggcgcatgcgcagttcggaaggacccgagtcccttaactaaccgagagctaacaggtcggggactgcgggacggaagagggaggggaagatgaagaaaatcggtgatgaatggctggcggaaatgattggcggaaagaaagagccagttcacagtgcgcctttgtattcggcgggaaacccggccgaagagggagctggaaaggactccggaatscggccgtaattccagccmatcagggagtagagttgcggggcggggttggggcggggmagtctcgcgggagatagtttcgcgggttcgggaggcgagwctccggtttccgcccagtctctggggacgcggtggcggggtctgaatcgcctggcttccagggagttttgggcgggtccccgcacgggagcgtggcaggcgctggactcgacagcagatgtggaactggagagcttggcgcgccctcatactttgtcacacacctacgccaccagactggggtcgggcccctccgcgttctgctctggagggcctgggtctgggcccagcatagcgcttttagaatctcctcagctgaatctgacgctcagccgtaggtgaagcttagcccgctgtttcaggccccgccgatctggaaggagtgtcagagctggagcgcgcgtggcctcatcggtgttggggtcaccccggggttgccagggctcatggagggtcgtagtctggattttgtcacccccacgtccccgccccgcagcaagtctggggttggagaactcacgcggtcttcgtaagctacatgccagttgaccctcgaggagggatgctccctccccttaagcgtccacgctggagaaggagtaagatggacaattgcctggggagcctgacagggcggtggcagctgggatgctggagaggactggccccttgtgttactgagtccaaggaatatgcttgctctgctctaggaaccgcgttcaggttacagtcatcccagtagagtcctgaagatgcgtggttcaggtcacttaggacttgaccagataccgggtttcttttacaagccgtttactactggcagagctcatctaaaactttttttgtttgtttgtttgagacggagtctcattctgtcgcccaggctggagtgcagtggcacgattttggctcactgcaacctccgcttcccgggttcaagcagttctctgcctcagcctcccgagtagctgggattacaggcaccacctaattagcccgccaccacgcccggctaatttttgtatttttagtagagacggggtttcaccatcttggcyaggmtggtcttgaactcctgacctcgtgatccacccgcctcggcctcccagagtgctgggattacaggcgtgagccaccgcacctggcctaaaactgattttttattaattttggggcttttaatatttttttcttatttctaaattctgaggttatttatagtagccccatatacgggattagataatctcttgtgattttctatttctggtaattatttctaatatatgtttttttgtttttgagacggagtctcgctatgtcgctcagggtggagtgcagtggcatgatctccgctctttgtagcctctgcctcccgggttcaaatgatcctcccacctcagccccccgagtagcttggaccacaggtgcatgccaccacgccggctaatttttctatttttggtagagttggggtttcactatgttgaccagactggtctagatctcaagggattagtctcccttggcctcccaaaatgctgggataatgggcatgagccaccgtgcgtggccttaaagttactattcttaaagtttgcacaagtgatatgttaaaggcacagacttagtaatataatgtcattataataataaccctaaaacacattgtctcatattgtgttgtacctaaacaagtgaaattaagaagaaaattgaaggaaatgtttctggtaaattgcagatagtgaatcttttgtcttatactatcaaataggtattgactattccagctttcttatttgttgaggaagatggcagaaatcccrttttacagagggatagactttgaaggataatacccaaagctgcatagctgtggctggtataggccccaaacctgatgtttcttctctaaatctactgcctttgccatctcaacagcctggtttttgacagttatctatgtatgagttgcataaatcgttcattcatggagcaaataattattgagtggccactatgccaacagcactgctatagatgctagagataccctagtgaaccagcaaagtttctgctctcagctcatattctggtggaggagacaacgatcaagttaaagaaatacataggctaattttagagattatgacatgctatattttaaaaataggcaagctaagaggataggcagtgatgctgggaggtgggaaagttttgtctcagaaatgtggtaagagatttctttgggcatctgacttcagcagaaaccttaatgaagagaggaacttggaatgtaaaagaaagaaagcagggatttgctctgagcaactggaaagatggaattgccattcgctgagttgaaataaagtaaaatgtaggactaggttttggggttaagattatgaattcggctttagacatttttagatttctcttagacatccaaatggagagaagatatttaaatccatgggattgaatgagatccaaccaagggtattgtaggtagagagaggaccaaagactgacacctagaacctttcagtgttcagaatgcaaggagacaggaggaaccaagagggaagattgaaaaggagagtccagctgggagctgtggctacacctttactaatcccagcactttgggagaccaaatacaggaagatcacttgaatccaggagtttgtagaacagccttagcaacatagcaagaccctgtctctacaaaaataaaaattaaaaaatttgcctgtaatccgagcattttggaggccgaggtgggtggatcagctgaggtcaggagtttgagaccaacttggccaacacagtgaaaccccgtctctactaaaaatacaaaaattagctgggcgtgatggctggcacctgtaatcccagctactcgggaggccgaggcaggagaatcccttgaacctaggaggcagaggttgcagtgagccgagatcacgccactgcactccagcctgggagacagagcgagactccatctcaaaataaataaataaataaaaatttaaaaagttagctgggcgtggtggcatgtacctgtagtcccagttactcagaaggctgaggtgggaggatcctgtgagcctaggagttggaaacttcagtaagctataatcatcacactgcactccaacctaggcaacagagcaagaccctgtctcttaaaaggaaaggagagtccagtgtgttctaaggaaaaccccaagagcatcccaccttagaakacaagtgaggaggcctggcatggtgtctcatgcctgtaatcccagcactttgggaggccaaggtgggtggatcacttgaggtcaggagttctagaccagcctgacaaacatggcgaaacctccgtctctataaaaatacaaaaattagccaggtgtggtagcgcgtgcctgtaatcccagctactagggaggctgaggcaggagaactgcttgaactcagggggcagagtttgcagtgagccgagatagtgccactgcactccagcctgagcaacagagtgagactctgtctcaaaaacaaacaagtaaacaaacaaaaaaaaaaaacaagacaagtgaagaatgtgtttcatggaaaaagaggtaattaattctgtcaagtgttgcaaattggtcaaataaagaatgaaaatcaacctttcacagcaaatagaaggaaaaaatatttttatttaaatgcttataaaggcagttgctagaaaaaatgtttactttttgcagaggccccgtttttacaacctttttcaggggtaatttgatatgataatatctacgggaaaaaaatgtttttttttttgagtcgctctgtcaccaggctggagtgcagtggcatgatctcggctcactgaaacctccgcctcccaggttcaagcaattcttctgcctcagcctcccaagtagctgggactacaggtgggcgccaccacacccagctaatttttgtatttttagtagagacggggtttcaccatgttggccaggatggtctcaatcttgacctcgtgatctgccttccttggcctcccaaagtgctgggattggtacaggtgtgaaccaccatacctggcccgaaaattttaaatttgtattttctttgacattgtaattccacttccaggattttttttttttggacaggattttactctgtcacccaggctggagtgcagtaacacaatcagctcactgcaaccctgaactcctgggctaaagtgatccttctgagtagttgggactataggcacatgccaccacccctgattaattaaaaaattttcctgtagagatagtcttgctatgttgcccagactggtctccaactcctggcctcaaaccatcctcccaccttgaccttccaaaacgttgggattacaggcgtgagccacctctcccagtttaggaatttatcttaaagtaatatttacatataaagaaagatgtataggctgggtgcagtggttcacgcctgtaatcccagcactttggaaggccgaggctggtggatcaactgaggtcaggagttcaagaccaacctggctaacatggcgaaaccccatctctactaaaaatacaaaaattagctgggcgtggtggccagcccctgtaatcccagctactcgggaggctgaggcaggaggatagcttaaacccaggagacgaaggttgcagtgagccaagattacaccattgcactccagcctgagcaacaaaagcgaaactccatctcaaaaaaacaaaaactaaaactaaacaaaacaaaaaaaccatgtgtaaaactgttaatcacaacactgatttcaatagcaaaaaacaaaatttctgtcaggatggatgcagttgttaaaggaacagcagatacatatgtatagacatgtaagatagctttcatacttttttttttgagatggaatttcgttcttgtcacccaggctggaatgcaatggtgagatctaggctccgcttctcaggttcaagtgattctcctgcctcagcctcctgagtaagctgggaatacaggcgcccgccaccacgcccaggtaatttttgtatgtttagtagagacagggtttcgccatattggcgaggcttgtctcaaactcctgacctcaggtgatccacccacctccaaaagtgttgggattacaggcatcacccaccacgcgtgaccagcttttatacatttttaaatgataaagacaggttaataaaatgtataatattatgttgctatatccaaaaaaaggccttctttgattacactatcaaaagttacctctccatytacatccccattactatctcattaacctgttttattcatagcacttactaccatctaaaatgactttatttctttatatttttgtttgctacctgtcttttacaccagaatttaatttttaagctttttttgtttgtttgtttgtttgtttgttttgagatggagtcttgctctgttgcccagactggagtgcagtggtgcgatctcagctcactgcaacctctgcctcctgggttcaatcaatcctcctgcctcagcctcccaagtagctgggattacaggcatgtgccaccatgcccagctaatttttgcatttttagtacagcagggtktcaccatgttggtcargctggtctcaaactcctgacctcaggagatccgtcagccttggcctcccaaagtgttgggattacaggcgtgagccacagcacccagccagaatttaaactttataagagatttcctgtcttgttcatacttatatacctgcagcttcgaaacatatatatatgtttaatatatataatagatatattttaaattatatatagagagatggagtttcactcttgttgcccagactggagtgcaatggcgtgatctcggctcaccacaacctctgccccccgggttcaagcaattctcctgcctcagcctccagagtagttggaattacaggcacgtgccaccatgcctggctaattttgtatttttagtagagacagagtttctccatgttggtcaggctggtctcgagctcttgacctcaggtagtctgcctgcctcggcctcacaaagtgctgggattacaagcatgagtcactgtgccctgccagaatttaagctttataagagatttcctgtctgtttatacttaaatacctgcagcttggaaacatatatatgtttatatgtatatattacatacattatatatatatttttatatattataattataaactcctgacctcaggtgatccacctgcctcagtctctcaaatgctgggattacaggcgtgagccaccacgccaggccagaaacatatttttaaaaatcttgttttagaggaaaaacagagtatttctttttttttttttattagatggattctcactctattgcccaggctggagtacagtggcacaatcttggctcaccgcaacctcagcctcccgggttcaagcaattctcctgcctcagcctcccgagtagttggaactataggcgtgagccaccatgccctgctaatttttgtatttttagtrcagatggggtttcactatgttggccaggctggtctcgaactcctgaccttgtgatctgcccacctcggcctcccaaagtgctgggattacaggtgtgagccactgcgcccggcctatttcttcttctctttgtttagttattatctatwactctcattcctatgaacataacttgtttctccccmcttaatttttatcatacatrattgtagacagtgggcactgtcttcaattatagtgaatttagcagtaaattcacattagaccaacttgtatagctttaaaaaatatatttatgtctaggttccacccttgaccaactaagtcagaacttgggtgggttcaaggttcattattctttgaagataagatgatgtttgaataaaattcctggtgattctggtatcaaaaatacaaatttgggacatactttttctgctgtaaaaatattttcctaaggccaggcgcagtggctcacgcctgtaatcctagcactttgggagacggaggcggcrgatcacttgaggccaggagttcaagaccagtctggccaacatggtgaaacccagtctctactaaaaatagaaaaaattagccaggcatggtggcacgtgcctgtagtcccagctactcaagaggctgaggcaggagaatcctttgaacccgggaggcagaggttgcagtgagcygatattgcagcactgcactccagcctgggtgacagatcaaaactctgtctcagaaaaaaaaaaaaaaaaaaaaagaatttcctagaattagaatcgcaggggttttttttgttttgtttgtttgtttgtttgtttgtttttgagacagagtttcactcctgtcgcccaggctggagtgcaatgccatgatctcggctcattgcaacctctgcctcctgagttcaagcaatcctcctgcctcagcctcccgaatagctgggattacaggcacctgccaccatgcccagctaatttttgtatttttagtagagactgggttttaccatgttggccaagctggtctcgaactcctgacgtcaggtgatccacccagctcattctcccaaagtgctggaattacaagcatgagccactgcactcggcctttatttatttatttatttttgagatgaagtcttgctctgttgcccaagctggagtgcaatggcatgatctcggctcactgcaacctccacctcccaggttcaagcaattctcctgcctcagccccctgagtagctgggattacaggcgtgcaccaccacgcctggctaatttttgtatttttagtagagacagggtttcactatgttggtcaggttagtctcgagctcctgacttcgtgatccgcccgcctcagccttccaaagtgttgggattacaggcgtgagccaccgcgcctggccagaatcccagttttttaacacatctaatgctttaggaatagtaaatggaaacatcatttccccttctttcgaagyacttctaccttgatgagatgtatgtattggagtacaatatttgacctagccaagaatttcacaaaagaagcccaaaatatgattttcacgtttactggactgttcacttttggkgggatcactttcttaagattacttaaagtactaatgcttgatgaaaatcatttgtgttttcacttcattaattggagaaagagctacatgtttttgttgttgttgttgttgttttgagatggtgtcttgctctgtctcccaggctggagtgcaatggcgtgatctcagctcactgcaacctccgcctcccgggttcaagcgattytcctgcctcagcctccygagtagctgggactacaggcgcctgccaccacgcccagctaatttttatacttttaatagagacagggtttcaccatattggccaggatggtctcaatctcttgaccttgtgatccacccgccttggcctcccaaagtgctgggattacaggcgtgagccactgcgcccagccagagctacaggttttactgtaacactttagaaggtcctttttctttgtacctctgtgatgtgttcacctagcaacagcttctttgatatgcaaacattctacaggcaaattgctcagagcagctactcatgttggacaattcaggtctcttctggaaactggccttgtatttggaattttctccagagtctgatgtggtaaaaatttatacttttcacttcttactaaatgcagcatagcatactacatcttttgagtgtgtaaaaaataaagtagtcatgtacaaacctaaaatcacagaataatcatgtaayggtgctatattttatttttactttagattcctaatacatttttattgtatctttataaggttagtttgggagaatagcactatcatcatctatattagttaactttgcattaaggtttttcattaaggtttttcccctgtttggttctttcattttacgatccatattttttgtgcctggtatgggatgataaagataacagaaatagctcctgtttttaggtacctttatttgtttgtttgtttggagacagggtcttactctgtcacccaggctggtggcacaatcatagcttactacagactaactcctggctcaagccatcctccacctcagcctcccaagtaactgagattacaggtgcacaccaccacctctggctaattattaaaattttcatagagacaggatctcacttggttggccagactgatctcaaactcctggtctcaagtgatcctcccaccccagcctcctgaagtactaggattgcaggcatgaaccactgccctggcctagatacatttaatgtagtagaggagatgagatttttacatagtataatattgaatgagacaacagtcaaaagaaaatcacatactataagagaagagattacccttaccttttaggaatcaagaaaactccctggaggagatggtacttgaacttatactggaggatttatatgttcatccttcttggtttatattttgtcccacacggtagcttgtttcttttttcttttttttctttttcttttttattttttgaggcagagttttgctctgttgcccaggctagagtgcagtggcgcgatctcggctcactgcaacctccrcctcctgggttcaagcgattctcctgcctcagcctccctagtagcttgtttcttagagacagtgtgagtgaaactcattaagtaaagtcaatacagcacaagtttcataaaatggtaaagaaatagaaataaaagtaaaggatgaaattcttaagaactttgtcaggccrggcgtggtggctcatgcctgtaatcccagcactttgggaggccgaggtgggtggatcacctgaggtcaggagtttgagaccagcctggccaacatggcaaaaccctgtctctctaaaaatacaaaaattagctgggcatgctggcgggtgcctataatcccagctactcgggaggctgaggcaggagaatcgcttgaacccaggaggcggaggttgcagtgagccgagatcacatcattccactccagcctgggtgccaagagcaaaaaactccatcttgaaaaataaagaaytttgtctccagtatcattcttgttctaggactgagaaacagttcattcttcattttcgtctactaaaatttaagttctttgattttcttctttaggtcttggaaaaagaattaatagagtaattttcttaggtatcaagtaatgaaaatgagaaaagagactagtctcattatagatttttttttttattcttattttattttatttgagacaaggtctcgctctgtcacccaggctggagtgtagtggctccattatggttccctgcagccttgaactcaggggcccaagcaatcctcccacctcagcatcccgagcagctgggactacaggtgcatgccaccatgcctggctaatttttgtgctttttcgtgtataaagatgagatttcgccatgttgcccaggctggtctcaaactcctgggmtcaagagatctgtccacctcagcctcctaaagcgctgagattacaggcatgagccaccacgtccagcctagagatatttatactttaatagctgcctgcaataccaatacacctagaatgaattagaagaatttgaaaacagatttcaggattagtaaaagaaagtcaagccctatgcctcctgttctacattcctcaaatcacataatcctgattttttcctcttcgtatgaaaattcctctcattttgggcctgtttgattttttgggagacaccacccagcagaaacacaccgcacttacatgcaacccctccattgcacagtttctaaatgcccccccscytttttttccattctctgatcctaaaaaaagaaatccagtggcacaatcacggatctctgcagccttgatctcttagcctcaagtgattctcctgcctcagcttcctragtagctgggaccacaggtgcttgccaccatgcccagctatttttttttctttgtttttttgtaaagatgtgtctcactatcttgcccaggctgatattgaattcctgggctcaagtgatcctcctaccttggcctcccaaagtgctgggattttatatatatatatatatatatatatatatatatatatatttccattttacttatgttaatgctttccctcttttggcatagaaaagctaataaagcttaaacttaaatggaacttgtataaacacaatatatctgatgatacctttgagagatgtcttacatttgtcttttctttcagcaaaatgtgatgccagtccctgaaatgtgtagcaatttaattatgggtagcattcttytttccctgtacttactatagtattaacttactactaatgctaagaagtttataatttttgataattcagatttggattagattaagatttatgtctatgcataattcattaaaaactttttaaaccaaattgtcaaaaaagattgtaggtaccttgtttaaagaaaatatataagctagtttcaagaattccaaaatattttttaaaagcagctctgtacatgtcgataarttatttgctcattgtaattttttgaatctgtttgtcaaagcaaatgtagacgggctcgaactcctgacctcaaatgatccacccgcctcagtctcccaaatgctggtattacaggcatgagccacygctcatggcctgttatcatttttaattgaaaattttactgagataattgtagattcacttgccattataagaaataattcagagatatcacttgtatacttagcccagtgtcccccaaaggtaaaattttgcaaaattatagtctaatgtaacagcrtgaatattgacattaatacaatccactgagtttattcagatttccccagttttacttgtattcaattgtgtgtttgtgtattaagttcgatataactagtcaatatactgaacagttctaacatcacaagtatccttcaggtagcccttttgtatccacatccacttccttctcatccccarctattgacaaccactaatcccttttccatttctaaaatgtgatttcaaaaatgttacatacttggctgggggcrgtggctcatgcctgtwatcccagcactttggatatackgtctctactaaaaatacaaaaattagctgggagtggttgtgcacacctgtaatcccaggtgcttgggaagctgaggcaggagaattgcttgaacccaggaggcagagcttgcagtgagccgagagtgtgccacttcactccagcctgggcaacagagtgagactctgtttcaaaaataaataaataaataaataaaatggtcttcatacagcctttgctgctaggaaatatagtttctaattaatgtaattttttgtcaaatacaaaatgcttctgaacgtttctggttatcaagctggtaatctttcacagtgtcctcaatttttttttctactctcttactagttctccagatcacatgcaggctattaagaaatgtgaactaacaagttaaagtagcaggacgggcgctgtggctcacacctataatcccagcactttgggaagctgaggcaggtggatcacttgaggtcaggagtttgagagcagcctggccaacaaggtgaaaccacatctctactaaaaaaaaaaaaaatttgccaggtgtggtggtgcatacctgtaatcctagctatttgggaggctgaggcatgagaatcgcttgaacccaggaggcagaggctgcggggagccaggatcatagcactgcactccagcctgggtgacagagctagaccctgtctgaaaaaaaaaaaaaatgttagtagcagcagagcacagtggctcatgcctgtaatcccaacactatgggagtctgaggcrggaggatctcttgagcttaggagttcaagaccagcctgacaacatagtaagactccatctctacaaataatcattaaaaaaattagccgggcgtagtggcacctacctgtagtcccagctactggggaggctgagatgggaggatcacctgrgcctgggaggtcaaggctgcagtgagctgtgatcgccattgtactccaaactgggtgacaagagtgagaccatgcctcaaaaataataataataaatgtataatttaaatgtgacctaacattatgaagtttttaaaaacaaaattataaatgattttaacactttctcattagctaagaaatcttcagaacaaacttttcataaaagaaacttcactgcaagagttgaagcctgagctagaaagttacaaagaaaataatgtacgacagtcgttccagataatgtccctgaaagataatatcaaggacctacagaaacttactgcttctctaaccagaattaaatatttgagaaacaccaatattcagaggcttcaaagaggcaactggaatttaactaaatgaattattgagctagaaactgtctaaggtagggatttttccagtttgttttcaaacatgtcttttgttgtaagcttgcaaatagcatatgaactccatactcctgattgatcatagaatttaaatctgcagaatttcacttaatacctgacccaacattattatattttgtattgagatataacttaaatacctcgggccaggtgtggtggctcatgcctataatcccagcactttgggaggccagggctggtgaatcacttgaggtcaggagttcaaaaccagcctggccaacatgacaaaaccctgtctctactaaaaatacaaaaaattagctgggcatggtggcatgcacctgtaatcccagctactcaggaggctgaggtagaagaatcacttgaatccaggaggtgcgagactctgtctaaaaaaaaaaaatccaatttgagatataacttacatacctcaagattcagttaaagtgtacaattcaatggttgtacaatcatcaccactgtctaatttcagaacaatttcatcacacctccccaccccccactgcaaaaaaaaacccatgcccggctgggcacggtggctcatgcctgagatcccagcactttgggaggccgagacaggcggatcacaaggtcaggagttcgagaccagcctggccaacatggcgaaaccccatctctactaactacaggcaggtgcctgtaatcccagctactcaggaggctgaggcaggagaatagcttaaatccaggaggckgaggttgtggtgagctgagatcatgccattgcactccagcctgagcagcaagagtgaaactctgtctcaaaaaaaaaaaaaaaaaaaaaaaaaagatttaatgattgacctgctggattttgaacttgcatggggcctatagcctctttcttttggccaaattctcccttttggaatgagagtatttacccaatgcctgcaattcccattatatttcggaagtcactaacttgttttgttgttgttgttgttgttgttgtttgagacagagtcttgctctgttgcccaggctggaatgcaatggcacaatctcggctcactgcaacctctgcctcccgggttcaagtgattctcctgcctcggcctcccaagtagctgagatcacaggcatgcaccaccacccccggctaatttttgtatttttagcagagatgggggtttcaccatgttggccaggctagtctccaactcctgacttcaggtgatccaccggccttggcctcccaaagtgctgggattacaggcatgagccaccgtgcccagcccgaagttactaacttgttttggattttacgggctcacaggcagaagggacttgccttgtytcagatgagactttgttctttgggcttttgagttaatgctggaatgagttagaactttgggggaactgttgggaaggcagattgtattttgaaatgtgagaaggacatgagatttgagagggcccagtgggagaatgggataaggcttgagtctgtgtccctgcccaaatctgatgtcaaagtataatccccagtgttagggcctggtgggagctgattggatcatgggggtgtatttcccctytggtgctgttctcatgatagtgagtgagttrccatgagatctggttgtttaaaagtgtgtagcacctctcacctcactctattccttctgctctggccatgtaagatgtgcctgcttccccytcaccttctgccatgattgtaagtttcctgaggcttccctagccatgcttcccatgcagcctgtggaactgtgagccaattaaacctcttttctttgtaaattacctagtctgaagcatttctttacagaagtgcaagaacagactaatacattgaacatctcttcatgtgcttattggccatgtgtatatcttctttgtagaaatacctattcatatttgttgtcccttttaaaattgggttgkctttttattgctgagttgtaagtgttctttatattttctggatactggacttttattaagtgtataatttgtaaatattttctcccaatttgtgggtcatctttccactttcctaaaagtgtcatttcaagcaaaaattttaattttgatggagttgtgtgtgtgtgtgtgtgtgkatgtgtatgtgtgtctttggtgtcatagctgagaaattattgtcaaatccaggatcatgaaagatttacatctatattttcttttaagagttatagttttggccgggcgtggtggctcatgcctgtaattccagcactttgggaggccaaggcaggtggagttcgagaccagcctggccaacatggtgaaactccgtccctactaaaaatacaaaaattagctgagcatggtggcacacgcctgtaatcccagctgctcgtgaggctgaggcagaagaatagcttgagcccgggagacagaggttgcagtgggccaaaatcatgccacggcactccagcctggccgacagactctgtctcaaaaaaaaaaaaagatttatagttttggctgggcgtggtggctcatgcctataatcccagcatttkgggaggccaaggcaggtggataactttaggccaggagtttgagaccagccgggctgacataacaaaacctgatctctactaaaagtacaaaacttaggctgggcacagtgactcatgcctgtaatcccagcactctgggaggccgagatgggcagataatttgaggccaggcattggagaccagcctggccaacatggtaaaaccctgtctctactaaaaatacaaaaatcagctgggcgtggtggcacgcacctgtaatttcagctactcgggaggctgaggcgggagaattgcttgaacccaggaggcagaggtggcagtgaattgagatcatgccactacacttcagcccgggtgatagaacgagactctgtctcaaaataacaataataataataataataataataataatagctggacatggtggtgcacacctgtagtcccagctacgtggaaggctgaagcaggagaattgcttgaacccagaaggtggaggttgcagtgagccaagattgtgccactgcactccagcctgggtgacagagcaagacaggtgtactccagactgggtgactgcaccccagcctgggtgacactgcactccagcctgggtgacagagcaactaactaactaactaactaaaactacagttagtttatatatagtttttagttaaaactatagttagtttgagccaggcgcggtgsctcacgcctgtaatcccagcactttgggaggccgaggcgggcggatcacgagaataaggagatcgagaccatcctggctaacaaggtgaaaccccgtctctactaaaaaatacaaaaaattaggcgggcgtggtggcgggcgcctgtggtcccagctagtcgggaggctgaggcaggagaatggcgtgaacccgggaggcggggcttgcagtgagccgagatcgcaccaatgcacctccagcctgggcggcagagcgagactccgtctcaaaaaaaaaaacaaaaacaaaaacaaaaaaaaagccatagtctttctaaaactatagttagtttataattaactatagttttagttataaaatataactataaagttatagttttagcacttacatttatgtctttgacttcttttggcaaatttttatgtatgatgtgaggtaggagtccagattcattgtttttcatataaatatccagttgtccttagcacctctgtggaactatcttggcattcttgccaagaatcaattgaccataaatgtatgggtttatctttgggcacccaattctatttcattggtctgtatgtctgtccttataccagcaccacactgtcttgattaatgtagctttgtagtaagttttgaaatgggtaagtgtgaaaaattccaacttaatytcatttttttcaagatcattctggctattttgggtcccttgcttttccatatgtattttaagatcagcttttccatgaacatggaatatttttccatttatttaagtcttctttaatttctttttttttttttccccgagatggcgtcatgctctgtcgtccaggctggagtgcagtggcacgatctcggctcactgcaacctctgcctcctgggttcaagcaattctcctgcctcagcctcctgaattgctaggattacagatgctcaccaccatgcccagctaatttttgtatttttagtagagacagggtttcaccatgttagccagactggtcttgaactcctgaccttgtgatccacccgccttggcctcccaaagtgctgggatwacaggcgtgagccaccgcgcctggccttctttttctttttcttagagacagggtctcactctgttacccaggctgcagtgcagtggcacaatcatagttcagtgtaatcttgaattcctgggctcaagcaatcctcctgcctcagcttcccaagtagataggactacagatgcatgcctccatgcttggctaatttttaattttttttttatatagatttggggtcttgctgtgttacccaggctggtctcaaactcctggcctcaatcaatcttactgccttggccttccaaagcactgagattacaggcatgcaccaccacacccagcctctttaaattgttttaacaatgttttgtagttttcagtgtatgtgtgttacatttcttttgttaaatttattactaatattttattccttttatgcattgtaaatgaaactgtttccatatttcattttttgattgtttatttttagagagtagaaatacaattgattcgtgtatatcagtctttgtcctgcaagcttgctgaactcacttattagctctagggtttttttggtatgtgtgtgtggtttccttgggattttctccatacaagactatgaatctgcaaatatgtgggtttttaaaaatttactattattattatttttgagatggagtcatactctgtcatccaggctggagtgcagtggcacgatcacagctcacaacaacttctgcctcccaggctcaagcaattcccctgcctcagcctcctgtagctgagattacaggagtgaaccaccatgcctgactaatttttgcatttttagtagagatggggttttgccatgttgcctaggcttgtctcaaactcctgggttcaggctacccacttgccttggcctcccaaagtgctggaattataggcgtgagccaccacacccaaatattgttgagtgtttttaatcacaaaagtgtgttggattttttgtccaatgctttttttttttttgcatcttactgaaataatcatgtgattttatcctctatagaatttgttattgttagacttattgtattagttggtatacagagagaggagatatttgataatgtgccctcagttgacaggagaaacaaagtcattaatttttcctcttataataagaataatatttgagaaactcacacaatatgaaaagctattctattcagatgtgcacactactgtagcctatttctattttgtattggttagtatgyatcaggtcatctcataggttggggctcttctgagtcttgcatttctcaaaacacttttttttcttttgctgtatttataccaagtcactttttgtttgtttgttggttggttggttggttggttggttggttggttkgttgkagtcggaatctcactctgtygccgaggctggagtgcagtagagtgatcttggctcactgcaacctctgcctcccaggttcaagcgattctcctgcctcagcctcccaagtagctgggacgacaggtgcacgccactctgcccagctaatttttgtatttttagtagagatggggtttcaccatgttggccaggctggtctcgaactcctgacctcaggcaagccacccacctcagactttcaaagtgctgggattacaggcgtaaaccactgcgcccagactactttttaaaagaaattatataggagactaaaattgaaaaaagaaacaaacctttactcagattgagatattagttaaacttaagggcctgaaacaaggaaaatggggtttgcttttttctggttgtgcagagagtgtatgaataaaaagawctcacaaagttcaagtgaaagactgattaaaagaaattcatcatccaaatatcttctcagtgttaagcaagcacatgaagttagctatagctcgacccttaacagctaatcaggtaaactcttcaactcagttttgaacgtaacatagtatactacagactttttgtttttgtcctcagagstaaagagaaacaatggctatatggcatactatgaggattaattttatatgtctacttgactgggccatagggtgcccaatatatggtcaaacattattttaggtgtttctgtgagagtgttttggataattttaacatttaaattggtatactgagtaaagcagatgatactccctattgtgagtaggcctcatccactgagttaaaggcctgaatagaacaaaaagattaaccctcccccaggtaagagcgaattcttcctgcctgatggccttcaaaatgggacatcagctctttttcctgcctttggactcaaaccattggctcttcctgggtcttgagcctgctgrcctttggactggagctacactatyagctctcttgattttcaggccttcaaacttagactcaaactacattattggctcccctgggtctcccagatcccagcagatcttgggaattgccagccttcataattgctgaggcagttcctttttttgagatgggatcttcctctgtcacccacactggagtgtagtggtacgatcatggcttactgcaacctcaaacacctgggcataagtgatgctcctgactcagcctcctgagtagcagggaccacaggcacatgccaccatgcccagctaattttttaaaaattttttgtagatacaaggtctcactttgttgcccaggctggtcttgaactgctgggctcaagctatccttccacctcagcctcccaaggtgctgggattataggcatgagccactgtgcccagccaaaagtcagaagataattgaatggcatcttaaagtgctgaaagaaaaaatactgacaacccagaatctatactcagtgaaattatccttcaaaattgaagatgaggccgggcgcggtggctcacgcctgtaatcctagcactttgggaggccgaggcgggcggatcacgaggtcaggagatcgagatcatcctggctaacatggtgaaaccccgtcagtactaaaaatacaaaaaaaattagccgggcatggtaacgggtgcctgtagtcccagctactcgggaggctgaggcgggagaatggcgtgaacccaggaggcggagcttgcagtgagccgagatcgcgccactgcactccagcctgggcgagagtgagactccgtctcaaaaaaaaaaaaaaaaaaaaaaaaaaattgaagatgaaataaacatggtttcagaagaaaaaaaaagaaatcatttattgtcagaagaactacactattaagaaacacaccaggcaatttttcaggatgaaggaaaatgatccttggtggctacagagaaatgtagggtagaataaggagtaaagaaagggtaaatagaaattaatactgacaattaatttttaaaaatcctatacaatttataatatatgaaaragtaaaacatatcagtagtacaagggcaagaaatggtaaatggagttaagctatcataagtgttttatttagggagtatcacaaaagtattaaagtagaatgtaataggccgggcggggtagctcacacctgtaatccgagtaccttgggaggctaaggagggcggatcacttgaggtcaagagttcgagatcagcctggccaacatggtgaaaccccacctctactaaaaatacaaaaattagccaggtgtggtggcacacgtctgtaatcccagctacttgggaggctgaagcatgagaatagcttgcacgtgggaggcggaggttgcagtgagccgagatcctgtcactgcactccagcctgggcgacaaagcgagactctcaaaaaaaaaaaaaaaaaargcaygtaataaatcaaatatgcattatgtaatcacaaaatccagcttaacaactaaataataatttaaaagatattaaaaacttaatatggaagaaaaatgaaataaaaaactttattaatccaaggccgggcgcggtggctcatgcctgtaatcccagcactttgggaggccgaggcgggtggaccacttgaggccaggagttccagaccagcctggccaacatgatgaaaccccgtctctactaaaaatacctgggcaaagtagagcatgcctggccgggcgcagtggctcatgcctgtaatcccagcactttgggaggctgagacrggtggatcakgaggtcaggagatcgagaccatcctggccaacatggtgaaaccctgtctctactaaaaatacaagaattaactgggcatggtggcacatgcctgtaattccagctactctggaagctgaggcaggagaattgcttgaaccagggaatcaggttgcagtgagctgagatcatgccactgcattgcaatctggcgacagagcgagattctgtctcaaaaaaaaaaaaaaaaattagagcatgcctataatctgagctactcaggaggctgagacacgagaatcacttgaacccagggcggcggaggtgcagtgagcagcgatcacaccactgcattccagcctgggcgacagagtgagactccctctcaaaaaacaaacaaacaaacaaacaaaaactttattaatccaaattaaaatggtagagtagtagtaaaggaacagagaatagatggtaaaaacaataaataacatgataaacccgacaatttcaataataactttaaagatagatggtattgtaactgcccaatgggttcaccttgcccgctgcctagacagagacgatttctcaagacaggggaattgcaatagagaaagataaattcacgcagagctggctgtatgggagaccagagttttattattactcaaatcagtatccacaagcattccgccttcagaatttttaaggacaacatgttgggtgggaggaagccagtragctgggagtgctgattggtcagagctgaaatcatagggaatggaagctgtcttcttgagctgagtcaattcctgggtggggactgcaagatcagatgagtcaggttatcaatctacgtggtgccagctgacccatcaaatgcagggtctgcaaaatatctcaagcactgatcttaggagcagtttagggagggtcagaatcttgtagcctccagctgcaagactcctaaaccataatttctaatcttgtggttaatgttagtcctaccaaggcaatctagtctccaggcaagaaggagggctgctttgggaaagggctgtcatctttgttttaaactataaactataaagtaagtttctcccaaagttagttcagcctacacccaggaatgcacaaggacagtttggaggttagaaacaagatggggtcagttaagttagatctctttcactgtctcaggcataattttgcacaggcggtttcagtataatcatttcagtacaagacaagatttwaaaaaagaaaactaatgctaagcatttttcaagaaacatactgtaggccgggtgcagtggctcacgcctgtaattccagcaccttgggaggctgaggcgggcggatcacgaggtcaggagatcgagaccatcctggctaacatggtgaaaccccgtctctactaaaaacacaaaaaaattagccgggtgtggtggygggcacctgtagtcccagctactcrggaggctgaggcaggagaatgggtcaacccaggaggcagagcttgcagtgagccaagatcctgccactgcactccagcctgggtgacagagcgagactctgtctcaaataaaaaaaaagaaggaaacatactgtagccagacgccacctatagtcccagatacttgggaggctgaggcaggaggatagcttgggaccagtttgagaccagcctgagcaacatagcaagaccctgtctccaaaatttaaaaatgtttaaaaagagatatattttacatataagaacacagaaagatgttattaaaaataaaaaaatgacatttgggtaatgtgaatattaccctaaagaaagctgcatctatgtggaactgttaccgggaatgggtcccaatctagaccccaagagagggttcttggacctyacgcaagaaagaattaggggcaaatccataaagtgaaagcaagtttattgggaaagtaaaggaataaagaatggctactccataggtagagtcacagtatgggctgcttaactgagtatactcagttatttcttgattatatgctaaacaaggggtggattattcatcagttttctggaaaaggggcaggcatttstcggaactgagggttccttctttttttagactgtatagggtaacttcctgatgttgccatggtatttataaactgtcatggccctagtgggagagtcttttarcatgctaatgcattataattagtgtataatgagcactgaggacaaccagaggtcacctttgtcaccatcttggttttggtaggtttgggctatctttatcgcattctgtttcatcagcagggtctttgtggtctgtatcttgtgctgacctcctatctcatcctgtgactaagaatgcctaagctcctgggaatgcagccagtagttctgagccttactttacccagcccctattcaagatggagttgctctggttctaatgcctctgacagaacctcctgattgtcacaatattaccagtagcagcaggcagctattcacacccaaatttcaccttaaaaagaatggcttcaaaattgacctcccccatgggaaatattgcaggacttaacacagrattgtttttctcttcatttctctacgatttctttctttctttttttttccttttttccgaggtggagtttctctctttttgcccaggctggagtgcactggtgcaatcttggctcaccacaacctctgtctccygggttcaagcaattctcctgcctcagcctcccgagtagctgggattacaggcatgcgccaccacgccaggctaattttgtatttttagtagagacggtgtttctccatgttgcaacctcaggtgacccgcccacctcggcctcccaaagtgctgggattacaggcgtgagccactgcacccagcctaccatttctttttgggacagggtcttgctgtgttgcccaggctggtttctaactcctgggctcaagcgatccactggcctcagcctcctgaagtgctgggattacaggagtsagccactgcaccaggcccatttctctaccatttctgatctctctctagaaacacttggataactgcacagctcctttcataagaaatatattttagggccrggtgtggtggcttatgcctgtaatctcagcactttgggaggccgcggcaggtggatcaaccgaggtcaggagttcaagaccagcctggccaagatggtgaaaccccatctccactaaaaatacaaaaaattagtcaggagtggtggtgcatgcctgtaatcccagctactcaggaggctgaggcaggagaatcacctgaacccaggaggcggaggttgcagtgacccaacattgcgccattgcatgccagtctgagcaacaagagtgaaactttgtctcaaaaaacaaataaacaaatgaacaaacaaacaaaaaatcattgttattcctcagagtaagagcaaagatcatcccctgcagaagcttaggaactatgcacagaactttacagaacaggggcgatgctttaactgaaggctgactactgaccagagaatggaattctgagagggctcaaggaataaaagraaactaggcagggaaagggaaggcgcccatctgaagcaaacttcagcggccatcaggatatcttgtggtggtcacaagttgtaggctctgtttttggaaggtttgggtatagcgcaggattccatttgtctacttggctacacctctgcctgaggtacactgttgccagaaaagagggtcccaatccagaccccaagagcaggttactggatcttgcacaggaaataattcaagggaagtcacacagcacagagaaaaagcaagttcatacaatgttactgagtwagttatcgccagaaagcaggaggaggaacacgccatccttgttagtgtctctatttataagaaacttatgagaagctataattaaacttggaacatgcagatgtgctcactaaaggtaggggctattggtgttatagatgaccattaatctttcaacctaagcctgctcattaatggcatctttaatraagtgggctacactcttaggacatctggacattctgcaggattggtgggagatgttctgtatggccaccaatattctgtaattataattggtggtcagcttgggatgtggctattttcagaccacaagcattaaccttacagagtgcctagctactcatttcaaggtggagtcactctggccatgttttaccaaaccagaggtctggtaaggagaggttcctctaacaccatgaggtcaacgtcactcaagttcctggccagccaaactctgaaagcaaggagtcccaaattgaggatcaagttcctccagaaatcattgctatgggtggcaaagcagtagattccctgaagccaatctcccacattgtctggaattttgggagcttcatttgcccagttggcagtgccaatggggaccccgctggaagccatagtagcacctttgggctctgcataggacttgctcaatacaccatattggagtcgttggctctttttgttattttaagttgaaatttgaagattggctgagttggtttcatgatattgttgcctactgatatcttacacagagtacgagtacatctggttgaaagagaaaaggcagagagaaaagcagactttttggagttgttgttctcaggcactaacagattcatcccttatatgcatatgaatggacaataagatttcttggatattttcatggcaaaggtgaggagaaatttttattgctttttgaagaaacatgatttttattaccttgggttattccaggagataattgataaatgttgagtagtttgttggtcttcttcttaaaggaggatcaagagaagcagtacagcatggcagactagaagcatttctgtttttttgttttgttttgtttgagatgaagtctcgctctgttgccgaggctggagtgcagtggagtgatctctgctcactgcaagctccgcctcctgggttcaagtgattctcctgcctcagcctccaaagtatctgggattacaggcatgtgccaccacgcccggctaatttttacatttctagtagagacggggtttcaccatgttagccaggctggtctcaaactcctgaccttaaatgatccacccacctcggcctcccaaagtgctgggattacaggcatgagccaccgcacctggctgaagggtcttcagtatcatctctgtgatagataaattgtttagtgggttatctacattggccattgacatctagaattagggtatgagttgggtttagaagaaggaaatgaggctggtctccaatagacagtgattcatatgataagcagaaagtgttacagaagtctggtagaggaggatgggagacagattattgtcaaggagatagtaaaagtttattttgaaatccttagactatgccgggctcagtgggtcacacctgtaatcccagcactttgggaggccgaggcgggcggatcacctgaggtcaggagttcgagaccagcctgaccaacatgaagaaactcggtctttattaaaaatacaaaattagccaggcgtggtggtgcatgcctgtaatcccagctacttgggaggctgaggcaggagaatcacttgaatctgggaggcggaggttgtggtgagccaagatcgcgccattgcactcctgcctgggcaataagggcgaaactccatctcaaaaaaaagaaagaaatccttagactataagtttgttatatratctgcatgtaaaacaaggtcctatatgactyaaataatgtgcagggttccctttaaaaagttcagcaactactttcctttttttttttttgagatggagtctcactctgtcacccaggctggagtgggttggtgcaatcttggctcactgaaacctctgcctcctgggctcaagccatcttctcacctcagcatcctcggtaatttagttgggactactggcgtgcgccaccatgcccggctaattttcctgtattttgtggagagacggggtttcaccatgttgcccaggcttgtctcaaactcctgggctcaagtgatcctcctgccttgatctcccaaagtgctaggattacaggcgtgagccaccacacctggccaatgactttcaaatttgtttaaagtaatcccaatctttatttgcctctctcaagtaattaatgataacactttctttaaaaaaaaaatgctgtcactaggctgggtgcggtggctcacatctgtaatcccagcactttgggaagccgaggcgggtggatcacctgaggtcaggagttcgagaccagcctgaccaacacggtgaaaccctgtctctactaaatacaaaaattagccaggtatggtggtgggcacctgtaattccagctacttaggaggctgaggaaggagaatcgcttgaaccccgggaggtggaggttgcattgagccgagatggcaccattgcactccagcctgggcaacaagagcaaaactgtctcaaaaaaaaaaaaaaaaaaaaaaaaaaacagaccgggcatggtggctcacacctgtaatcccagcactttgggaggcagaggcaggtggatcacctgaagtcaggagtttgagaccagcctggccaacatggcaaaaccccacctctactaaaaatacaaaaaaattagctgggcacrgtggcaggtgcctgtaatctcatctactagggaagctgaagcaggggaatcgcttgaacctgggagacggaggttgcagtgagctgaggttgtgccattgcactccagcctgggagacagagcaagactccatctcaaaaaaaaaaaaaaaaaaawgtcactaatctctaagatctctgaataactctctcagaattagagtccatacagctctgatcttttcttcttttatgctgcttgtttttccaaggcttttagtgatgcaaacttatcattactttaacaattccagctttccttytatgtcttggttttacacgacaagaagcccagaaactgaacttgcttactcagctcccgaggttgaaggtggcaagaaggtggtaagaatcctagacaggctaggcctggtggctcacgcctataatcctaacaatttgggaggccaagrcaggaggatcgcttgaggccaggagttcgagactagcctggggaacatagtgagaccctgtctctacaaaaaaaaaaaagaaaaaattagctgggtgtggtagtgcacacctgtggtcccagctactcaggaggccaagttgggaggattgcttgagcccaggaggtggaggctacagtgagcaatgatggcaccacactccaacctgggcgacacagtgagactctgtctcaaaacaaaacaaaacaaaacaaaacaaaacaaagaagatttggtagaattctcctgtgggagtttggagaaagaagtagaacattattattgtttttttcctgtcatatttctaatggaaacaggatgattacaagagtgcaggggaaaggttggggaaaagaaatgtgacttctttcacttttacattattgaaattgttatttaaattgtattctataaccataattaaatcttcataaacttttcacttaatgatcttagcattcattgatggtctttgcctgaatcttatttcaaaaggcaaggcatttcaaaaatgctgatttttaaaatttctatcatttcttatacacttattagctcacatttttctgtaatgagtttacccttatcaagtgggactctttkkttagctgctcctctaagctaattttcttgtattctcaaagcagtttctccatactatcatttcaatacctcttgctgttctagtttgctgttttgagtatgtccttgtcttacttatgtgattgactttttttttgagatggagtttctctctcgtcgcccaggctggagtgcaatggcaccatctctgctcactgcaacctccgcctcccaagttcaagcaattctcctacctcagcttcccgaataactgggattacaggcacctgccaccacacccagataatttttgtatttttagtagagacggggtttcaccatgctggtcaggctggtcttgaactcctgacctcagaggatccacccgccttggccccacaaagtgctgggattccaggcrtgagccacagtgcctggccatgactaactcattccattgagggtcttttctcctgaagttttgtgctatgacttgatatttcaaaagaagggaaatagatgtctcagtattaaatttcaaacgggaagtttaacctgtatattggcttatttagggtaagagtgaagctatcctggacaagaactttgacaggacaatactattcactctgaaggaccaaaaaatgagcagaaaatttgggataaatgtcaacaagatttgaaccctaaagaaaagcaagcatcgagttagacagacgtccatattcattcaactgggaaaataaaactgcagtcccaacatcagaatttccttggtcagttggttattgcgggacagcattcttctgcatgacagtattgtctccttaccagccacagaggaggctgtgagagagaggatttgggaaattggtgcaaatgagaaatcttggaaatctgtaagtatatagatataaaagttattctttccagtttgattyttttatgatgtagattttaatatcmgtcaatttaggaaactctgtggctctgaattatagttataattctagttttactattacagtgaaagaagagaagaggctgttcattattatattggaagtagtgtagcatgtttattaagagtgcagagccccagcatgaagcctagctctgccatttgccagctgtgtgtgctcttgggcagactacttatcctctctgtgcctcattttcatttgtgaagtaggggacggtgtgtagttcccacctcacagagtggttgcaaggaccaaatgggttaatacatgataaatgcttagtttagtgtaagttcaataaatatcaaaatagtggtatgttaaagatagtgtttacatgataacctaaaattaattgccagtttgttttaatttactggtcaagtctatcaaatgattgaatcagcatgtttaagtggatatatctcatttrtgtccagatcattttagtatattcatgactcctcactttaaaattcaaatgataataggtacagttagtcctccatatctgtggattcaaccaagtaaaaataaaaaattgcatcacaacaaggcatggtggctcacatctgtagtcccagcactttgggaggctgaggcgggtggaccgcttgaggccaggagtttgagaccagcctggccaacatgacaaaaacccatctctactaaaaatacaaaaatcagctgggtggtggtggcttgcacttgtagtcccagctactcgggaggctgagggatgagaattgcttgaacccaggaggtggaggttgcaatgggccgacatctcaccactacactctagcccgggcaacaaatcaagactgtctctttttttttttttttttgagacgaagtctcgctcagtcgcccaggctagagcgcagtggcgcaatctcggctcactgcaagctccgcctcccaggttcacgccattctcctgcctcagcctcccaagtagctgggactacaggcgcccaccaccacgcctggctaaytttttgtatttttagtagagacggggtttcaccgtgttagccaggatggtctcgatctcctgacctcgtgatccgcccgtctcggcctcccaaagtgctgggattacaagcgtgagccaccgtgcccggccaagactgtctcaaaaaaaaaaaaaaattgcatctgtactgaacatgtacagacattcttccttttcattattctctaaacaacagagtacaactatttacataacatttacgttatattaggtattataaaagtctcccgagagacagaggttgcagtgagccgagatcgcgccattgcactccagcccgggggaccagagcgagtcttcctctcaaaaaaaaaaaaaaaaaaaattgagatgatttaaagtgtacaggaggatgtgaataggttagatacaagcacaataccattttgtatcaaagacttgagtattcataaattttggcatctctaggaggttctgacaccagtctcccagggacgctagggacgcctgtatatggcttagattcagtgtgttagtgaaacctgctacacagtagcctgtttagagttccccatttttaaaaatactctgctyttttaaaattcattatacagccttatttctcagtactgactaaaatgtcttatttttatatatcgaagctttctatttattttttaaaccaatgtatacatgtcaaatcctaaaatcgcctgtattaatctacttagtaacttaatgccactccaatgtggatataaatagaacttgcacatagttttgaaactacgtagaaagcatggaggctgggtgcgtaggctcacgcctgtaatcccagcactttgggaggctaaggtgggcagatcacctgaattcaggagttcgagaccagcctgaccaatatggcaaaaccccgtctctaccaaaaatacaaaaattagcctggcatggtggcatgcacctgtagtgccagctacttgggaggctgagacaggataattgcttgaacctgggaggcggaggttaccgtgagccaacgtggcaccactgcactccagcctgggtgaaagagcgagactctgtcttaagaaagaaagaaagcgggcgggggggcggggggaagggcaagcaagcatagagcatgaggaagtttttaatgtctttttcttacagagaactaaagcctttcagcaggaaatccagatgctcactaagtgactagagcagctgcatcatctttaagaagaaggtgctcaagaatcatcccaagctgaagaaaaaagtattgggaacaaaaaagacccttgaaatgtctagaaagaaaaattgagatcaaggactttttcaagagagattagacttggacaggaagaaagtaagaatttcctgaagtataagcattcctttgataatgaaaatgattgcattttattcataactttaactttatctaatgtttgaagctgttaatactgttaatacttttctccacattgggaaaggggggaaatttgctacaaactctgaaagcttccgattttattttatttatttatttatattttttgagagagagtctcgctctgtcaccagactggagtgcagtgacgctatcttggctcactgcaacctctgcctcctgggttcaagcgattctcctgcctcagcctcccgagtagctgggactacaggcacgcgccaccatgcccagctaatttttgtatttttagtagagacgaggtttcaccattttagccaggatggtctcaatctcttgaccttatgatccacctgcctcagcctcccaaagtgctgggattacaggcatgagccactgccctggcctctgattttatttttaaaagcctcttctctctccgtatctccatgtctcttttgtgtacttatttgatgtttgttgtgagggcatctgtttacatatatatctcaatgtactttaaggagaggattagaagaaaaggagctcaaaggaataactctctttttttcttttttttcagatggagtctcactctgtcacccagggtggagtgcaatggtgtgatctcggctcactgcaacctccgcctcccaggttcaagcgattttcctgcctcagcctcccaagtagctgggattacaggtgctcaccacccgcccggctaacttttgtatttttagtagagacaaggtttcaccatgttggccagtctggtctcaaactcctgactgcaggtgatctgcctgccttggccttccaaagtgctgggattacatgtgtgagccactgtgcccggccaaaggaataactctctaatggggaaattttaggaattgtgacaggcagatataatgagcattgatgaggggccattgatgatgtctctcaataatcactgtataagtcattctcttctctactctctgcttccctgaatctgtaaggaaaaaggcagtcctaaaagttggatagaaataggtaggttgcaatacaatttattttcaggagattctctattttactacctcttcatagaattgcctatcatagccgggcacagtggctcacacctataatcctagcattttgggaggctgagacaggcggatcacgaggtcaggagattgagaccatcctggccaacatggtgaaactctgtctctactaaaaatacaataattagctggatgtggtggcacacacctataatcccagctactctggaggctgaggcaggagaattgcttgaactcaggaggcagaaattgcagtgagccaaggtagtgccgctacattgcagcctggtgacagagcaagactccatctcaagaaaagaaaaaaaaaaaaaaaaaagaattgcctatcataaccaaattacgttatagtatttctataattgctatggtccaaagtggaatcttgctcactcatttaccatttactcatttagtcttttttttttttttttttctgagactgagtctcactccatcacccaggctggagtgcagtggcgcaatctcggctcactgcaacctccacctcccaggttccaatgattctcctgcctcagcctcccgagtagctgggactataggtgtgtgccaccacacccagctaatttttgcagtttttagtagagatgcagggtttcaccatgttggccaggctggtcttgaactcctgacctcgttatctgcctgcctcagcctcccaaagtgctgggattataggcatgagccactgcgcccagccttcatttagtcttttggctcattcatttgtttatccaatatttattgagcattcagttttcttttcttttcttttttgagacggagttttgcccttgttgcctaggctggagtgcaatggcgcgatcttggctcactgcaatctctgcctcccgagctcaagcgattctcctgcctcagtctcctgagtagctgggattacaggcatgcgccaccacacctgtctaattttgtatttttagtagtgacagtgtttctccatgttgttcaggctggtctcgaactcccgacctcagatgaccagcccaccttggcctcccaaagtgctgggattacaggtgtgagccaccatgcccggcctaatagttttctttactagagttcttgggttttctggatttcactgtatattgtcaaattgtttcctaggaaataatgtatttttaaaatttcacttatttattttataaataatttgattctaaaggtggaacagtttggaccagctcatgggagaactgtctttttttttttttttttgagacagtcttgctctgcctcccaggctggaatgtggtgttaccatcacgattcactgtagcctcaacctcctaaggctcaagtgctcctcttgcctcagactcccgagtagctgggaccacaggtgcacaccactatgcccagctaatttttgtagaaatggggtctttccatgttgctcaggctggtcttgaactccttgtggctcaaatgatccgcccatctctgcctcccaaagtactggaattacagcctttatttcttttagattttcaatttactgcccctaagttgcaaaatgttctcttagaattatttttatctttgcattctgtatccattctgtatgcatatctatatattctgtatattcctcctttctaatattgtgtattttcactttctctctttcctttttaaccaggcttgcctgaggcatctattttatctttccaaagaaccagtggttctttttgagacagggtctggctctgtctattgtccaggctggagtgcagtggcatgattatggctcactgaagcctcaaccttcagggctccagtgatcctcctgcctcagcctcccagatagctggaactataggtgcacgcctccacgcctggctagctttttgaagtttttgtagagatgaggtttcgccatgttgcccaggctggtctcaaactgctgagctcaagtgattctcccgcctcggcctcccaaagtgctagtattacaggcatgattcaccgtgcctggccagttctttttttaaaatatacgttttatggcctggcacgctggctcaccctgtaatcccagcattttgggaggctgaggtgggcagatcacttgaggtcaggaattcgagaccagcctgaccaacgtggtaaaaccctgtctctactaaaaatgcaaaagttaactgggcatggtggtgtgcacctctaatctcagctacttgggaggctgaggcaggagaatcacttgaaccagggaggtggaggttgcattgagctgagattgtggcactgcactccagcctgggcaacagagcgagactgtctcaaaaataaataaataaataaataaatacacattttattagtttattttggtttatatgtaatgaatatatatagtatgtttattaaatctgcaccctactttctcttttcccttcttaagtaaatgtgctttttttgtcttttgtttttaaatcagaaaaagagtaagtactattgaatgttcctctgtagcttgtccaatagatttttataagaaatgtttcttttcactgtgttctatgtatttttgtaattttagtgttgatttccattttttggctgaaggtattcagaatttttgtttgtttgttttttgtttttgagacggagtttcactcttgttgccaaggctggagtgaagtggtgcaatctcggctcactgcaacctctgcctcccagattcaagcaattctcctgcctcagcctccctagtagctgggattacaggtgtgcaccaccatgcccagtgaatttttgtatttttagtagaggtggggtttcaccaccttggccaggctggtctcgaattcctgacctcaggtgatccccatgcctcgacctcccaaagtgctgggattacaggcgtgagccaccgcacccagcctagaatttttttaaccctttatacacacacacacacacacacacacacacacttttcaaaatcaaatataccaagagtcttttattgaaaaggagcagccctcttctgtacctctcttatttcccagagggaactctttaactcttttagctgtttctgatagtaacttccattttcctaaacaattttaaactgccttatctcgagttatctatattagacatgttgttgatttcctgttatatgatagatgaaatttcatctctcataccactttcctacctgctcctttcatcttcccaatctggttatattgatattttaagctaaatgcataatcagcatttactttaccgtgatactaaatgtttacaaaagcatgaagtactatattcttggtacattttctttcttgtattgcattttatttttcctacagttaataccttccttatattttcatacgtttaattttcagtgttcatttatcaaggtttttttcctgcctaaatctgtatcagatgatcctttagtctttaaaaatctcccattttttctctcccaaagtccttcattcccttgcttcagtctggattttactctgtgggcctgagcacagccatgatgccatgactttccttctctaatctcctggttaggtttcattgtttgccgaatcacatttcttcctcttttttggtttcctttcttattttactggaacacatcctccaatggcttcctaagaaatggtgccttggagagcgacattttttgaggtccttgtgtgaatgacaatgtctttttttgtttgaatcatcatactcaattgatagctgggtttagactttattttcacacacggacttcattgtcttctaatctctagggttgttattgaggaaaatatgccattctgattcttgttccttaatatgttatttcttgtaatggattaaaacatttaccataacttttttgtaataacattttataactaatttttttctcataataaaattaattcagctgggcatagtggctcatgtccgtaattccagcacttagggaggctgaggtgggtggatagctggaacccaggaatttgagatcagcctggacaacatggcaacaccccatctctacaaaaaatttaagaactagccaggcatggtgcacacttgtagtcccagttactggggaggcttaggtgggaggatgggttgagcacgggaggtcgaggctgcagtgtgctgtgattgcaccactgcactccagcctgagcggcagggtgagaccctgtctcaaaaaattaaaaaatcatgtgtattagtgaagatttgtaaagtagaaaataatagaaataaaattgaaatcaccagtaatcccaccattttgcgataactagtattaaatataggtatatttccctctgattattttccatgtatatttttatcatcattgagatgtacatagtttttcttaatcctgcttttttcattaactacatcattgttaatttttcttaataaatatttttgaaaacttaatttctagggaataatctatcatataataatttttcttttttgacatttgcattgtttcagttttttctattatgaataatgttgtaaagaatatctttgtgggccaggtgcggtggctcatgcctgtaatctcagcagtttgggaggccaaggtgggcggatcacctgaggtcaggagtttgcgatcagcctggccaacatggtgaaaccctgtctctactaaaaataaaaaaattagccaggcatggtgacaagcgcctgtaattccagctactcgggaagctgaggctggggaatcacttgaacctaggaggcggagattgcatttagccaagattatgccattgcactcca

SEQ ID NO: 5754 - DNA, 17391 bp, Homo sapiens
ctggcatgttagggaacctggagcagagggaaaagaagagactcctttggtggtttagagagatcagcagggagacataggaagacttccatggcttgaggataccaggtgatcactggggtcagggtgggagcgctggcagctagagtcactctacagcgggggctcagatctggctggaggtggaggttgggaattttctacagtgacactaaggggtccgggcctcagtgggaggccgggccttgggcacgcctgtaatggaagtgttgcccccttgttgctgctgctgccctgcccatgttgtcatacaggaggcagctgagcaaaagggtctccatgccctcccagccccctcaactcagccaggaaggggctaagggactccctcctctgaacttcccaaggtactgagcaggcagagctgggcacgcatgtcaatcagattgaaatacttccccttaccaccaataccctcctgcctgttgcctggaaccagccttatgcctactgatagagggcagggcagggccagtgccctaatcccagccctacatcccaggcccctccctcctcagagattccagagtgagcccccgcttcacccccccagagtatttttagcttccacttggcccactcagaggccctttaaggccctctggctcccagcccaggatccaatgggtctacagccagaggcctgcacatggatgggggaaggcgggtgtgcagagggtggttccagcttcctccagccacacacacccaggtgtgtgcggagggggttggagaatcctgaaggtgagagggaccttactgtatgcaaatgaaatgcaaattagtacacaaatgagcaattctgccagccacctgcttttaggtctggtccagatcacaaaatccaaaagctgaccccttccagagcagtactgaacccatcccctcagctgcagccagaaggagggagagtaggtggagggatgcctagatggagctcttagagcaaggaagataggagatgggactgcccctctcctggagtcaggctggactggggggagcagagacccccagccccccagatggagtgggatgggtgaagtgactactcaagggctttccaacagctgcctcctcaccctcccattggctccagccaaacagcccctcttggcctctgcggagccccttgagctccaagttccgaaaaagcccttccttacccctgccctatcactccccttggggcagttcagagctaatggaacagccaaggagaaagcagaagaatcaaagaagggcgcggcacagtacccaggagaattcagggtaccaggttggctcacctcaaagaggagaaggcccctgggggcactggggtggggtaatgctcagagaagcagcctgtaagattcaccttcccagattctgtcacctcagggaggcacttggtggctccatgggaggattccagagggggccaaaggatctagcactcaggccaacatggcagggcctcactccttgggtacctagcctcctgtgttcccctcctatccccggccgggaggcaggtggggagggtgcctgctccacctctgagccccagagaaggggtgggggcagctctgggatgcctggatcccagctctatgccagccttgctgcccgaattagccatctccccagaggccggccctgtggcagctgaaactgcagccctccccatccttcctgacccttcccttgctgcccacccagccccctctccccactggtgactcagccctagaaccagagcaacaagctggagggagagagagaatgagaaaggacaggaaaaagagccctggctaagcctcagataaaaaaagaacaaggccatttttctcagttctgctccctttccttggctcttcagtatttttcctgtatttgacccccgagggcattctaagtgtcatctaacctcaattcctcttactgcaaaggggatcttcttccttctttgtttacttctgaccaagcccccttcgctgctgctttttctacaagatcaggcttcccctactcctgcccagttgaaagcctcttggcctagactggtcactgggtagagccagaggaaaaagatactacacgagcaggccttctgcctccagccacagctgctgtgcccatttctgctggcacgaaccttgaaggctgccaggcacctgctttgcccagggaaacatgatgttaggagagcatggcaggtgagcctggctcctgcgtacctcaggcatgacctcatttctaggagccaccctgccctgggcttcccagataccctcatttccaagcaaaagtgaaagagagagaaggaccggcagtatccccataggcccacagggtcaggccagaccagaatgcctggattcccaggagggaatgtcagtgcaggtgctggagcagagagggtgtcagtaaccacctcccagagaacagtccctgtccctccaaggaacccctcatgcatcttgccaagaagcccagagcactttggtcctctgcctgctccttacccctcatttccacagactaggagactgggccctgggttggggctagccccctatgttgtggaccaggaaccccagtccagagatgaaggtgatggggcagcaaagagggtcccacccctgggtttctaaccatttctgaggccttatgaatggagaacaagaaagctgtgctctcccctcctcccacccccagggcagtggacaaatactacgattttgggtacactttcagggagtccctgcatctcttgaaaaccttctacgaaccccagtttaagagcctgtccaagaccacgaaccatcccacttttccaaagagactttcaggctaacagaatatgaggctgcagctcgtcttactagttagttcctctgagttgtgcactcaggcagctgtttgcatctggctacacagctggctgcagctaagcccagctggctctcccaaatggccgaggggtcgaatttagtgagatgaagagaagggccaagacacagaaccacccttaggaaagactgaggatactcaagggagagaactgcccctcagaggttcattagctttagaaccttctgggctcttggcaggctgaatgccagctccagcttcccagacagaaaagtagaacccctttgctcagccaccctgggcggggcccatgggtaatgaggatgcatccaggttctggcctcagcgcaagagccttcaggtgctccttggagaaaggcacatgtgcagaggattttacgcactttatctcgttacagccccactaacatcccagcagaaggcatgctgttcccctccctccaacatgtgcggaaattcaggttcaggtattggtaacagatctgagacaggacactggccatgggacctccaagcctcttctccctctaccatatcaagttgcttctcacaggccagcagcagtgggaaagagcactagatccaggtccaaccccttttgggggaaacctggcccagggaggggaaatatcttgctcaaggtcaccaggcaaaagggttgcggaatcattattgactctttctttccagtctgatctctttacctatgttatcttatatcatgcagatttggcattgaaagtctgaaaatctttttctcagttagggcagaaagagctgatgtagaaacttgtgctcatggtggctcaggatctccaaaagatagagggttggctaaggccaggtggcagctgctggggccaggctgggaagggtgtggtagccctagcctctgcaagagcaagatggagttgaggttaagtccaggtaggtaggctgggtcaggagggcagaaccaaggcgggggcagagtttggactttggacattctaaacttcctcaagctctgcaggccccagccagagcagggagattttccagtgtaccctggatgtgaccacgtcttcttgttcagtggggtcagaggccaggtgggggcagaggctaggtgggggcagatgcctggcagatcgcccagcccaaagtggtggatggtacctgcttaacctgtcctaaacaccgtccctctttggacagcttcacctcccccaaccgccaacctccgcgcgctctgaggccacggcagagagacctctgaagcctggacatgctcctgggcatgagggcgtctggtggagtgagggggacccaggaggctgggtgcaacctcctcctccttcctccactgtgcatagctcttcccctcctccttgcagctgttggggaaggagaacagaagaaagagaaaaacactgtttccctcttcaaaccaaaacaaacacactcagggttgaagatccaacacgaatctgtggaatgcagggaagatgtctgcggggagagtgccactgcttgcgggtgggcaggaggagacccagccagagttgggacaagtcctcctctctctttcaccgcccctatcctcaaggcgtcagagggagcgtatggacagctccaaacgcccagactcacccatcgcctcaccctccatccgccaagccagcggttgagaaggccatccagtctggctctgcagagggtgtggctggcgtggccgcagactaccagcgaggtgcttaaatgtatatgctcatttttcccccaagcgtacgggaaggggggagtccgctgggtgtttatcttgcagtttaccccagctcccagccctggagagaacaggctagtgctgggtactcggttcacagaatgggagaggactcagccaccgggaccccacttccgctctcatgagagatctaaagggcggaggggtggcgtccagacaggttctggccccgtcagcacttgccaatgattactgcccgaccccacacccaatcctccacttcccgccaacccccagcagccagagggccgccccttaatcctggctcccaagggccagctgccctgggctccgactcagctccggacccgcatcccgcgctcgcacactctctcgctcccaccccacaccctccagcttcacttacaggtagcgctgctgccgctctgtctgccgatggagggcgaccgagtagccgaagaggctgcccgggttcccggcctccttcactaccaggaatcgggtatccaggttgaaggcggagacgacgcagccgccggccgccaccatcaaggcgagcgcacagagcatcaggcgtggggcgcggggcgcgcggctggggccggggcccatggctgccagcggaagcggggtcccggcgagagcgcgtgagggcgcggagctgggcgtgaggacctgttcacctgctccccgcgccgccggaggacactggaacccgccggccgctgcgctccgtagcgctgatcggtttcgtgcccccagccccagccagtttcacagctgcgctctcggatcccttcctaagatccgtgggtctatcttcctgcctccccagcggccgggtcgccgccgtccctgccccgggcaaccggcccccagcttgtcccggccgcgcccccttggccgcgctgtcgccttcgatcccggcttcgcggcggatctggcaagcgcaccggtcgaccgcaaggaggacaggagggaggggtcccccggcgcgcgccccgcctccccacgcccagtcccgcacctccccaccttgcgagcccagcccgggctgcgctttccttccggggaaagagaaaaagatcccggctcggccgcctcctcttaaaggggcagcaccgcccctccctcctcatcctccctaccccagctccgccttctcccccaaacacctgtcggcaacccccaaaggcttagatttcccctccccgcccctcgcttctccgagaaagcgtcgcctggggagcaagatggatgtgacgggcggggccgggggtgggatttgtctggccgctttcctgcggctgctgctgctgctgctgaaaaggccagccgggctggagagacctggcattggcgcatctgggaaccgacgtccgtgcgcggctggctagaatgctggactcgcctccgcagcgctgtgagtccccaagaggtggctggcggtctctgggagttcttcctcgcactcaggcccctcgctgtctttgccgagatttatttctcctatccactcaccctgatccgagctgagattggctcctcagcaaagacagacatatttagcagtggtaacaaccaaatgtcgctaattataattaccaaaaagcatttttccccctaagtgctgcgacttctggtatcaaaggmtaagactgtcaatgtagaaatgagtccgtccttcayagaacgcactgcgyagccgggaagctgagcctagaccgtatccatttctcgtccactcctgccttcagggcccagcccagcagratcccagaggctccctcttcccacccaagctcgaacagagtgtttggagactgggctcggacgtcagcacccatcaggtgtttggtgggtagggccaggtggcagtaagtgggcggagactaaaggtctcctccaccaaggaatcaaatcgaaagggaacttcaagaggttactctggccaggcgcagtggttcacgcctgtaatcccagcactttgggaacccggggagggcggatcacgaagtcaggagttcgagaccagcctggccaatgtggggaaaccctgtctctactaaaaaaatacaaaaattagccggtcgtggtggcgggcgcctgtagttccagctatttgggaggctggggcaggagaatcgcttgaacccgggaggcgcaggttgcagtgagccgagatcgcgccactgcactccagcctgggtgacagagtgagacgtcgtctcaaaaaaaaaaaagaggttactatgtactttcttggatctaactcacatttctcttattgcagctcagagacccattttccccggaacattgtttttttgttttgttttgttttgtttttgagacgacggagtctcgctctgtctcccaggctggagtgcagtggcgcgatctccgctcactgcaacctctgcctccggggttcaagcgattctcctgcctcagcctcctgagtagctgggattacaggcgcccaccaccatgcccrgctaatttttgtatttttagtagagacggggtttcgccgtgttggtcaggctggtctcgaactcctgacctcgtgatccaccccgccgcctcccaaagtgctgggattacaggcgtgagccaccctgcctggcctccccgagcattcttttctccatctattcttaaaataataagaacaaaacaccatgtattaagcacatacgcagcaggaactatgctaaatgcttcacaaatgttaaatcctcacaacaatctttgaagtgttatctctgttttaaaacgagaaaaatgaggctcagggaggttaggcaatttggcagaggtcacacaactaggattttcatcctgtgttatctgaccctggagcccttaactacttatgctaataatgaacatttatacactactttgggcgtgtccaagtttggtgggtcctgaagcttgtgcaatctggggygctctttaagaataaaattattttgtactcataagaattatgagtacaaaattagattcagagcctgggaaagggtcctggcctagctttacagtttacaaatcatttcacaagcaggctcattttatcctcctggcctccctgtgaggtggggattatgatattcatttgacttaggagaaaacagagcctcaggaggttacctgcctgtccaagatctgaattttatgggaggcagagctaggactgaagcygctgaccacarccgtgtctttaagaagacaaactccaggcagatggttgtcagacagctagacatgyctaaacaaaagcagctgtgataacagctttctctgtggtgtttggggagaagacacttgtctctaacggcccttagaacaggatttgttcctgacctctgacttccagagccacccagcctctctcatggtctgctttgtggcccaggrcctgcagggattagaagacatgtggggtcaaggaacaggaagctgacctggatggaagttgaacagtgatctttgctctctgcctggctcctgagtcctctgccatgttcctggagaagaggagccagccagggtaagaagggcaggggcttagggtggaaacgccatgtgggtgaggatcctgcctgaaacagctttgagagtcctgcgatgacagattggccccatgccaggccttatctctttggacatcccaaacaggaatgaccagcatgtccgatcctgggactgggagccggaaagggatgagggatggtttttccactccaggggagtgtccagagggaatgtggagcagagcaggggcgactggtagggggagggcctgagctaaagaatgtgggggagtgtcagaccagtctggggagatggagtgggagtggagggagacatggagactagaaggatctcagctggagagatggagaaagagaaatctcagggttctttggtttcagtggcaccgtcgtctgtaggatcatctcatccctcagttgactttatcatgtcaactctttatctgtcaaccctcccccatggggaagagacccacctagaaacacacagacagacagagaaacaaggacacaggaataatatgtgtaatgaggagtctaagtccatttgttgatgtttgctgacagattttaagcctcacccttccctcttctctgtgccctacacctggacaagctgataagaaagtctgggtgcaccctcctttggtgtttgagggggaatattcacaagccccttcctgagggaaccctcacccctcaaccacaataaaaacccaggccagtctccttcctggctctcccaacacatctgggacctgcttgaaagactgsccctgctccccctggagacctcaattatgtaaataataaaccttttcatactctcttggtgtttgggtggtgtcgtcagtcttcattcaaaccaaaccttggatgggatccatctgcctctgcaggtgaccgtaacaacatgcaaatggtgagttctgctggggggtcatggaagctccctggaggaggtgtatctggacaacagggaaagaaaggagctggagaagaraggcagaaaaattgggtcctggttcaggtgaagttttcccagctggaacaatgacaatgtcaatatcccacaaaggyggcttctgtttatttagcgcttgctgtgttcccacaagtcttyctctacctgccctctccccagccctcatctcactctcccagagccccagagcacaccaatggacaccatcacctctcgggcagatcagcacagagacgtgaagcacacaggcagctgctggaaaaataacaaggaattgcaatggtgtgcccctccgttgaatgcaagctctcttctgccttctcaccttgggcaagttaccttccgttccaggcctcggtttctccatgtgtgaaatgaaagggctggagagaaatctctcactattccccaatctacattcattgtatcccaarccttctaatatctgttcaacgaagtgtaccaaatctcagctattggactgagactcaggggtctatctgacttgaattgaaaatgcaaattactgaagagggagggagggaggagtgctgaagattgaatggatttatcagatttccttctcctatggcccagatgcaggcctagtccaggcgattcccctggctcagaatctgccaggctcaagcattcattgacagcctactatgtaccaatcctgggctgagtcccaacccggggatgacttagaggaggccagsatgtggcctcatgttctggttgctctcacatttaaacaggctaaacccactttgcattgtatgttaggggtggtgcttgtgggacaaagggggctgtcagaacattctggctgccacatgaagttgactttgccaggacagactgggttgtgggggaaggcagctactgtaataatttggccaagaagtgggctgagcaggagcagggctgagggagggagagagggaatgagtaagaaaggcccagggtactgatttgactgggacttcagggacaggtgtggggcgagagggatgctggaagtgaaggagggaaagtgcagaggctttctggggattaataggcaatgatctctatgagggcgtggtgagtaggccccaaacatccggggacttccctgcctgccatccctctgtctctctcttcctttcctactgcccagggcctggccctgctgcacatgccctgccctggcccccagagtccccttctttcctggctgggagattaagactctgctgtgcctacagcattctcaacctcaagtcaaggtggccctttggagcccaggaggccacatggctgagtcagggctgagtcaccaccccccaagggccttgccatttcctgtggagaagcctctttactggcagggttctgtgctcaggtgggaaatctggagaggtcgggggcagggcttcatctacttttacccactaactccctagacactccactgggggtagagggttcctacacgtatgatgatcaaaacatgtgtctgtgcacatgggcccttatgcattcacaggtgtttgcctatgcgactgcatgtctgaatgttttatgtatatttgaatatagatagggaacaaatatttatggagcacatattatgtgtgcagccttttacgtgtgytactttctaataaccctaggaggcgtagatgcctcccaggctatggttgaaaatactgacatgcccaaggtgcaggaggtatgaatacctccccactgtggctggtaacaccccaggtttctccaactccacagtgatgggctttcctccagagccggttcctcaggggcaggagtgagaagtgtgtgtgtctgtatttatccttccaccagtggctgtgattggtcctgtggttggaaacagggtcaagtaaggcccttgggagtagctgggtgaatggacgatggtggcgtccaccttggacatggcacatacttctggtcgggtatccacgtggctggccaacccggacctgccctattaggggccatcgccctcatggctcatcagtgctgagtttcattgccttcttcgtaatgcaatactaatggatacaggcatgtatctgccgtacactagatgaaatgtggttatttgctcaggtagaaataaagactaaaataccaaagtgggaaatcctctccattgtgccttactgatatttaggtaaaaattatcttattggctcttttttttttttttttgagagggagtctcactctgcccaggctgaagtgcaatggcacagtcttggcttactgcgaactctgccgcccggtttcaagcaattctccgcagcctcccgagtagctggggttacaggcacacacaaccacgccaggctaatttttgtatttttagtagagacagggtttcaccatgttggccaggctggtctcgaactccctcctcagcctcccaaaatgctgggattacaggtgtgagtcaccatgcccagcccatcttattggctcttaataactcagaccatatggtgataactcccaaatcagcaccctcccaagttctggccccgtgaattcagttgctgaatccaagttcctgattggaagttcctcaggcaccagcacttggggcacccgagtgctctgctccaggggctcatccccgctggaagcttgaatgtctgctcctccttctcttcacccagctcagccaatcactgtgtccctgattctgccttcttgctgtcttgccagtgtgtctgctcctttctgtcccttctccctggatgactgccagtgcttcctgttgccctccctgcctccaactctccctaccacctgcatggcagccagagtggggttcctgcaaatctccccaagtctgtttcctacttggtatgtctgatggtttcctgctgccctcagcatacaacgccatccctgagatggccctgctcatctttccacgccccccccctccgccctccgctgcccctcaccccttctaattcttcacccaggccacagagcaccttgcagttcctcgatggagccagtcttcctcttgcctccagccttttgctgtttctccaccaccagtcatctgggctaccctctattcttccaggaggtcacagcctagaagtcacatcctctgagtggagtcacctgtccacccttccctggagtagggatcctgaccttaggtttatcgtgaccctttccacctccccagtctgccttcagccccctccgtctcactggatcctccttctctccttgggcacaaggctcttctgatgggcaaacactatggtcaactttggccccttgccctctgacctttctagggtggcagcagcgacctgttgacctctccatctgtattttatttaaactcctctctaccctctccttcctagaactctctccctcttgcaagattcctcagtccactttgggcctctgtttgtgattctcatctcttatgtctcctcagttgaccccttgttcgttaacattctcctccatgctgatgaaacccgccaggctccagccttgatgtttaactcttgccagccacctctggctggccgcaggctccttggactccatgtatccagaagtacttagcatcttcccttcttcctcaacaaggggctcctcctgtaatagcctctgtctcggtgcctggtccccactcccagcaggattccacgagcacacctgcatggcagatacacctgacagcaataacttgagaagaatctgcattcggaatttggagctaaggaatccgagagtgggcaacccagagactcattccttatctatgaggaacatctaagcccctggcccatctctcgtggaattcgagccatggaggggaccggggattgaggtcttttattttgggttaaatgcgggttgccaggtagaggttgctggggcagtgtactaagtgaaaatgctatataaatgccatgcatttttcaagcggttgtggttctgtctggcccactgccactggactgtccctgcatgtaagctccccacaaaccctatatctcgttcacggactctgggtctcttcctcggcctcttgaacctggtgccatcagtagaggcccggcacgacagcaccaggccagcccatgccacccaacctctgcatgcgccggtgcctctggttgggatgccctttccccacttgttcagttggaaaatctccacttgttcttcaaaatctttcgtgagcttctacttcctcagtaaagccttttcccaccccaacgccaacccccatccctagtcactcttgagttgtccaggactcgcactgacttctcgctcaggctggcagtatgattagaccagtgggactgtgaccttggacaagtcccttcacctgcttcctcatctataaattccacataaagatgccaaattcatgggtttgttgaaatggaactggggcccagaagtcagctgctctcccaccaagtggtggtggttatgctcagtgttgacccctgcgtttcccagcccccatggcagcttctccgtcacatggcaggtcttcaaccacggtgtgtccagctgagttccatcaccacgtactctatggcactaaaacaggagcccaatgcaagtgaataagaggccagccctgtctctttaatatcccttgcctcctgtcccctcccccaccctaggatcctgttgggacaaacgtcttggctcagtgggttgaaaaagaaagtcagaattctaaggcatgaatcgctgtgcccactgactcacttcctcctcctcgcctgctctgaatggactgaggccctcagtaactcaggctgaagcctcctcccagccctcacccctcatcacagctcccacaagccccctcactgctgacctcacccctgtgggactaattactgctggtttgaaacctgcttgcaagcgccagccaaactaaggagttagctctcctagagtagactgagggaaggcacacgccctgttcttgggaccccaggtctgatgcccggggcaaggcgcccttagggagcttgatctgggaggcaacaaaagttccccatccccacaatggctctctcctttcctgccaggatcacagacatgctcactattaggcagccctcctatgggtttggcccttgccccctgaaggctcctgtttaaatgcaggagccctacctggcagagtaccgctgggtgctcccaggcaggaaggggcaagagtgacggcattgcctacagagactctggccccgaggtacaaatgagtcaagcaactattaaggtggtcaggggtcaggagggccagaacatggggaagacctgggataaagaatgatttagtgggggcaggtggggtgggcaggggttccagccaggcccgtggcacctgcttctcaggctgttaacaggatgagggcaatgatgaaggggctttcgtgtcctcggaaaacaatcccccaagaccttggccttctccctgtggaggaccccttacccaccttgtcatggacgtcagggacccctctgagtggaggagtcagatagggcttggggggtgtcagggccacgccctcaatggcagaaccaccctgggcagcatttctgacaggtgtgacccagaggcagagtgagagcccagcccaccacacagcagagagaagggaggggagccagatgcaacaggagcagggcagtggggcagaaaccacggcacagcaacatgagggacatagggacatgctcaggaaacactggtgcctgcccgagtttaggccttggcttgctggccttggaactgaggggagctgatggattcatgcatgagaatgagccgacagcctttgtgggtccaaagctccctctgatcgggagttaaggagatccacctgggagttaatatgggggtgaaaatgggaaagggtaagggtctgtggaaatgtagataggctcgagggacatttaggggaggggctaagcaggagctggtggcaggtgggatacaggggacatgggaagagggcagcagcaaggacagccaggaagtctctaccacttctagggcctggagaagccctagaagctggagctggcaatttgccaaagaccctgggatagggttggagctacacaaggggactgaagcccaaagggaccacaaggtggtccatgctaaacccatgaacagaggaaaattcttagaggtctttccctggggccttggctttgatgttgaccaggctgtgccagcctggctttgtgcggtcaggctgggcccacaggaagctcacccaagataaccctcctaatccccaatttcttcccttcccgttccccttcccctttctcttccccttcccctccccttcccttccctttcgttttcttcgttttttgagatagacactgtcacccgggctggggtgcagtggcgtgatcttggctcactgcaacctccacttcctgggttgaagtgattctcctgcctcagcctccagagtagctgggattacaggggcccaccaccacacccagctaatttttgtattttttttagtagagatgaggtttcaccatgttggccaggctggtctcaaactgctcacctcaattgatccacccaccctagcctcccaaagtgctgggataacagacgtgagcctgtttggtcctaatccccaatttctataggcctttcaccacttgcaccctgggctctagttcctcagctctgctcttccttccagccctcttctcattctagcttcttggtgaccctgtctgcagctccagtggtccctacttcattcattctctgagagtccctccctcctttctgcacctgaaggtgagcaaggtggtttgcaaaggacctcagactctgggctggggagctgagctttgggcttggttctgtaagatatccagggttgggttttgagtggggtcagatcagggaataagatggcctcctggagccaggagatgattgacttgaagggaagggaagggcaccgtgtgctgggcccaacgccaggtgcttcccatggatggctcagttaaccctccccacggccctgagagttgggcatggctattattacctctttgcaaataaagaaactatggctcagagatgaccagaggccagttagaggctaatgtgcattggggtgggagggaccccatggcctgggagtggggccaggatgcaggccatgattgcacactggcagggacggtgggtgtgcagtgccatgaggccttctcagggctcaccttcagcccctgtcctccactctctgcacaaccccagcctgtgaggcaggtcttcatgccccaaacacctgcctgccactttctccaggactttgcttggcgggccctctccctgcaacactctagcttcctcttgcttgttgaaagctccccttccttcaaggccaactgaaatccaccaacttccaggcttcccaagtcttggccgatgctttccagttcagcataggtctgtttctccctctgatggagcatgagccacattaggtcacctattagcttgggtgaagttgcttcagctctccatgcctcaatttctctatctgtaaaatggagttgataattgcaccccaatcatagaacccttgtggagagtaaatgaagactcagacagtgcccagcacatagtaaaataaatagaaaataaacccccttccctggaggaggcagacagggcagggtcccgggggtcttgtcttgtttgcctattttctactgggatgatggcggccatggtggcagggcgtggcagcagctgtctctccaccaggagctctgacctctaggaaagccagctcagaccctctttctccaccctgccaatggctgctactacagtgttctgcttggatggagatcaatgatgtggtcaaattgaacctcctctggtccattaaaacacttacgatgtccccgtgggtcctctcaggtcccatcactgtgaggcatgtgtgtttctatgggtacccaagagttggcagagggatcagcacctggggaaggtgttcccatcacagaggaccccagaaaaggctctacctagggctcagactgagactccaacacag

SEQ ID NO: 5755 - DNA, 38299 bp, Homo sapiens
  misc_feature (1)...(38299): n = A,T,C or G, or insertion/deletion polymorphism (see Tables 1-2)
actgtttggttaattgaataatatgaaaattgtggagctgggaggtggtaatgattgtgcctgattaaaagatatgtaacaattttggcatttggttatctgttgacacatatataagtcagttttaaaattcatagcttgttctgattgtcaggtgatctatgacttgtaactgcttgcgcttggttggttggtgttaaatactctgattaggagggtgatgtaaaggatggtatggatgataaattaaggatgaggagtaagaagtagtaattactagaaaagacagcaaataatgtcaaagacctagagatgaggggaaatgtaattctcaggggtgatataaaaggtgaagaagatgtatatttattgtcgtgtttactagaaaaaatacaaagcctgagaatttaccaacaatactgtttaagaaaagagtaacaaaaagagggggaggatttaaagaaaatcattaggtaaaactatagtgagaggtaattaaaatgtcaaaccatccttaaagcgtaggtaaattaccgtagtccaggaaacacaggtttaggagttcagattgacaattaactcagagtcgctatgctcagctctgagatcttggcaaattatacactcaattaacttctgcaaaataaagttacaattacaaaataaagtcattatcattgaatttcatatatttcttattaaatgaggccatgttcaaaggtgaaagtgatttgtaaaccatatgaatctatagaaacatattgcattattaagcatggttagaaaaaagagtggtgaaacttttctttgatatgctgtggactctccaaattttataaatagaagcaggaagaagatagaaaatataaggctttttttgtatttttgtagagacggggtttcaccatgttgaccaggctggtctcaaattcctgacctcaggtgatcctcccgccttggcctcccaaaatgctgggattacaggtgtgagccactgcgcccagccatggtggcatgtgcctgtaatcccagctactcaggaggctgaggcaggagaattgcttgaacccagaaagtggaggttgtggtgagccgagattgcgccattgcactccagcctgggcaacaagagcaaaactccgtctcagaaaaaaaaaaaaaaaaaaaaaaaaaaaaaaaaaaaaaaccagaaaatgtaaggcttaaaagcattggttttacaattttaaaattaattcagtattgtattttggctctgaatcatttagcattctttatcctcagcaatctcatctgaaaaactggtataattttagcacttactcatcagaatatttctgagaattaagcaatacatataaaggctttgacacatatatactctaactataaaagtaattacaaatattagaattgttattaagtggagcaaatggaactagaattggtgccaatatgactcaggtttctaataattctggaagatgacatgaaaagtagaaaatacgtcagagaagagctctgacataaagcaattgtagagatttatctcataaaaattcttaagagaagcaaacattcctatcaggagttcactttgaaattgatagcaagaaaatgaccccaggtaacaagcctaggaaaataagtttaacatgttgctgtcatctttctgtggttcatcctagttgaggtctggaagtccagacctgggttagaaattgactaaagaatacgaagccatgaggttggtcaccaaggagctttgggagaaagataaactgtggctgccaaaacccgacaaatatgccacatttccaaagcaagcatccaagtttggacatcacgtgaatttttaatttaaaagaatcttgtcagctctgcagagctaaagaccatgttcattatacatgcttctagggttacttctaactctgagtctctgattctataattctactttggtaactgacttattactaaccataaatcacatgaatgctcggcatgggatatggcacattatccatgtttagctaagtgaggcagccacaactttatggttaaacgttcagaccatagggcaagactgcctgagtttgaattaacggcttttctactcacaagccacatggcctggagttctgtcactttccttcatgtaccttacttgtaaaatgggaataacataaatactttccttttaggctttttggtgctatggtgaggctgaaatgagttggtatttgtaaaacatttttcagaagttatttcactaaaccagcaattctcacattgtagctgcatcagaatcatatggaaggcttgttaacacatggactcctaagcctccttcgtacagtttctgaatcagtgggtctgggatggatcccgcaaatttttgatcttaacgaagtccaaagtaatgctgatgctggacccgtgaccctatcttgagatccactgccctaaaacattcattgcaaattgtcatcaaaagcttaagtgctatgtaactacgtggaaggaaacaaggtcattttagttatgttaactcagtgtttatgagtattgggagccccaccaagaattgcaggagatattacatgtgggcaagttggtagaggtgattctggaggcatctctgcctccagatggtagggttggagatgagaaaggagaatgtaatccaagcagaaatagtagtatttaaatccggttctgtgataatgatttaaaagaattcctctgagacatctatatacgatgtaatattgtttggcagttaaaaaacaaaagggaaatattgccatttgtcacacatggatgaacctggaggacattatgccaagtgaaataagccagaaaccaaaagaaaaatagtgtatgatctcacttatatatgtgaaatctttttctaaaaggtcgattatacagagatagagaattaaatagtggttataggggttggagaaaggaaatggaaaaatgtagatcagagaatacacagtagcatacatttatatagatctaatgtgcaagaggactatagttaataaaattgtatggtatttgggattcttgctaaaagagtagattttagctgctcgtgtcacaaaaacaaaaatggggtaactgtgagatgatggatatgttgtttcactatagtaaccattttactatctgtatatagcccataacatgttgtataccttaaatatacgcaatataatttacttatttttaaaagaggggtttaaataaaacattgacactgcaggtatcacaggtcattaacgctaacttagccttcaaatagaactttgggagccacaggaccaaggacagcctgcggcgatttacgtaaacccttaaaccaaaaggcccacctgtcaacaggtggaagaggtcaaggaggaaatgaacgggcggccactgaaactgctctgccacccagccaggacctgccaacttgctaggagaaagccctgggaatttaaagagtgaagccacggcgaattagcttcccacacgctcgtaaacataaagaggggcccggtggtcgtttctcatccttgtgctgctgagccccggccgcgtccccagacacagaagtcgggctcatcccccgccctcgctccgccttccttccttccctcccagagctccggaccagctccgcacgaccccagcagctgagcccgggaccgagcccgggacctagcccgggcagctcgagcccattggtcaccagggcaaacaggtgagcgcctcggccaatccttccccggaaagggctggaaccccacgccggctggggcttggcgtgggaatggagcgagtaccgtggctgcagaagcgggcgctggggcggggagggctgagggtgggggagggaagacgcacccggagaaggtgggggcatgaaagcacacgacaattcttcggtgactggtgccaggcaaaaaaaaaaaacacacactgaggaaagacaatcaatagatggagacatctgtgacagatttgtccaaaaaagacaatttgaggagaagctcttgggactttggagcaaaatggagtgattagtagtagttaatattcaagtgataactttaaggagtattaagtacactactgagggaggagaaaggaaatttaaaaacctccacttagccttttgtttctgcaacagcaagcatcataataaaagaacgcttctgggttaatgtggttatgagttatagaactttgaagctgtggaagcggctccaggtctccctgaagagcattactcctggctgtaagccaaaaagaataaggctttttgctcactttggagcagagaacttttcctccctcaggtttggacacaattttccatttcctgggaagattttctgtctctgcctatgtcacaagaggactcaggacctgaaagaagagctcaggtattgccaattcctatttcattatgtacattttcagccttacgtttgtgagaatcccttattcatgtgttgtcttatgctattgatcctcttttaaataatttgaacgtgggcatacccagaacttttatttaagctgaacgagagaattaccttcatcctgctgttccttcctttgtttatctaatgataaggtggaaatgctgtctccaatcatacaaagcttatttaaaattattgtaaccaggtggttacgatggcaaaagtggtcatatgattaatcctatcttaaattttaatttggactaaattataataatacatccatcatctttttatctgtatgaaaatccaagcagttcagccccagtgttatttctcagtgtagtttgtagctaaagggtggttgctggtggaatccaacatcatgctgttccacagaacggtgggatttattacaaattatgaaggtcattttgcttggaaaagcacaataaagagtttatttcaatcctgcatttcaggagagaattaggtttgaattcctgggcttgccccacatatgggtaacagataccatttttttttttctgacaagctgagcatatttcttccctggttatgctccccacctcctgtggcagccatgagctggaggagggaccaaggaaaaaggcagagagatgtcccaagctgagcaaaagcagacagcatcatgcctgcacagggtcagcatggctcaagccctctcagctggtcagtcgctgttgcttatggtcattacttggcagtgaagtgttcaatgtgtctttttttttggcagggacttgaaaaccggttagaaagagatttattctcccttccagtggattattacaacctttaaaaaatgtttctgaagaaggtttaataaaatgaaaaaacattatatatgaaatgataaaatgtgttacaaaattgagtttgatcacatgtacacatatacacgtaaatgtatgtacacctatacatatacacacaatagatgaaaaaggctggaaaggaatacaacaacatgtttaaggattatataagtggtgagattgagtaatttttttcctttttactgcttaattacagtttccaaatgttttattatgcacagatattactgttataatcagtttcttgaaagttactctaaaagaattaatgtatataaaggaaactaaattctatatattttagttgtcacaatctttcttatggtttccagtttcccttttaatgaatgcctgagtaatagggattgctggttttcataaagaagtgagaagctgtgaagaaattttcacaacagtaaatatcccacttgatcataaagcgcagtgtgaggccagcagcacacactatagttttgtaaagagtgcatatgaccacaaagggtaggaatggaattgaccacttacgacccttaaagaaggtctcccagattcccagagtgagtgtgtggtggtcctgggactttgctccaccactctttataactctgaggtatgatgttttttcaggatgaaggtaaaaggcagaggaatcacctgcttgctggtctcctttgctgtgatctgcctggtcgccacccctgggggcaaggcctgtcctcgccgctgtgcctgttayatgcctacggaggtacactgcacatttcggtacctgacttccatcccagacagcatcccgcccaatgtggaacgcatcaatttagggtgtgtgagacctcatgtttcctcttctcaaagagggatcagtcgcagcagtgacttgtccctcaaacatctatgactttgggagatgaatctcaattgttttaacaatatttcttttctgaaatgagctcatgagaattttgtttgttgggggcaataagaaaacttttcctggtaaacttttattaggagaaagttcttctagaatttgaagtccctctwggtaggttgggagactcatgacggtaaaaagcttctttctggctacatttttgctggaaaatgatatagtttctgttaactattggggttatgatcattcatcataagagatgacagggtaactggaagtgtctgcctatataatacacacacacacacacatacatacatatatatatatatgtatcctttttataggccctttggtttctttccatacaaacttatttaaaatggatgcctaattaaatttttaaaaatatgactgtattttaaacgttcatgaaaaaaaagtctgtgtgtgtctgaatacacatgttggacttagcatcgtttatttgacattagtgagcatgtactatgcactggggatacaatggtaagatatactattcacttctaggatgtgtattgatcgttaaaaagacmagacaaatgtacggtcagtacaattaataaaaactaatagagcatacaaagtgttttagagacagtcactaatattaagagctaacattaaggttgtgctcagtaggtgctggcattgggttaagcactgcatccatttaatcctcataacccctttggagtgagttctattatttacattttatagatgaggaaactgaggcacagaaagcctgctgattttacccagggttgtaccactactctgttgagcctgagctcgtaatcatacccaaacgagacgcccaagcctggcctccagagcccaggcttcttaaccactgctgacgaattccacctgggggagtggtgaggagatagtgtcatgaaagaatgggctagatattaagtgttcacaaatagaaaaaggtgaggtcaagggcattccaacctgagggaacagcatatatataaaagtttgaaaatgataagaaatgtgacaagttcccagaatatgaggggggtgattgtaactgaaatggcaagaactgggtagagagccgaccttctgtggcatctggtgaatttcagtttttgaagcatttgattgtctcaatagagtacagttataaagagaggtattgagttttcttgtgtttattttggttatgacatttgaactttagttgacagacttagcttatgcctagaatgtcattttttatttcagatacaacagcttggttagattgatggaaacagatttttctggcctgaccaaactggagttactcatgcttcacagcaatggcattcacacaatccctgacaagaccttctcagatttgcaggccttgcaggtgagactgatggagagagggggcaggttaaagaggtaaggtgggacctgtgagatagaccttcaaaggctgcctatctctacacaatacgaaaatcaacattctgtaaattagaagcagacgtcaatggagaatgttaactgatttttaactgtggaactgtgtgtataaattagaataataagaactctgaggcaagttttctactacctcaagctaatagaaaaaaaatcaatacccagagacgataaaccttcaaaatttaatcctaaaaggacacttctagtcatgtttatctgggaattgaatgtggttcctaaaagtaatgactatcttagacagataatagttttatataaatcaatgtactattttcagtttcattttatttacttattcatgttctacattgttcaattttttaaagttaagaggactcccaagaatgcataaaatcatgcaagaatgatcacaaaagtaagtgagaaagtaaaaggtaaaataagcctagagaaaagaataaagggaacatgaggaaatgcatacatagagacctttaagtctgctataagtaggacttgaagctttcaagacgctaacaatacatgacatctattaaaacttaaactgttcaggaaaagcacagccatgtatgatttttaaatcagaaagaaatgtcttacaaagctcctcataaaatacagtgccataaaataaagtcaataatatccttgtaaaagatgaagtacctgtgttcatagagccttctaacatataccagagctatgtaagggaggttataamcatggtgagagcaatagagtataatgtagctatgtgattctgttgatttggttaatcaggctctatttggaatgtatgtcttcggaggaatagatggattgcatgtcctttatagaattctctacatatatttattctctcgaccaaattttcaatggctgttgaggaacattgagttggagattgaactcccaggttacatttggggcaaagctcttctatgttgccaacttatattttcttttcttattaggggtcttggcattctagagaagcattctcgacagagatgatagttcaggccaagtcaggaaaatatgatgagaaatggtgtttactagcatttcttttttctttatgggagagagtatgttcaactggtaattggagagggaattggagaatacctgagcactattgaaatattcaaaattattttaattgcaactcaaaattagtcatattactcataaccaaaaagtataagacacctcttaatgtccatcaaccaatgatagataaagcgttgtgcatgtatacagtagaatactattcagcaaagaaaggaatgaagggctgatacatgctatgagagggacaggtcttgaaaacattttgctaagtgaaagaagccagacacaatgccataaagtgtatgattccatttatataaaatgtttagaataggcaaatccatggaaacaaagtaaattagtggttgtgaagggctaagaggataggaaaaatgactgctaatgggtattagtttttattttaaggtgcaaaataaagtttattagaaactttaggccgggcgcagtggctcacacctgtaaccccagaactttgggaggccgaggggggggcagatcacctgaggttgggagttcaagaccagcctgaccaacatggagaaaccccatctctactaaataatacaaaaaattagccaggcgtggtggcacatgcctgtaatcccagttactcaggaggctgaggcaggataatcacttgacccaggagatggaggttgtagtgagccgagatcactccattgcactccagcctgggcaacaagagtgaaactccatctcaaaaaaaaaaacaaaacgcaaaaaagaaactttatttagaagtttctaacagtggatatggttgcacaactctatgaatatactaaaaaccaataaattgtacacttttaaattatttttttgagacagaatcttgctctgtcacccaggctggagtgcggtggtgcaatctcagctcactacaacctccaccttccaagttcaaatgattctcatgcctcagcctcctgagtagctagggagtatgtgtgtgtgccaccatgcccggctaattttgtgtgtgtatatgtatttttagtagagacaggatttcgtcatgttggctaggctggtctcaaactcctggcctcaagtgatctgcccgcctcagcctcccaaagtgctgggagccaccatgcccagccagttgtacactttaaaaggtggattttatggcatgtgaactataactcaataaattaaaatcaatagtctctcttatgaaaaatttatgtttaagaaatcttaaatttacttgaaatactaagacttaaaaaaaaaaaccttataaaaattttcaaccatggacaaaagtagaaagaatataatgaactgtaatggaccattacccagctgcaatagttatggactcatagcagatgtctcacctgcacctctacccactattctccgctccattcaactattttgaaacaaatccaaattttcataatattcatctgtaagtacttctatatatctcaaaattaagaaatctttttaaaataaccacaatatcattcatatatcttaaattttaacagtcattcctggctgggcatgatggctcgtgcctgtaatcccagcactttgggaggctgaggtgggcggatcacctgaggtcaggagtttgagaccaaccttgccaacatggtgaaaccccatctctactaaaactacaaaaattagctgggcatggtggtgggcacctgtaatcccagctactcaggaggctgaggcaggagaatcgctksaamccrggaggcggaggttgcagtaagcagagatcacaacactgcactccagcctgggcgacagagcaagacgctgtctcaaaaaaaaaaaaaagaaaaagaaaaaaagaaatatatatatctcattccttaatataaataggcaaatgttcatgagtgttctaatttttctgatattgtcatatttaatttgcaatgaatttgattgaattgggatcctaagaaggtatataaattgcactgaattaatttcaacataagttttgttattgataggacttttccctcttgtgaaaattcctttgacaacataaatatgttcttttttttaattcataggtcttaaaaatgagctataayaaagtccgaaaacttcagaaagataytttttatggcctcaggagcttgacacgattgcacatggaccacaacaatattgagtttataaacccagaggtttttkatgggctcaactttctccgcctggtgcacttggaaggaaatcagctcactaagctccacccagatacatttgtctctytgagctacctccagatatttaaaatctctttcattaagttcctatacttgtctgataacttcctgacctccctccctcaagagatggtctcctatatgcctgacctagacagcctttacctgcatggaaacccatggacctgtgattgccatttaaagtggttgtctgactggatacaggagaagccaggtatctatattgtttatttttttgtcccaattaagtggaggaaatctgcttggaggtattatattaggaagtggagagcccagggtaatttaggagagaaaataacatctcagaaataattcaagaataatgaattatttacacatcatctatggctgtgttttggcaactgtggcagtcaagtagtgtcacagaactgtttcacaaagcctaaaaatccttactatctggctctttataaaaatgttgctgatctctggcttagagaataaatctcatgctccttaggctacaagccaggtcctcatagtgtggtgctggcctatcctcagcctcctttccctcctctccaaccctcagccctgcccatcccaggcacacaggcagtttttgctcttaacaactctggacaacttcctgccacaccacaagctgttttacctcctcgtacctgctgctgcccctgcctggagcccttcctttccttttctgcttgatggttctcagccagccagcaaactgctcagccgttctgagaagtctggctgcttctccacccaccccatctccatcagaataaccatttcaccacttgggttgtttgcctatacttccattcttgaatggataacatttggttatatctactcctattagaagtcttttgcctttcctgcatctagtttatctttaactgtggtttcaatatgtcccaaacttacatatatgtataaaaayacatcatatatgcatttatacatctgtcatatgtacatatacatatgcrcacacacataatcacacactgcatactgacatctcagtcaacaacagatggcatatataatgatcctcccataagatttacaatggaggtgaaataaaactattgcctagtgacattgtagccatcataaagtggtagtgcaatatgttaccttttctaagtttagatacataaataattacaattgtattacaattgcttacagtattcagtagagtaatacrctgtatgggtctgtagcctaggagcagtaggctttaccatatagcctaggtgtgtagtaggctatactatctaggtttgtgtaagtacactgcataatgtttgcacaacaaaattgcctaatgatgcatttttcagaatgtgtccctgttgttaattcataactctatatgtgtaaaataattaaacccataggggctcacatctttcagtcttaataatcaagtgttatccttttgactgagatgacttaataatttttacragacccatgggtcagtcacatcaacctcttctgctttgaaaaattttcatgatttcaagagattcgacagttgttcatggcttcaggtgcctcacttggcatgtggtaggcaatccttttgcactgatctcagtagttaaatgtaacactcctttatctacttgtgggtatcttctattctttgattctgcaaagatgttgatgcagcatttctataaaatgaatttgtggctgtttctctaatgagcatttatttcatgaatatgaaatttatgttctgctgctctgtttccattcttttttacatacttgacaacctgtttttatgctaaatcatagtgtaatcttaattgaaacattttaaaggcaaatttaatatatgtcatagcaccaatacatgtgatacaatggaaagcaatgacaatagctatgacagtctttataggtatacaagctgtgatagctatattgattgccaatttgtcagttgttactgtaaaacatcctcaattgtaaggcacatcttaatttataagttgaaatgtgaaaaaacaaacaaaaaaacatggtcatagaattaggcactttttcttgcctgcctgtctgcctttcttccttctgctgatctttcctgagcatccattggccagggctggggacatacagatgaacaagaatgaagtttatagtttcatgggaagacagataagtaaacaagtcattctaatagtgaataatgaaaaagtaggatataagaagtgaagggtacccagagactataaaacagggagcccacccagaagaagtgctgttcagactgggttcygaaggatgattggtaagtacttgggtcatgatgaaagacaccaagtgtgcgggacatagaaggaacagcgtatgccagagccaatggggcatggcagggttgaggaatggaaaggatttccatggggctggaaccgagggaatgggggtgatrtggtcaggtttgcatttgaggcaaaatacctgatgtccaaggcctgctaactctggctcagtgcaagcaataataagcatgccacagtgtgagcatagtctatgatgaggtttcattaagccagaagtctgccatgttgtcttagcccagggtactgataagtaggtaaaggaatacagcttgttggcaagtgggtgatggggaggcaactctttttttttttttttttttttttttgagacagagttttgctcttgttgcccaggctggagtgcaatggtgtgatcttggctcacygcaacctctgcctcccgggttaagtgattctcctacctcagcctcccgagcagctgggattatagacatgtgccaccatgcctggctaattttgtatttttagtagagacggggtttttccatgttggtcagactggtctcaaacttccaacctcaggtgatccgcccacctcggcctcccaaagtgctgaggttacaggcgtgagcgattgcggccagccaggaggcaactcttatgattgttcaaaggtttcccaacttgccagccacctcctctgcataggtttagactataaaatttgctgaagaatgcccactggtcaggcatctgtgacattacctgtcacactgtagtacacgcagaagagtttggtgtccttggtcagagtgagtttcttaagcctttgagaggacatgtgcacacatgggaaggagatttgaccctatctagccactctgacaaattagatcttctaagaagtacaatgcttttgttaagtgccatgtccagtgcatcatataagagctactatatggaacagcatggatgtctcaggctgtattttgtgtaagggaaaagtctatacctcttaccaagtattccagtgaccagccattttaaataggctcaccagagcagagcttttaaatggtatgtgatatccaaatatttgaaagacaaggcacctatgacttagaaatgctggtccttataatgctggtcctagtgctgtaagacttgcaacctctgacttcgccagaatgtcagacctttaatgagcctccccactgccttggcaaaatgttcttccctcccccttaaacctgaacctgctctagtgcatctacctcatccaagggaaccatcaaccatccagtttccaaagtcataaaacggagtcttccttgacccttccttttagtcactgtccatattcagtcaatcctcacctcctattgattggttctaccttcttcattgtctcctgcatccatctgcttctcttaattcctgttgctactaagctagaccaggtcaaggtaccctgtaattcagtcaatattcttttggataatggaaataaacttgggttttttaatgatacccaaggaattataaataatcctttaataaacagcttatcttttaaagaacagtgaggtcctgtggccatcttaaaatgttaaaatgaagaaatagaactaaactgttattaataaaaactgacaaacatgagcatatcattttgtttccctagatttaaaaaaatgacttattcaactaatatttactgggtaccaaatatatatcaggcatttgctgaacatgggaaatactgcagtgaataagataaacaaaatcctatgtctatgcatattatgttgtagcagggtatacagacatagctttttaaaaaatcaaattcagaagcaaaaaatcagaaaactttccattgaacactaaaatttccaaattgtttcagcttctagcaaaagctatttcttcaaaatgtttgtgtcaattcataaagaggtcacaactgataattcaattgtgatttttttccagatgtaataaaatgcaaaaaagatagaagtccctctagtgctcagcagtgtccactttgcatgaaccctaggacttctaaaggcaagccgttagctatggtctcagctgcagctttccagtgtgccaagccaaccattgactcatccctgaaatcaaagagcctgactattctggaagacagtagttctgctttcatctctccccaaggtttcatggcaccctttggctccctcactttgaatatgacagatcagtctggaaatgaagctaacatggtctgcagtattcaaaagccctcaaggacatcacccattgcattcactgaagaaaatgactacatcgtgctaaatacttcattttcaacatttttggtgtgcaacatagattacggtcacattcagccagtgtggcaaattttggctttgtacagtgattctcctctgatactagaaaggagccacttgcttagtgaaacaccgcagctctattacaaatataaacaggtggctcctaagcctgaagacatttttaccaacatagaggcagatctcagagcagatccctcttggttaatgcaagaccaaatttccttgcagctgaacagaactgccaccacattcagtacattacaratccagtactccagtgatgctcaaatcactttaccaagagcagagatgaggccagtgaaacacaaatggactatgatttcaagggataacaatactaagctggaacatactgtcttggtaggtggaaccgttggcctgaactgcccaggccaaggrgaccccaccccacacgtggattggcttctagctgatggaagtaaagtgagagccccttatgtcagtgaggatggacggatcctaatagacaaaagtggaaaattggaactccagatggctgatagttttgacacaggcgtatatcactgtataagcagcaattatgatgatgcagatattctcacctataggataactgtggtagaayctttggtcgaagcctatcaggaaaatgggattcatcacacagttttcattggtgaaacacttgatcttccatgccattctactggtatcccagatgcctctattagctgggttattccaggaaacaatgtgctctatcagtcatcaagagacaagaaagttctaaacaatggcacattaagaatattacaggtcaccccgaaagaccaaggttattatcgctgtgtggcagccaacccatcaggggttgattttttgattttccaagtttcagtcaagatgaaaggacaaaggcccttggagcatgatggagaaacagagggatctggacttgatgagtccaatcctattgctcatcttaaggagccaccaggtgcacarctccgtacatctgctctgatggaggctgaggttggaaaacacacctcaagcacaagtaagaggcacaactatcgggaattaacactccagcgacgtggagattcaacacatcgacgttttagggagaataggaggcatttccctcsctctgctaggagaattgacccacaacattgggcggcactgttggagaaagctaaaaagaatgctatgccagacaagcgagaaaataccacagtgagcccacccccagtggtcacccaactcccaaacatacctggtgaagaagacgattcctcaggcatgctcgctctacatgaggaatttatggtcccggccactaaagctttgaaccttccagcaaggacagtgactgctgactccagaacaatatctgatagtcctatgacaaacataaattatggcacagaattctctcctgttgtgaattcacaaatactaccacctgaagaacccacagatttcaaactgtctactgctattaaaactacagccatgtcaaagaatataaacccaaccatgtcaagccaaatacaaggcacaaccaatcmacattcatccactgtctttccactgctacttggagcaactgaatttcaggactctgaccagatgggaagaggaagagagcatttccaaagtagacccccaataacagtaaggactatgatcaaagatgtcaatgtcaaaatgcttagtagcaccaccaacaaactattattagagtcagtaaataccamaaatagtcatcagacatctgtaagasaagtgagtgaacccaggcacaatcacttctattctcacactactcaaatacttagcacctccacgttcccttcagatccacacacagctgctcattctcagtttccgatccctagaaatagtacagttaacatcccgctgttcagacgctttgggaggcagaggaaaattggcggaagggggcrgattatcagcccatatagaactccagttctgcgacggcatagatacagcattttcaggtcaacaaccagaggttcttctgaaaaaagcactactgcattctcagccacagtgctcaatgtgacatgtctgtcctgtcttcccagggagaggctcaccactgccacagcagcattgtcttttccaagtgctgctcccatcaccttccccaaagctgacattgctagagtcccatcagaagagtctacaactctagtccagaatccactattactacttgagaacaaacccagtgtagagaaaacaacacccacaataaaatatttcaggactgaaatttcccaagtgactccaactggtgcagtcatgacatatgctccaacatccatacccatggaaaaaactcacaaagtaaacgccagttacccacgtgtgtctagcaccaatgaagctaaaagagattcagtgattacatcgtcactttcaggtgctatcaccaagccaccaatgactattatagccattacaaggtttkcaagaaggaaaattccctggcaacagaactttgtaaataaccataacccaaaaggcagattaaggaatcaacataaagttagtttacaaaaaagcacagctgtgatgcttcctaaaacatctcctgctttacccagagacaaagtctcccctttccatttcaccacactttcaacaagtgtgatgcaaattccatctaataccttgactaccgctcaccacactacgaccaaaacacacaatcctggaagtcttccaacaaagaaggagcttcccttcccaccccttaaccctatgcttcctagtattataagcaaagactcaagtacaaaaagcrtcatatcaacgcaaacagcaataccagcaacaactcctaccttccctgcatctgtcatcacttatgaaacccaaacagagagatctagagcacaaacaatacaaagagaacaggagcctcaaaagaagaacaggactgacccaaacatctctccagaccagagttctggcttcactayacccactgctatgacacctcctgttctaaccacagccgaaacttcagtcaagcccagtgtctctgcattcactcattccccaccagaaaacacaactgggatttcaagcacaatcagttttcattcaagaactcttaatctgacagatgtgattgaagaactagcccaagcaagtactcagactttgaagagcacaattgcttctgaaacaactttgtccagcaaatcacaccagagtaccacaactaggaaagcaatcattagacactcaaccataccaccattcttgagcagcagtgctactctaatgccagttcccatctcccctccctttactcagagagcagttactgacaacgtggcgactcccatttccgggcttatgacaaatacagtggtcaagctgcacgaatcctcaaggcacaatgctaaaccacagcaattagtagcagagrttgcaacatcccccaaggttcacccaaatgcyaagttcacaattggaaycactcacttcatctactctaatctgttacattctactcccatgccagcactaacaacagttaaatcacagaattctaaattaactccatctccctgggcagaaaaccaattttggcacaaaccatactcagaaattgctgaaaaaggcaaaaagccagaagtaagcatgttggctactacaggcctgtccgaggccaccactcttgtttcagattgggatggacagaagaacacaaagaagagtgactttgataagaaaccagttcaagaagcaacaacttccaaactccttccctttgactctttgtctaggtatatatttgaaaagcccaggatagttggaggaaaagctgcaagttttactattccagctaactcagatgcctttcttccctgtgaagctgttggaaatcccctgcccaccattcattggaccagagtcccatcaggtatgtgaaactttttctttacacttagtttttgttagaaaacaagaagaagattgttatgttttgggattaaacatccaaagaatcagtatcagtttcaaatttttctaagacaaagaaactattaatatcctcatttgacactggcatattttcactcatcagaagggattaaatatgttaactaagaacattttttggaatgcctcaaaagctgattcaaagtaatatgatttgaaaaagagagaatggttattgtgttgaaccatctggcttttaaagtaaaattatgtgaataaaaaaatccaggctgagcacagtggctcacgtctgtaatcccagcactttggggaggccaaggtgggtggattacctgaggtcaggagttcaggatcagcctggccaacatggtgaaacccctactctactaaaaaaakacataaattagccgggtgtggtggtgggcacctgtagtcccagctactcgggaggctgagacagaagaattgctcgaacctgggaggcggaggttgcagtgagccaagattgtgccattgcactccagcctgggcaacaagagtgaaactctctcaataaaaataaaattaaataaaataatccaggaataattttagcaatctgaagactagatgtcctaattttttttttttggtctgtcacctagggtggagtgcagtggtacaatcatgtctccaggggctcaagcaatcctcctatctgaaccacctgagtagctgggactacaagtgcacaccaccatacctagctaatattttattttttgtttgtagagacagggtctcactatgtttccagggctggtcttgaactcctgggcttaagtgattctcccacctcagcctcccaaagtgttgggattatacaagtgagccatagggctgggctttcattttaatttaaatgtattcttagtagcccaaaaaacgatagctttatgttttctaaataaactttgatgacccgtagcaataattttctttttttcttctcaggacttgatttatctaagaggaaacagaatagcagggtccaggttctccccaatggtaccctgtccatccagagggtggaaattcaggaccgcggacagtacttgtgttccgcatccaatctgtttggcacagaccaccttcatgtcaccttgtctgtggtttcctatcctcccaggatcctggagagacgtaccaaagagatcacagttcattccggaagcactgtggaactgaagtgcagagcagaaggtaggccaagccctacagttacctggattcttgcaaaccaaacagttgtctcagaatcatcccagggaagtaggcaggctgtggtgacggttgwcggaacattggtcctccacaatctcagtatttatgaccgtggcttttacaaatgtgtggccagcaacccaggtggccaggattcactgctggttaaaatacaagtcattgcagcaccacctgttattctagagcaaaggaggcaagtcattgtaggcacttggggtgaaagtttaaaactgccctgtactgcaaaaggaactcctcagcccagcgttyactgggtcctctctgatggcactgaagtgaaaccattacagtttaccaattccaagttgttcttattttcaaatgggactttgtatataagaaacctagcctcttcagacaggggcacttatgaatgcattgctaccagttccactggttcggagcgaagagtagtaatgcttacaatggaagagcgagtgaccagccccaggatagaagctgcatcccagaaaaggactgaagtgaattttggggacaaattactactgaactgctcagccactggggagcccaaaccccaaataatgtggaggttaccatccaaggctgtggtcgaccagcagcataggtaagtctatacctttgggttggaattatctgctttatgtatttagctgtacaacttctgaaatggaaaaagtgacacagtgaggctagcagcagttttagagtacacatagactttggacataaaggaaactctctcaaaaaaaactaatcttttgagatcatttgaatacaaaaaccattcttttcacwtgcttaactcaaagggtcaacttcttagggtttttatattttaggcagaattaaaaaatctcatttatctccatacttggcacagttttaaaatagtaactgtaggacaggcacggtggctcacgcctgtaatcctagcactttgggaggccgagacagatggatcacctgaggtcaggagttcaggaccagctcggccaacatggtgaaaccctatctctactaaaagtacaaaaaaaaaaaaaaaaaaaaattagccgggcatggtggccgggcgcctgtaatcccagctgcttgggaggttgaggcaggagaattgcttgaacctggaaggcagaggttgcagtgaaccgagattgcaccactgcactccagcctaggcaacagagtgagactttgtctcaaaaaaaaaaaaaaaaaaaatagtaattgtataaatatattcacactctctgtaaacaaaacagagaagggaatttttatgatgcagtggagattctagagagagacactccgttattttactcgtctgagtcccctattcgacattttaaacttcattataatcagtacttaattttttctttcctaaaattacaaagcactttgtgaaagtcacaatattaagacctccaccaagtgaaacatattcagggcccccgcattctgatgtgatgagacacatatatacaaatacacactttctctggtctgttataggcatatgaatatatatattttttgagacggagtctcgcactgtcgcccaggctggagtgcagtggcaggatctctgctcactgcaagctccgcctcccaggttcacgccattctcctacctcagcctcctgagtagctgggaccacaggcacccgccaccacatccgactaattttttgtatttttagtagagacggagtttcaccatgttagccaggatggtcttgatctcctgacctcgtgatctgcccgcctcggcctcccaaagtgctgggattacaggcatgagccaccgtgcctggcctcaatattcattttatagctggctttctatataaattatatcttcaaaaatcaataattatagcttatgaggtttttttttgcaagtggcatgactttacacaatggttttccattacaggacaaaaaatgaggatgagaatttccatcttatatatctgtttattcattaatagaaaacatccatgcaaaaaaattacacatagtaaatgtgaatttgtactcatgcttaggagttgaagatttttttctaatgacacgagttgatactgaatacagctaataaatttaacttgtgatctttagttcaaaagtaaatgttaattctcaagtttttcaaatgtcatcaaaaatcacctaaattaaattgaaatttgtttagatttagaatttttaaatgctgagttatgaaatgtgagttttgtgctttggagaggctgaagatgcctctgcattaatctttattaagaattctgtcttccactctgggaaaccttctattttcaaaagtaaattatctctctcaaaaatattagtttataaaaagaaacatcaatagttctgtctgttatatgtcacaatctccagttgcatcagatcttgggtgcaggggatatcactctaagccagtttttctccaagggaagaccccctaccagtagcattagcattgtctgggaatttgttgaatcaggagctctgattttgttttaataagcaatctgttcttaaaagccctccaggtgattttgttgctaaaatttgacacttgtgttcaaacttaattatttatgttagctgggaagttttttaaagagtgggtttctacatccttggcgagacctattgaagcagaatttcaggaaaccaaagccggggaatatgcatcttaaactcgacccatgtaattctaatgcagctgatgagggatcttcattgagaacccagttagaacagtggttctttgctgcacatggaaacctttaatccggaaaattctaagaatcctgatgcccaagccatgctgcacacatattaagtcaaattctggaggtgagactcagacctatcattattattttaaactccacaagtgttttaatgtttagccaagtttaagaaccaatacttttagaaagcattaggaaagaatgccagtatagcatggtggaaagcgtaaggcttgagaaccagccctgtgacctaaggcaagttgctaaatctctctaaataccaatttttcagctgtatagtgagggaattacttcaagattaaacaaccagtgcaaagcacctggcagtttcycttcctttaggtgtatttgtattgattttactttggtttatatgccagagaacttccttccatacttggggaaaaaaaaawtttctctaatattttactataatactttccatacttacctttgctggagaataacagtgacttgatgactgggtgtggtggttcacgcctgtcattccagcactttgggagaccaaggcgggaggatcgctggaacccagaagttggagaccagccttggcaacacagtgagaccctgtctctacaaaaaataaaaaaattaggagggcatagtggtgtgtgtctgtagtcccagctactcagaggttgaggttggtggattgcttgaacctgggaggttgagactgcagtgagccgtgatctcaccactgcactctagcctgggctccagagtgacaccctgtctcaaaaaaatataaagtaaatagaaaataggagagagagaaatgacttgaggctgtttgacttggttagcacttatgctatgaaaacagtttttactttcctctcgttttatctacctgcttagcccatgttgcccaaaaataagaaagacgttttctcatataggtatccctgatagcacttttagcaccagttgagtctccactggtctaaaaaagtagatttagttttaccaggaaagatctgccatctggtggttaaatttggtaatgataggctgtgcagccactgtacatctggagaaaaatggtattccacacagctcaatctagtgcaaaaactagtcactgtacagctgcccatagagggcagatgctgcaacaaccttctaaggaaccttgcgttggtattctaacaaagtaaaatttatttttttctaaaacagtttcatttttgtcacccagactagagtgtagtggtgtgatctcggctcactgcaaccccagcctcctgggttcaagcgattctcaagccttagcctcccgagtagctgggatcacaggcatgtgccatcatgctcagctaatttttcgtatttttagtagagatggggttttgccatgttggccaggctagtctcaaactcctgccctcaagtgatctgcccacattggcctcccaaaatgctgggattacaggtgtgagccactgtgcccagccaaagtagaattttctaaccaaatgattcagtaattgttttgttactaataactgtttagaaagtatcatctggcatcttttctgagcaactgagtttacctatatatattacaaaatcaccatgtttgtggatccaattagtttacttggtatgtgaaatggtcaaggaagtcatggtgtctagaactcccatatttctagcatgtgcctcttcattaagattttttttaaaaaattactatgtaacggagattcatttgaattccatctgagaaatacttacttgcactaaattatacctgttcaattagataatttcatctttcagcaaatggcttagaagacaataagctggtagtaattttatttttttattgcaacaatttaaagctaatcacacatacaaaaacaggtaactatgaggtgatggayatgctagttaatcgtggtcatttctctctctctctmtmtatatatatacctcaaaatgtatgtgtatatatatatctcaaaatgtatatatatatatatctcaaatatgtgwatatatatacacacacacctcaaaatgtatatatatctctctcaaaatgtcatgttctacacctcaaagatacacaattttcattggtcatgcttcaataaagctggggcagagggaggcaatcctgagtaaaacagtttccctcattgctaacagctgcacactcaaatgaatctcttttctccttagagtgggcagctggatccacgtctaccctaatggatccctgtttattggatcagtaacagaaaaagacagtggtgtctacttgtgtgtggcaagaaacaaaatgggggatgatctgatactgatgcatgttagcctaagactgaaacctgccaaaattgaccacaagcagtattttagaaagcaagtgctccatgggaaagatttccaagtagattgcaaagcttccggctccccagtgccagagatatcttggagtttgcctgatggaaccatgatcaacaatgcaatgcaagccgatgacagtggccacaggactaggagatatacccttttcaacaatggaactttatacttcaacaaagttggggtagcggaggaaggagattatacttgctatgcccagaacaccctagggaaagatgaaatgaaggtccacttaacagttataacagctgctccccggataaggcagagtaacaaaaccaacaagagaatcaaagctggagacacagctgtccttgactgtgaggtcactggggatcccaaaccaaaaatattttggttgctgccttccaatgacatgatttccttctccattgataggtacacatttcatgccaatgggtctttgaccatcaacaaagtgaaactgctcgattctggagagtacgtatgtgtagcccgaaatcccagtggggatgacaccaaaatgtacaaactggatgtggtctctaaacctccattaatcaatggtctgtatacaaatagaactgttattaaagccacagctgtgagacattccaaaaaacactttgactgcagagctgaagggacaccatctcctgaagtcatgtggatcatgccagacaatattttcctcacagccccatactatggaagcagaatcacagtccataaaaatggaaccttggaaattaggaatgtgaggctttcagattcagccgactttatctgtgtggcccgaaatgaaggtggagagagcgtgttggtagtacagttagaagtactggaaatgctgagaagaccgacatttagaaatccatttaatgaaaaaatagttgcccagctgggaaagtccacagcattgaattgctctgttgatggtaacccaccacctgaaataatctggattttaccaaatggcacacgattttccaatggaccacaaagttatcagtatctgatagcaagcaatggttcttttatcatttctaaaacaactcgggaggatgcaggaaaatatcgctgtgcagctaggaataaagttggctatattgagaaattagtcatattagaaattggccagaagccagttattcttacctatgcaccagggacagtaaaaggcatcagtggagaatctctatcactgcattgtgtgtctgatggaatccctaagccaaatatcaaatggactatgccaagtggttatgtagtagacwggcctcaaattaatgggaaatacatattgcatgacaatggcaccttagtcattaaagaagcaacagcttatgacagaggaaactatatctgtaaggctcaaaatagtgttggtcatacactgattactgttccagtaatgattgtagcctaccctccccgaattacaaatcgtccacccaggagtattgtcaccaggacaggggcagcctttcagctccactgtgtggccttgggagttcccaagccagaaatcacrtgggagatgcctgaccactcccttctctcaacggcaagtaaagagaggacacatggaagtgagcagcttcacttacaaggtaccctagtcattcagaatccccaaacctccgattctgggatatacaaatgcacagcaaagaacccacttggtagtgattatgcagcaacgtatattcaagtaatctgacatgaaataataaagtcaacaacatctgggcagaatttattttttggaagaagtttaatcaaaggcagccataggcatgtaaatgaatttgaatacatttacagtattaaatttacaatgaacatgcaaaataaaaggacttgtaaataaatgcattatgaactgatgatactgatttatttaatggatctcaaaacaaacttttaacttaaggcacttttattttgccaacaaataacaataaacaaacattgaaacggttcactataaaataacaaatggctaatgtacctgaatttttcagtaaaaaaatgaacttctaataccagttgcctagtgtccacctcctatcaatgttacaagcatggcactcagaacagagacaatggaaaatattaaatctgcaatctttatgatgtaaatttaccatcctgatgtataaatattttgtggtttataaatttttttgctaaaacctacagaaaataagcactgaactgtcttatgattcaccatttgttcacactgaaaattttcattgatggggaatacaaaaatgttttaataactgcatttaaaaataaatgcaggctcacttttccacatgtaaaaagcaatgtaatacctgcacatcataaaatgtgaaaagggggttatttttgtccaaatacacccattaaaaaggttttaaaaatacaatgaaacttctttataactttaaaatctagctcaggcacccctggtttggagctgtttataaggaaatttttctgagcaggaatcgttgctctataagcatttcatttcattaattctttatgggatgggaaaatgcttgggagggtctaggtctattatatataatgaagtttcactgtatttaaaatctgatcaatcctacacaaaatgtgtttttgtaattcactgaatttatattacawgcttaattcaacctgaattaatttggggaatattaaatgattgatcttatctaaatctaggggtggggttttccagtgtaatttctccagcatctattcaaacattcacctagtacttacttacttaagaattataggagctttataaatgggaaaaaaatgccataggtcttagatatctcagtgcacaaaaccgagaattactaataagttagcccctgccaatcatttgagacatgtggaatagcgcccttgggttttcatcacactgactttcagttagccccatctcagcctaaaatgtgacctggttgcaacttatgtctgatgttagtaccctgtggctggaagtggtcaaagctacgcattgatctcctctacttccaggccaagaagggtaaatgcaatgactgacaaatgcaaccctattaagaaaaagcctacagtgtaaacaagagagtctatgggcttcttatatccaagaactgdgattgataggtatagctgactccatttgatttcaaggtcttgtctttaaggggagctggggtctcgctccatcttattctaaggtaatttcctctggtaaggtaaagtamcaggttctgccacagggctttaccttgtgaccatcttaatgcaaaagaatgcatttgcaagaaaasaaaaaaaaaaaaaaaaaaagaaacctctcaagatacagaattaacagggagaaaatctgaagactaaagtaattctagttattttctttataatgcgcaggggtaaaacagcattcctcaactttcaatagaatcgtggaattaattagagtcgtagcataacttcctcacctaaaaaaagaaaaaagatatgccccacagctttcatgtgcaaaatgattaataatttaactcacctctgcaaagtataaagtgcatacaaatgctatgcaattataacactcattcttaaaacagtattactgttgtttgcaatgctgagctacaaaatatatggttcaaactgaactggcaaagaaatttggaaagaaataatgatggaacatgactcactcactargcacaacattcacatttcggttgatttgccaatgcagtcattatatagatatattactttgaagaaaacaacttcattagcttatctaagtatgtttcttgagaggaaaaaatctgatatacaaaaccagcaaaaatgtgtacagatagatacatcttctgaaagcagatagactattaatttagtgaaaagaatagtttttaatgttttggcaaagtcttttccagcccagagtaaacacaaaatgggcaggctggagtgaaatattttcacagtgtacaaagcagttcacatggatgttgccacagcaaagtaagctgacatgtatttgaggtcatttgcatgagtcaaactttgcaatgagtaactcacccaggaagatataaattatttatagataatgatttgcaaaagaaaatgtctactaaagttgtactagctacattttaaaaaaagtagatttacatggtctgctcattatagacaagtctattcacagtatgcttgactatattatatgtaaaatcatatggcaaaagaaaatgaaataacagagaacatgggaaaatatcccccacatatgttttaaaatgccctgcaattttcacattcaaaattttatgcatctaaatctaaaaaaatattatatagaatactcttaagttacacaaactgataatttactggtttcttttttactctaataggagcaaattaccacatacttgaacaaagttaaaatagttactatttctttataataaatttgatgtataatttacttgtgctttttgcaccaatttataaatacagtatatgcaatacacaaccaagactgacactgacagtaataattaaattcaaaagagcaaatacttaccatacaaaataaacagcaaatacaccttttatgaaaaccagagccttctggactttggggccagattctctggaaaccatgtcaagtgtgagcactggaatctcaagccagctactggatttttttttccccttaaggtggcataaggttcaggagaaccaaaactggcaataaatagttggacgattccactgcagttctttcaggcctttaggatttacatgttgtaccttcacaatgactctcatcaatgatcttgcctcaaaacaaatttgagtacagctacttctaacaggtttccgcacatcttagggcggctctcaaagaaaccttggtttaggttcttggtttaagaagtttaagtackaagcaacaatctgtttcagcaccttttgaccacaacaaaagcaaagaagagtcctacataaataagaacaaagtttataaagtgcttatgagattacaaacatttcaaattagagcgatgcaaataaatgtccgtttcaccatcacaggtgaatgcagaataaacaggccatgtttctgtcaagatctgacatgcctttcaaatcagtagtttggtccagcacagtttggaaaataaaattaaaaaaaaaamaacaacgtcatcattaatgaatgaaatacataaataccttagatccatcataatccattctttctagaaatgtgagattcaaaaaaagcaccaatttcaaaaggtctgctagcacactcttccgggagtaggcctgcctgcatgattcacatttgtaaacctactttaaaggtgaattcaacaaaatcaaaccacaacttctccttggctttttgtttaaacaccttttttttttttgtgagatgtagcataaaatatagtaaaatgtcaaagaaatgaaaaaaagggacatttttaagatgactaatgcattaaatttgattttctgtttttcagtgcaaacataaaacgtcatgtcttctcctcttgcagattcagaagtgtgaaggatgcccatacggagtcactccttgctgtggctggttgcctaaggagaaaaataaattgaaccaaaattacagacacaaaactattgcacagatggatgctaccctcttgtcactgctctcagtaccagctgcaggtasagggaaacagaatggccggagagtactatccttgccctgaaaaacccttgtggtgggattcaagtaccaccctgcagaggggacacctttattcacagtccacacttgccaatgcaaggccgcaggatttaggttactggcccatccagagtgtctccctctgaactaaactacttggtattaactttcaaaaggaatacagtaaaagtttcataaaacattgaaagttctcaaaatgcttatgaaagtcagcaattctactttaacacataattggtaagaaaaaattagattggaactgggcaattttctgcaaatagccataaggtatgtacaacagaactgtgcaagagtatatgcaggtgcaagactgtccgtgtgtgatgactcaagcgtgtgcctatgtagacatgcatgcctgcacatgcatacagaaacaaggaatggtcagtagataccaaaaaatgacatgggcttagaaacagctactgcttgtttaactctggagtattcaaatccggaggccccattcacatgggccatgctatcaaaggagccctctggagttgtgtggtgagcagctcagtttagtcaccacccttcaacaatggagtgtggcataactgcttatcaggcagctgagtatatactgtggttaggaggtgggctctggaaggaatgcttctgagctcaagcctcagctctattagctgaaaaaccttgggcaaattagtcaatgttcccgttcttcagttgcttcctcatctgtaatgtgggaacagtaataatacataatctcacagggtgggttaaaaataaagtaaatcaatacatggaaagtcctagtgcctgggtcctagagagtcctccataaatgatggctttaacaaaaagctgagctctggtagacaggaactaagagtagatatctttccccaaacagatgccactttataaaaatcatagttacctatttctaaacactagaagaaaaaatctgccttaagattgtattttctataagaataaggattctggaattagtgaaacataatgagattttaattacaaatgtgttttaatagaccagatctattaaacagtaaacagtagctagaaatgaagatttacttgatttaactgacattaaatgaggccataagaggaaaatatttttaaagaagaaaaaaaattttgggtatccactggtagagacagacactaaggtgtaagagggatatccctctgtcagaaaatcaactcacacagcagccaggcagaaaattaagactaaaaccaagctgcccctcagtaattacatgacctgtttccttatgtctcagcaggctaccagacctgcaccactgccttcaccacaaactagtcttccctctggtacctcacaagtacataatccaagaccaagaagaaactgctagtctcactcattgcacggatggaaaaactacacaatccagataatggcagccaagctgacaccaaaatttacgtcttctgacttccaggctaatattctttgcatcacagggagcttgctcccatttctaaaaggattttccgtcctatgacacccgcccaggggtgattcaattcatgggagcacactgctggcattgagatgaggtatgatgaaatgggctattggtaaattctctagaaaggcagcacattaaacaaaacaaaacaaaacaaaaacaccacaccagcactacaggcaagattactagggagaaaacactgtctcgatcatgctgtgtatgatgttataggttttgatttatgagtcactatcagaagggtaggatggtgcagtggtaagaacattcacagtctgacagtttagtgctggcctccctgtatctgaagatcttcggggattggaggagccaagatggccgaataggaacagctccagtctacagctcccagcgtgagcgacgcagaagaccggtgatttctccatttccatctgaggtaccgggttcatctcactagggagtgccagacagtgggcgcaggccagtgtgtgcgcgcaccgtgcgcgagccgaagcagggcgaggcattgcctcacctgggaagcgcaaggggtcagggagttccctttccgagtcaaagaaaggggtgacggacgcacctggaaaatcgggtcactcccacccgaatattgcgcttttcagaccggcttaaaaaacggcgcaccacgagactatatcccacacctggctcagagggtcctacgcccacggaatctcgctgattgctagcacagcagtctgagatcaaactgcaaggcggcaacgaggctgggggaggggcgcctgccattgcccaggcttgcttaggtaaacaaagcagccgggaagctcgaactgggtggagcccaccacagctcaaggaggcctgcctcgcctctgtaggctccacctctgggggcagggcacagacaaacaaaaagacagcagtaacctctgcagacttaagtgtccctgtctgacagctttgaagagagcagtggttctcccagcacgcagctggagatctgagaacgggcagactgcctcctcaagtgggtccctgacccctgacccccgagcagcctaactgggaggcaccccccagcaggggcacactgacacctcacacggcagggtattccaacagacctgcagctgagggtcctgtctgttagaaggaaaactaacaaccagaaaggacatctacaccgaaaacccatctgtacatcaccatcatcaaagaccaaaagtagataaaaccacaaagatggggaaaaaacagaacagaaaaactggaaactctaaaacgcagagcgcctctcctcctccaaaggaacgcagttcctcaccagcaacggaacaaagctggatggagaatgattttgacgagctgagagaagaaggcttcagacgatcaaattactctgagctacgggaggacattcaaaccaaaggcaaagaagttgaaaactttgaaaaaaatttagaagaatgtataactagaataaccaatacagagaagtgcttaaaggagctgatggagctgaaaaccaaggctcgagaactacgtgaagaatgcagaagcctcaggagccgatgcgatcaactggaagaaagggtatcagcaatggaagatgaaatgaatgaaatgaagcgagaagggaagtttagagaaaaaagaataaaaagaaatgagcaaagcctccaagaaatatgggactatgtgaaaagaccaaatctacgtctgattggtgtacctgaaagtgatgtggagaatggaaccaagttggaaaacactctgcaggatattatccaggagaacttccccaatctagcaaggnnnnnnnnnnnnnnnnnnnnnnnnnnnnnnnnnnnnnnnnnnnnnnnnnnnnnnnnnnnnnnnnnnnnnnnnnnnnnnnnnnnnnnnnnnnnnnnnnnnnnnnnnnnnnnnnnnnnnnnnnnnnnnnnnnnnnnnnnnnnnnnnnnnnnnnnnnnnnnnnnnnnnnnnnnnnnnnnnnnnnnnnnnnnnnnnnnnnnnnnnnnnnnnnnnnnnnnnnnnnnnnnnnnnnnnnnnnnnnnnnnnnnnnnnnnnnnnnnnnnnnnnnnnnnnnnnnnnnnnnnnnnnnnnnnnnnnnnnnnnnnnnnnnnnnnnnnnnnnnnnnnnnnnnnnnnnnnnnnnnnnnnnnnnnnnnnnnnnnnnnnnnnnnnnnnnnnnnnnnnnnnnnnnnnnnnnnnnnnnnnnnnnnnnnnnnnnnnnnnnnnnnnnnnnnnnnnnnnnnnnnnnnnnnnnnnnnnnnnnnnnnnnnnnnnnnnnnnnnnnnnnnnnnnnnnnnnnnnnnnnnnnnnnnnnnnnnnnnnnnnnnnnnnnnnnnnnnnnnnnnnnnnnnnnnnnnnnnnnnnnnnnnnnnnnnnnnnnnnnnnnnnnnnnnnnnnnnnnnnnnnnnnnnnnnnnnnnnnnnnnnnnnnnnnnnnnnnnnnnnnnnnnnnnnnnnnnnnnnnnnnnnnnnnnnnnnnnnnnnnnnnnnnnnnnnnnnnnnnnnnnnnnnnnnnnnnnnnnnnnnnnnnnnnnnnnnnnnnnnnnnnnnnnnnnnnnnnnnnnnnnnnnnnnnnnnnnnnnnnnnnnnnnnnnnnnnnnnnnnnnnnnnnnnnnnnnnnnnnnnnnnnnnnnnnnnnnnnnnnnnnnnnnnnnnnnnnnnnnnnnnnnnnnnnnnnnnnnnnnnnnnnnnnnnnnnnnnnnnnnnnnnnnnnnnnnnnnnnnnnnnnnnnnnnnnnnnnnnnnnnnnnnnnnnnnnnnnnnnnnnnnnnnnnnnnnnnnnnnnnnnnnnnnnnnnnnnnnnnnnnnnnnnnnnnnnnnnnnnnnnnnnnnnnnnnnnnnnnnnnnnnnnnnnnnnnnnnnnnnnnnnnnnnnnnnnnnnnnnnnnnnnnnnnnnnnnnnnnnnnnnnnnnnnnnnnnnnnnnnnnnnnnnnnnnnnnnnnnnnnnnnnnnnnnnnnnnnnnnnnnnnnnnnnnnnnnnnnnnnnnnnnnnnnnnnnnnnnnnnnnnnnnnnnnnnnnnnnnnnnnnnnnnnnnnnnnnnnnnnnnnnnnnnnnnnnnnnnnnnnnnnnnnnnnnnnnnnnnnnnnnnnnnnnnnnnnnnnnnnnnnnnnnnnnnnnnnnnnnnnnnnnnnnnnnnnnnnnnnnnnnnnnnnnnnnnnnnnnnnnnnnnnnnnnnnnnnnnnnnnnnnnnnnnnnnnnnnnnnnnnnnnnnnnnnnnnnnnnnnnnnnnnnnnnnnnnnnnnnnnnnnnnnnnnnnnnnnnnnnnnnnnnnnnnnnnnnnnnnnnnnnnnnnnnnnnnnnnnnnnnnnnnnnnnnnnnnnnnnnnnnnnnnnnnnnnnnnnnnnnnnnnnnnnnnnnnnnnnnnnnnnnnnnnnnnnnnnnnnnnnnnnnnnnnnnnnnnnnnnnnnnnnnnnnnnnnnnnnnnnnnnnnnnnnnnnnnnnnnnnnnnnnnnnnnnnnnnnnnnnnnnnnnnnnnnnnnnnnnnnnnnnnnnnnnnnnnnnnnnnnnnnnnnnnnnnnnnnnnnnnnnnnnnnnnnnnnnnnnnnnnnnnnnnnnnnnnnnnnnnnnnnnnnnnnnnnnnnnnnnnnnnnnnnnnnnnnnnnnnnnnnnnnnnnnnnnnnnnnnnnnnnnnnnnnnnnnnnnnnnnnnnnnnnnnnnnnnnnnnnnnnnnnnnnnnnnnnnnnnnnnnnnnnnnnnnnnnnnnnnnnnnnnnnnnnnnnnnnnnnnnnnnnnnnnnnnnnnnnnnnnnnnnnnnnnnnnnnnnnnnnnnnnnnnnnnnnnnnnnnnnnnnnnnnnnnnnnnnnnnnnnnnnnnnnnnnnnnnnnnnnnnnnnnnnnnnnnnnnnnnnnnnnnnnnnnnnnnnnnnnnnnnnnnnnnnnnnnnnnnnnnnnnnnnnnnnnnnnnnnnnnnnnnnnnnnnnnnnnnnnnnnnnnnnnnnnnnnnnnnnnnnnnnnnnnnnnnnnnnnnnnnnnnnnnnnnnnnnnnnnnnnnnnnnnnnnnnnnnnnnnnnnnnnnnnnnnnnnnnnnnnnnnnnnnnnnnnnnnnnnnnnnnnnnnnnnnnnnnnnnnnnnnnnnnnnnnnnnnnnnnnnnnnnnnnnnnnnnnnnnnnnnnnnnnnnnnnnnnnnnnnnnnnnnnnnnnnnnnnnnnnnnnnnnnnnnnnnnnnnnnnnnnnnnnnnnnnnnnnnnnnnnnnnnnnnnnnnnnnnnnnnnnnnnnnnnnnnnnnnnnnnnnnnnnnnnnnnnnnnnnnnnnnnnnnnnnnnnnnnnnnnnnnnnnnnnnnnnnnnnnnnnnnnnnnnnnnnnnnnnnnnnnnnnnnnnnnnnnnnnnnnnnnnnnnnnnnnnnnnnnnnnnnnnnnnnnnnnnnnnnnnnnnnnnnnnnnnnnnnnnnnnnnnnnnnnnnnnnnnnnnnnnnnnnnnnnnnnnnnnnnnnnnnnnnnnnnnnnnnnnnnnnnnnnnnnnnnnnnnnnnnnnnnnnnnnnnnnnnnnnnnnnnnnnnnnnnnnnnnnnnnnnnnnnnnnnnnnnnnnnnnnnnnnnnnnnnnnnnnnnnnnnnnnnnnnnnnnnnnnnnnnnnnnnnnnnnnnnnnnnnnnnnnnnnnnnnnnnnnnnnnnnnnnnnnnnnnnnnnnnnnnnnnnnnnnnnnnnnnnnnnnnnnnnnnnnnn

SEQ ID NO: 5756 - DNA, 16963 bp, Homo sapiens
tgtctctgtctccttctctcggcctctgccccgttccttctctccctcttgggtctctctggctcatccccatctcgcccgccccatcccagcccttctccccgcctcccactgtgcgacaccctcccgccctctcggccgcagggcgctgatggacgagaccatgaaggagttgaaggcctacaaatcggaactggaggaacaactgaccccggtggcggaggagacgcgggcacggctgtccaaggagctgcaggcggcgcaggcccggctgggcgcggacatggaggacgtgcgcggccgcctggtgcagtaccgcggcgaggtgcaggccatgctcggccagagcaccgaggagctgcgggtgcgcctcgcctcccacctgcgcaagctgcgtaagcggctcctccgcgatgccgatgacctgcagaagcgcctggcagtgtaccaggccggggcccgcgagggcgccgagcgcggcctcagcgccatccgcgagcgcctggggcccctggtggaacagggccgcgtgcgggccgccactgtgggctccctggccggccagccgctacaggagcgggcccaggcctggggcgagcggctgcgcgcgcggatggaggagatgggcagccggacccgcgaccgcctggacgaggtgaaggagcaggtggcggaggtgcgcgccaagctggaggagcaggcccagcagatacgcctgcaggccgaggccttccaggcccgcctcaagagctggttcgagcccctggtggaagacatgcagcgccagtgggccgggctggtggagaaggtgcaggctgccgtgggcaccagcgccgcccctgtgcccagcgacaatcactgaacgccgaagcctgcagccatgcgaccccacgccaccccgtgcctcctgcctccgcgcagcctgcagcgggagaccctgtccccgccccagccgtcctcctggggtggaccctagtttaataaagattcaccaagtttcacgcatctgctggcctccccctgtgatttcctctaagccccagcctcagtttctctttctgcccacatactggccacacaattctcagccccctcctctccatctgtgtctgtgtgtatctttctctctgcccttttttttttttttagacggagtctggctctgtcacccaggctagagtgcagtggcacgatcttggctcactgcaacctctgcctcttgggttcaagcgattctgctgcctcagtagctgggattacaggctcacaccaccacacccggctaatttttgtatttttagtagagacgagctttcaccatgttggccaggcaggtctcaaactcctgaccaagtgatccacccgccggcctcccaaagtgctgagattacaggcctgagccaccatgcccggcctctgcccctctttcttttttagggggcagggaaaggtctcaccctgtcacccgccatcacagctcactgcagcctccacctcctggactcaagtgataagtgatcctcccgcctcagcctttccagtagctgagactacaggcgcataccactaggattaatttggggggggggtggtgtgtgtggagatggggtctggctttgttggccaggctgatgtggaattcctgggctcaagcgatactcccaccttggcctcctgagtagctgagactactggctagcaccaccacacccagctttttattattatttgtagagacaaggtctcaatatgttgcccaggctagtctcaaacccctgggctcaagagatcctccgccatcggcctcccaaagtgctgggattccaggcatggggctccgagcccggcctgcccaacttaataatacttgttcctcagagttgcaactccaaatgacctgagattggtgcctttattctaagctattttcattttttttctgctgtcattattctcccccttctctcctccagtcttatctgatatctgcctccttcccacccaccctgcaccccatcccacccctctgtctctccctgttctcctcaggagactctggcttcctgttttcctccacttctatcttttatctctccctcctacggtttcttttctttctccccggcctgcttgtttctcccccaacccccttcatctggatttcttcttctgccattcagtttggtttgagctctctgcttctccggttccctctgagctagctgtcccttcacccactgtgaactgggtttccctgcccaaccctcattctctttctttctttctttttttttttttttttttttttttttgagacagagtcttgctctgttgcccagcctggagtgcagtggtgcaatcttggttcactgcaacctccacttcccagattcaagcaattctcctgcctcagcctccagagtagctgggattacaggcgtgtcccaccacacccgactaatttttgtatttttggtagagacaaggcttcggcattgttggccaggcaggtctcgaactcctgacctcaagtaatctgcctgcctcaccctcccaaagtgctgggattacaggcatgagccacctcacccggaccatccctcattctccatcctttcctccagttgtgatgtctacccctcatgtttcccaacaagcctactgggtgctgaatccaggctgggaagagaagggagcggctcttctgtcggagtctgcaccaggcccatgctgagacgagagctggcgctcagagaggggaagcttggatggaagcccaggagccgccggcactctcttctcctcccaccccctcagttctcagagacggggaggagggttcccaccaacgggggacaggctgagacttgagcttgtatctcctgggccagctgcaacatctgcttgtccctctgcccatcttggctcctgcacaccctgaacttggtgctttccctggcactgctctgatcacccacgtggaggcagcacccctcccctggagatgactcaccagggctgagtgaggaggggaagggtcagtgtgctcacaggcagggggcctggtctgctgggcctgctgctgattcaccgtatgtccaggagctggagcagcaccctctcagagcctcagtttccccagatgtcaatgagagaatcagcatcagccacatctcccacctgaagaatcgaaccttgagttctcacctttaagaatttttttttttttttgagacagtgccttgctcagtcgaccacgctggagtgcagtagcacgatcatcaatcactgcagcctccaactcaagcaaccctcctgcctcaacctcctgagtagctggggccacaggcacccaccaccatgcctggctaattctttcttttttgagatggagtctcactctgtcgcccaggctggagtgcagtggcaccatcttggctcaccgcaacctctgccccccgggttcaagcaattctcctgcctcagcctcctgagtagctagaattacaggcgcacaccaccacaccaggctaatttttgtatttttagtagaaacgaggtttcaccacggtggtcaggttggtctcaaactcctgacatcaggtgatccacccgcctcggcctcccaaagcactgggattacaggagtgagccaccatgcctggccatattttaaacttttttgtagagatggggtcttactatgttgcccaggctgatctcaaactcttgggctcaagcagatcctcctgccaaagcttcccaaagtagttggattacaggtgtgagccaccacgccccaccaacctatgaagatgtctaagcagacagggtgccctatctcaccacatccccagtcagatccagaggtgggacaaggatgggaaggaggttccagaacaaaggctggcagggagtcgtatgggacaggagctgacccagcaaccatccacagagacatcctggagcctgggaaggagaaggacaaagagcccccttttttaaattttttttatgtttttgagacggagtctcactctgtcacccaagctggagtgcagtggcacaatcttggctcactgcaacctccacctcatgggttcaaacgactctcctgcctcagcctcctgagtagctgggaccacaggtgcacaccaccatgcctggataatttttgaatttttggtagagacggagtttcaccatgttggccaggcaggtctcgaactcctgacctcaagtgctccgcccaccttggcctcccaaagttctgggaatacaggcgtgagccactgcaaccagccagtagcccccatctttgcccctcgctgagccctactggatgttcttggttatgcgacagtttccccatctattaaagagaaacccctatagcagaggggaggatgaggttggaaaagcaggagcattgttatgctattcttgtggggtctgggaagcagacatctgggtggatgtttggggggtgctgggcttagttggggaagtaggggggcccctggggcttacagggactggaagctctgagctggccagagggatgttgcaatcctgccagggtcttgtctatgctgtccttttcacaaccatccccctactgccaggctgacacgtggttgcgggggcacaaggccagccaacctagagtctgaggctaggcggaggacaccctccccaccagctgccagggtcactggcggtcaaaggcagctggtggggaaggcattggactccagccttgggggacggatgtagtgatggtgggaagcaggcttggtgccaggaggggcgtcagagggtgaataaaagcagatagagtgtttgggggaggtagccagccaaagggggtgaggcccggtggaagggaagaagggacatacacgcagagctttgcagctgagggttttaattttttgagatggggtctctgtcccaccaggctggagtgcagtggcacaatcacagctcactgcagcctcgaactcctgggctcaagcaatcttcctacctcagcctcttgagtagctgggactacaggcatgcgccaccacgctcggctaatttttgaacttttttgtagagatgaggtctccctatattgcccaggctggtctcgaactcccaggctcaagtgatcctccctcttcagcttcccaaagtgctgggattacaggcatgagccaccatgcctggctaatgcaggtgaggtttttgcagtgtcatccagctaaggcgacccgttcccctcccaaaaaagggagactgagaaccatgaagttaagagcccagagaatatcacggtggtctggggtgcttcaagggctggtctggaataaattggaggtggcacgcagggtaggagcgccgggccaactgggagacccagcaacataaaggaaaagttgttggggctgaggaggcttgctgagagaggggaagtgagggaaagaggtgatctagggacacggtgtgaatgagggggggatgagatcacagggttattactgggagacccctgagggaagatggccacagggacaggacaaggctgtcttcttaagggaggagaccacccctcatattgtcttatgcccaatttctgcctccaaagaaagaaaaagtaaaaactaaaaggcagaaatgaaatccacaagcagacagcccgcgccacaccctgggcctggtggttaaagattgacccctgacctaatccgttaggttatctatagattacagacattgtatagaaaagcactgtgaaaatccctattctgttttgttccgatctaattaccggtgcatgcagcccccagtcacgcatcccctgcttgttcaatcgatcacgaccctctcacgtgcacccacttagagttgtgagcccttaaaaggaacagggattgctcactcggggagctcggctcttgagacaggaatcttgcccattccccgaacgaataaaccccttccttaactcagcgtctgaggaattttgtctgcggctcctcctgctacattctgagtggggaaagggactaaggtggtctgaggaccccacagagtcaggaagattgagaggtgagagtgctgaacggggaggggctttggggctaagggaagtgcccgggaccccacctgaccccaacgctcacgggacaggggcagaggagaaaaacgtgggtggacagagggaggcaggcggtcaggggaaggctcaggaggagggagatcaacatcaacctgccccgccccctccccagcctgataaaggtcctgcgggcaggacaggacctcccaaccaagccctccagcaaggattcaggttggtgctgagtgcctgggagggacacccgcctmcactctgcaagaaactcaaaaagggagatgaggggatcgtgggagggaggtagggagggaggagggtgccactgatcccctgaacccctgcctctgcctccagrgtgcccctccggcctcgccatgaggctcttcctgtcrctcccggtcctggtggtggttctgtcgatcgtcttggaaggtaaaagtgggatgggagaattgcggagttrgagatttggaagartgaaggtggctacaggcctggggtcccggcttagaggacctctgagagctccggggccccttctgggtcgtggttgcctcatcgtggtcgggtgggtctccaggttctcccaggctcagtcccgcaggcgccaaatctgcgcaggagagcactagcaaccgatgacgtattgaggcccacacctctgggattggytgtcctgcttcgacagccttgaaagtgggtaagctgggtggggggctctgggagaggtcagtgctgagtaaggcaattcccagcagcttgagccccaccaggtcactccagtattccyccccattctttttttttttttttttttttctcttgagacggagtctcgctctgtcgccgaggctggagtgcagtggcgcgatctcggctcactgcaagctccgcctccctggttcacgccattctcctgcctcagcaggactacaggcgcccgccaccgcgcccggctaattttttgtattttcagtagagacagggtttcaccgtggtctcgatctcctgactttgtgatccgcctgcctcgacctcccaaagtgctgggattacaggcgtgagccacygcgtccggccattcctccccattctaaccacatgatccccaaggatctctatccatcccggtatcccaacctaagggggttccaataacaaatttttggccgggcagggtggctcaygcctgtaatcccagcactttgggaggccgaggcgggcagatcacttgaggtcaggagttcgaaaccagcctggccaacatggtgaaacttcgtctctactaaaaatacaaaaaaattagccaggtgtggaggcacgcgcctgtagkcccagctactcgggaggctgaggcaggagaatcacttgaacccgggaggcggaggttgcagtgagccgagatcataccactgcactccagcctggctgacacagcaagactccgtctcaaaacaaaacaaaacaaaaatagctgggtgtggtggtgcacacctgtaatcccagctacttgggaggctgaggcaggagaactgcttgaacccgggaggtggtggttgcagtaggccgagatcatgccactgcactccagcttgggctacagagcaagactccatctccaaaaaaaaaaaaaaaaaaacaaattttgaacccctgcccatcttcctggcaggcccagccccagcccaggggaccccagacgtctccagtgccttggataagctgaaggagtttggaaacacactggaggacaaggctcgggaactcatcagccgcatcaaacagagtgaactttctgccaagatgcggttagaacccttcccagggcacgggagagctggggtgtgtttttgggtggagccctggcagatggtccaagatgaacagattgaaaaaaaaacaagtcctggagaggctgacaacatccctctggtcacacagctagatctcaaggtgctcagacttcaaggacagtttccctgactcccatccaggccatattttaaaagatggtcttgggctgggcacggtggctcatgcttgcaatcccagcacttagggaggccgaggtgggctgattgcctgaggtcaggagttcgagaccagtctgaccaacatggtgaaaccttgtctctactaaaaatacaaaaaaattaggcaggcatggtggcgtgcacctgtaatcccagctagtcgggaggctgaggcaggggaattgcttgaaccaggaaggtgggagttacagtgagccaacattgtgccagcctgggtgacagaaggagactctgtctcaaaaaaaaaaaaaaaaaaaaaaaaaacaagatggtcttgcccaggtatggtggctcacacctgtaattccagcactatgggaggctgagatgggaggattgcttgagcccaggagttcgagaccagcctgaccaacatggcgagatcctgtctccatttaaaaaaaaaaaaaaaaagatggttttgtgaggtaatgaaaatgaaggccccaagcttggccagacctgggtccccaggctggagtagcaccccttcctgtgtgatcttgacagagggrcattactgtgagcctcagtttcctctcctataaactggtggttctacagggaagtaaaggagcaggcctacagggtgtctggtacatgtagatgctcagtatatcatgaaacccacccttgccccctttggcaagttagagagtcattcgttctttcaaaaatatttactgagcatctgctaagtgctggaaactgtttcaatgtggggaataaaacagtgaagaacgtgccgagcacggtggctcacacctgtaaccccaccactttggaaggccgaggtgggtggatcacttgaggtcaggagtgcgagaaccccgtccctaatagaaatgcaaaaaaaattagctgggcatggtggcccatgcctgtagtcccagctccttgggaggctgaggcgagaggattgcttgagcccaggagatctaggctgcagtgcgccatgtttgtgccactgcattccagcctgggtaacagaatgagaccctgtctcaacaaaaaaagaaaagaaaagagaagaaaagagaaaagaaagacagggagggagggaggaaggaagggagggagggagggaaaatagagccaggcataaacttagaaagatcgtttggaggccaggcacaatggctcacacctgtaatcccagcactttgggaggccaaggcaagcagatcaactgaggtcaggagttcgagaccagcctaacatggagaaaacccctgtctctactaaaaaaaaatacaaaaaaattagccggggcgtggtgcattcctgtagtcctagctactcgggagcctgaggcaggagaatcacttgaacccgggaggcggaggttgcagtgagccgagatcatgccactgcactccagcctgggcgacaaggcgagactccatgccaaaaaagaaaaaaaactcctggcgcggtggctcacgccagtaatcccagcactgtgggaggctgagcaggcggatcacgaggtcaggagttcgagactagcctgctcaacataatgaaaccctctctgtactaaaaatacaaaaattagctgggtgtggtggcaggcacctgtagtcccagctactcgggaggctgaggcaggagaatggcttgaacctgggaggcagaggttgcagtgagccgagacagtgccattgcactccagtccaggtgacagagcgaaactccatctcaaaaaaaaaaggaaggcattggtagcaagagatggcaggccttgaaagccaggccagggtgaagtgtttctttttttttttttttttttttctttttaaatttttttttttgagacggagtctcgctctgtcacccaggctggattgcagtggcctgatctcggctcactgcaagttccgcctcccgggttcatgccattctcctgcctcaccctcccgagtagctgggactacaggcacctgccaccacgccagctaattttttgtattcttagtagaatgtagaatttacttagtagaattttttgtattcttagccagcatggtctcgatctcctgacctggtgatccacccgcctcggcctcccaaagtgctgggattacaggcgtgagccacggcgcccggccttattttttctttttgagatgtacccagactggagtacagtggtgcgatctcggcttactggaacctccacctcccgggttcaggcaattctcctgcctcagcctcatgagtacttggaactacaggtgtgtgacaccacacatggtattttttgtatttttagtgaagatgacatttcaccatgttgcccaggttggtctcgaactcctgacctcaagtgatcagcctacctcggcctcccaaagtgttgggattacaggcgtgagccaaatgcccagccaagggtaaagtgtttagacttcaacgtgctttggtccatctgggaaactgaggcacagaagttggcccacccagcccagcggtcctcctaatcccacagacagtggggatggagattctgcaaggggaagaggtgggagtcaggtagcaggcagaatttggacagcctgggaggtagctgcacacagtgacccccttccttattcctccccacagggagtggttttcagagacatttcagaaagtgaaggagaaactcaagattgactcatgaggacctgaagggtgacatcccaggaggggcctctgaaatttcccacaccccagcgcctgtgctgaggactccckccatgtggccccaggtgccaccaatraaaatcctacagaaaattctctcctgagtgcttctttactctggggaaggggctgcgggagagggtaggggcttccagagagggcagggtctgcaggagagggcaggggctaaaccttaggtactcctcacaagccctccaatgccctatctacttgccctgtgctgaggatgttttaactccatggtctcaaaagagtcttcctaagaaccctgcaaactgggccttattaatcccataagggcattgaggcccagagaggtgaagttacttgtataaggtcacacagccaggaagtagagaactggaactagattgaaccctcagcctagcaatgtcactatgctacacttttcctagtgtggtctacccgagatgaggggctgaggtttttttttgtttttgtttctgttttgaggcagactcactctctcccccaggatggagtacagtggtgcgatctcagctcactgcaacctccacctcccaggttcaagagattatcctgcctcagcctcccaagtagctgggatttacaggtgtgcgccaccacacccagctaatttttgtatttttagtagagacagggtttcatcatgttggccaggctggtctccaactcctgggcttaagcaatcctcctgccttggcctcccaaagtattagaattacaggcgtgagccactgtgcctggctcttatgtaaaattaaaccacatacacatgagaaacaaccctatgtaattaagatttctttctttttttttttttttttaagagatggagtcacccaggctggagtgcagttgcacaatctccattcactgcagccttgcaacctccaccacctgagttcaagggattctcctgcctcagcctcctgagtagctgggattataggcatgtgccaccacgcccagctaatttttttgtatttttagtagagacggaatttccccatgttggccaggctggtctcaaactcctggccttaaatgatccacccgtcctggcctcccaaagtgctgggattacaggtgtgagccaccgcacccagcttaagatttcataagaaaaatatttgtaagccacatatctaataaccggttaatattcaggctgggtgaagtggctcatgcctgtaatcccagcactttgggaagacaaggcgggcggattacctgaagtcaaaagtttgagacctgcctggccaacatggtgaaaccctgtctctactaaaaatacaaaaaaattagccgggtggggtggcacatgcctgtaatcccagctgcttgggaggctgaggcaagagaatcccttgaacccaggagtcgaaggttgcagtgagccaagatggcgccactgccctccagcctgggagacagagtgggactccatctcaaaaaaaaaaaaaattcaaaatgtataatatacaatcctagttgggacatcaaacactgcagccactgtggaaaacagtatggggtttcctcaaaacattaaagatagaactctcaaatgatccttcaatcccacttctgggtatttattcaaaagaattgaaatcaggaccttgaagagatacctgccctcccatgttcactgcaggtctgctcaatacccaagatatggaaacaacctaaatgtttatcaacagatgaatgggtcaaggaaatgtggtctctacatgtaatggaatgtaacgcatccttaaaaaggaaaccctaaggccgggctctgtggctcacacatgtttttttttttaaattttatttatttatttatttatttatttattttttattgatcattcttgggtgtttctcacagagggggatttggcagggtcataggacaatagtggagggaaggtcagcagataaacaagtgaacaaaggtctctggttttcctaggcagaggaccctgaggccttccgcagtgtttgtgtccctgggtacttgagattagggagtggtgacgactcttaacgagcatgctgccttcaagcatctgtttaacaaagcacatcttgcaccacccttaatccatttaaccctgagtggacacagcacatgtttcagagagcacagggttgggggtaagatcacagatcaacaggatcccaaggcagaagaatttttcttagtatagaacaaaatgaaaagtctcccatgtctacttctttctacacagacacggcaaccatccgatttctcaatcttttccccaacttttcccccctttctattccacaaagccgcgattgtcatcctggccggttctcaatgagctgttgggcacacctcccagacagggtggtggccgggcagaggggctcctcacttcccagtaggggcggccgggcagaggcgcccctcacctcccggacggggtggctgccgggcggagaggctcctcacttctcagacagggcggttgccaggcagagggtctcctcacttctcagacggggtggccgggcagagacgctcctcacctcccagacggggtcgcggccgggcagaggcgctcctcacatcccagacggggcggcggggcagaggcgctccccacatctcagacgatgggcggccgggaagaggcgctcctcacttcctagatgggatggcggccggacggagacgctcctcacttcccagactgggcagccaggcagaggggctcctcacatcccagacgatgtggctcacgcatgttatcccagcactttcggaggtcaaggcaggaggatcacttgaggccaggagttggagaccatcttggccaacatggtgaaaccccgtctctactaaaaatacaaaaaattagccaggcgtgcgcctgtaatcccagctactcagtaggctgaggcgtgagaatcgcttgaacccaggaggtggaggctgcagtgagccgagatcatgccactgcactccagccggggcatcagagcaagactcaatctcaaaacataaaaggaaatcctgaaactgggcacagtggcttatgcgtgtaatcccagcactttggaaggctgaggtgggaggatcacttgaggtcaggagttcgagaccagcctgggtaacatggtgagacaccatctctaccaaaaaaagaagaaagagaataaataaatgtataaatattactccctggggttaatgcatccccttctcccccaaatcaaccctccaaactcctatactctcctgtcttctcactcagcagcctgttagaactcaagtcagattttttgttttttgttttttgagacggagtctcactctattgcccagcctgtgcagtggcaccatctcagctcactgcaacctctgcctcccaggttgaaccgattttcctgctcagtctcccaagtagctgggactacaggcgtgtgtgtgccaccacacccagctaatttttgtatttgtagtagagacggggtttcaccatgttgcccaggttggtctcgaactcctgagctctagcaattagccctccttggcctcccaaagtgctggggttacaggcatgagccaccatggccggcctcaagtcagattatgctcttcctctgctcagaactctcctgattctctcagagtaaacccagaagcacttaccaaggcctacaaacgggacactatgccgtccacgatcgcctcctccctgtctctctctccatcactcacaagcaactctttgctattcctccaatgtactgggcaggttcccatctcagggcccttgcagttactgttcctcttgcctggaatgttcttccccaggggtccagatatctgcctggctccctcctcacttcctccagttctcttccaaaatcatcccctgccagacgtggtggcacacgcctgtaatcctaactctttgagatgccaaggtgggaggattgcttcagctcaggagttcaagatcagcctgggcaatagcaagaccccatccgttctaaaaataaaaataaataaaaaataaaaaataaaaattagctgagcatggtagtggacaccttggggttccagccacgtggcaggctgaggtaggaggatggctttgaatcagggaggttgaggctgcagtgagccatgttctgaattagatactggtgatgatcgtgcaaccttcccaatataggaaaaaccactgaacagtacattttcaaagggtaaatttagccggacacggtggctcatgtctgtaatcccagcacttttggagtccgaggcgggcagatcacctgaggctgggagttcaagaccagcctgaccaacatggagaaaccccgtctctactaaaaatacaaaaaattagccaggtatggtggcgcatgcctgtaatcccagctactccagaggttgaggcaggagaattgcttgaacccgggaggcagaggttgtggtgagccgacatcacaccatcgtactccagcctgggcaacaagagcgaaactccgtctcaaaaaaaaaaaaaataattaagaaattagccaggcgtggtggtgggtgcctgtagtctcagctacttgggaggctgaggcatgagaatcgcttaaacccggcgggtggaggctacagtgagcctagattccaccaccgcactccagcctgggcaactgagtgagactccacctcaaaaaaataaataaaagggtaaattttatggaatgtgaatcataattcaatttttcaacatgcgttaggagggacatttcaaactcttttttaccctagactttcctaccatcacccagagtatccagccaggaggggaggggctagagacaccagaagtttagcagggaggagggcgtagggattcggggaatgaagggatgggattcagactagggccaggacccagggatggagagaaagagatgagagtggtttgggggcttggtgacttagagaacagagctgcaggctcagaggcacacaggagtttctgggctcaccctgcccccttccaacccctcagttcccatcctccagcagctgtttgtgtgctgcctctgaagtccacactgaacaaacttcagcctactcatgtccctaaaatgggcaaacattgcaagcagcaaacagcaaacacacagccctccctgcctgctgaccttggagctggggcagaggtcagagacctctctgggcccatgccacctccaacatccactcgaccccttggaatttcggtggagaggagcagaggttgtcctggcgtggtttaggtagtgtgagagggtccgggttcaaaaccacttgctgggtggggagtcgtcagtaagtggctatgccccgaccccgaagcctgtttccccatctgtacaatggaaatgataaagacgcccatctgatagggtttttgtggcaaataaacatttggtttttttgttttgttttgttttgttttttgagatggaggtttgctctgtcgcccaggctggagtgcagtgacacaatctcatctcaccacaaccttcccctgcctcagcctcccaagtagctgggattacaagcatgtgccaccacacctggctaattttctatttttagtagagacgggtttctccatgttggtcagcctcagcctcccaagtaactgggattacaggcctgtgccaccacacccggctaattttttctatttttgacagggacggggtttcaccatgttggtcaggctggtctagaactcctgacctcaaatgatccacccacctaggcctcccaaagtgcacagattacaggcgtgggccaccgcacctggccaaatttttaatttttttctagagatagggtcttactgtgttgcccaggctggtgtcaaactcctgggctcaagcagatcctcctgcctcagcttcccaaagtggtgggattataggtgtgagccactgcgcccagtcagtagccccctctttgcccctcactgagccctactggatgttcttggttgtgtgacagtttccccatctattaaacagaaacccctatagcagaggg

SEQ ID NO: 5757 - DNA, 20678 bp, Homo sapiens
tatctgcaccccagcaaggagggttaggtcatcaaagctgggaagtgttcttgcaggggagctgccttgtgcccactgggagatggcaagccctgaatgcctcagaccaacttgaatggctctgggacccagcagcggggatgatagattggcataaagatgcatggacaattgaccacatggtgctgaaaccttcgggcaacaccttgataccaggatcccatggcaggtagggaaagctctcagtgctcaggtcctggtgctgggcatgaaaacacacacatgccaccctgagccctacacatgttgcctggattcttggattagagccactgtctctctcctctgatgatgtctctccagcagcctttcttctctgtgtgcaggtggggtctatccagcattgcttcatctctgggtctttgcaagggtgcggggacctaggacatgctagacatttcttccttctggagggttcctggtgacttccctgccagagaatcacctagggcaaaaataataaccataatcattagaactgttattcagtaaatgtgagattgtattcataccactaatcgtggaaccacagacttaccacctactatgccaagcgctttactgagtcatctcatttaatcctcatgcctctgtggatgtgacaccatttacatgtaaggaaactgaagcccagagaggaacggtgtttgcccaggggcacgtggctagtaagtggcacattttgactagtggttgaaactacagaagataggggctattattcccatcttgtgctaagtcagtggagcttggggatgcccactgagatgcggcaaggcaaaggcagcagtcctggccttgggagactgggctgagacccagcgcttcctcctgctcctggacagtctccctggttgcaaaccctcatcccaagggttcctgggtgtggacctaaatacacctagcactggagggttctcaaccagtgcttgtgaggtcttcctttccagttgtagtctatactcctcaggaatcttcagaattccccagtcagcttcccaaaggaaattaaattttcccggaaaagcaggcttatctattcaaattaaatgacttcttttcaaacaactgtgatgtcattgttctcatttttctgaagaattagatcttgacaagttaggctaaatagatcatttttatttctatcaaattatattgtctaaatatggctaaattgttacgacaacttactggaatcactgaggatgctgttaatgtcaaatggaacctgaaatcatccacaccagctgtgtgagcataatttagagacttgtatttcatgctcagagctgtccctggagatcaaatgtgtgaacccgatcctgctgaaaactctgtttccctccatgatttatctctttccaaaggctggtgagtagcctttgcttatcacggccagtgtcaagaggtgagcacaagttaacctcaaaaacaacattcagcccagccaagttttctataaatatggtacatgattaattatgtcagaagactatttactaaatgtggaaaaatcaataacactctaagaagaatgtttacccagcctaggatccaaacaaacactctaaagccagggaagtttttgaaaaatacaagctccgtgtctccagcaaacataagggaggttttactccttttcatttttgccttggcagggatgggccctgggggtgtgggctctgtctctgctcattgcaatcagattgacatgactgttgtccactgatgtcggccacgtgtcagcccctgcaggaagcacttaccactaggacctcttttaatttaatcccactgacaggacagcggcatcatgactcttatcctccctgttttgtaaactaagaaaccaaggccccaagaagtgaaagtgttggtcccaatcccaaagccagcaactggctgaggccccagttccagttgcgggagtagagtcagggtggtctcaggccaccgtgtcctggtgtgataggaattcactgttcctgccaggtgcttttctgagcttcttttaggtatgcactctcttagccctcacaaagccctgtgagagtcggagacagctgagggtgtggagtcacagatagctgtaccatataacagtggacagagtggctcagacgtgaccttagtcacacagctgtaagtcacagagtgggattgtaacccagtgcagacaggttccagcctttctctctctctttttttttttttttgagacagggcctggctccatcttccaggctggagtgcagtggcttgatcactacaacctctgccttcctggttcaagcaatcctcctcccacctcagtcctccgagtagctaggactacaggcacacaccaccacactccactcatcttttctctttttttttaagtagagatgaggtctcgaactcctgggctcaagtgatccactcactttggcctcccaaattgttgggattataggcaagagccactgcccccagcctctatccctctcaatgcaggacagatggtcaatcgatgagcctcccccaagggcagacgggtgtcctcgagtggggttgcctgcagcaatcctggcatctttgtgcccagggtgaaccttgtagcacccctcacctctgtacaacacaatgactttcagaaatcatcatgtcataatcaatattagtgattttcctagttttttaagttttaaagcaaacgattaataaaggacaaatttcaattttacaaaaatgttattcaaattctgttaagcgcctcatgtatgaactaaaatctgtactgacaaacaaaaatatcaggtctcacagttttcactctgtttctgttttaaactttgaacacaaaatccctaagtggtcccatagaatgacaggtcacagtgactccagttctgtttcatttcctccaccatttctgtgccactgttgctcattgtgagtctaccatataccatgttatgccaggaaatacgcagtgtgctttgtttccctttttaatttaatttttagttacaaaaaaaaaaaaaaaggaaaaagacaggccggatgcctgaatgatccacaaaccaattagtctgctcccaaataactgagattaaactcgccccatatttgagatcagaacattccattccagcatcgtgcaaagtaaatttttaaggcaatttaaaaagaaagctcagagtactcataaagactgcagaatacacacaaatggtgaggagccttttgctcagggtacatgccatgctgttaggctcgccatggttctagaacacctaacgtggcttccgtccaaagatctgccgagaaaaactttttccatctccttctgctgattcctgctgtttaagtatcggtccttggagaggtctggtataatctgctctctaaataaaatgggatgaaacaccatccatggggaatttagtatgtgaggtgcagaattccctcaaagtttgcattcagactatcttaaattctttgtaaaactccaccaaatccctcccaggaaaagcaagctcttcatcctcccctgaggtcgaagcaccatgccctcagcctctacgaatcccctgaacagcctctaaggagcgtcccctataggtgggagcggacacagaagggcggggctggagctagagaacctagctgtaagtgtcccaggtgaattaacccacctgagcccagcagggatcagccaaagggtgaagggacacagtggaagtcagatgtgggggacaaggaataggaaactaccctgtgtcttggcagtcagcgggtcaatttgggatgaaattgggtgtgtgcagtttagacagaggtttgcttacatgtgcagtatgtcgagggctcagcaatggtctcagtgtccactctcttcccaacttgctttctccctaattccagaggggagagttaagcatgatttcacttttattaatgttagagcaagaaagtttccagaggccctgttcccacctctgcatttatagatgagaagtggggctgagttaaccaagttactgaaaataataaagtaaaatccaaggacccccagggcaaggcagtttctgcattttacatagtctttctcactgttggtgctttacaaatacttccaaggttaatggataaaaaacagagtatatgtcttgctagttcattttcttctttaagatgtcatcacttggctaagtgaacagtaattggtttgaaagttcccacatggaagatgaataacttacagctaaagaagatatcttgacaaagatctgggggtcagagtggctaacatgctgaaagtcactcatttagcccatatccttaagcaccaactaagtagaatgctgagcgaatgctgcagatcacaatctacctctgaggaatctacctccgagctgcacaaacaggggcctagaccacgagaacggctccctgctatgagtggatgctagggctgcagaattgattttacagaatgttaagaagttacctgcttgtaaataaacccttagaaatgaagcttctcccaagcagagaacaagactgacccttgccaaactcaaatgcatggccagctatattgactgggagccagggacaccagccttccctggacccctcacagctggctgcttacccagctctggtggcacacttagcgtcccgaggaggcaggtcacaaggacagggggtctgggagaccctgagccccaagaggcaatcccctgtgttctcagaaccaggtacctccagcggacacagccttccaggaccccagctcccggcaggagccatgcagtccttctgcgtgcccggtgcccttccccccacctccacccagccccgagaacatctgacctggactccacagcctggaaacctgcggccacctgctgagggcccccccacccactgcttgggtccactgaccagtccccttccacatgtaggcctcatgccagccctcagtgtttccccgtggatttcaagacgaagcctcaagccttcattactggggttcacagggctccatcttcccctgcatcctccctcccactgcctgggctttggtctccctgcccttcactcactctctgtccccagggcttctgtacatgctgttcccccatcccgacaccattccacatctgagctgcttctcctttagattccggcttgactgcctgtcttctccagaggagtctctcctaattgcccatcccccagtcaggatgccacccctgtatcaaccacgacctccccgctcccctgtgctgcctgcaataaagccatcagtgccgtgacttgttcaaagttgtccactctaacaggactccaggatcacagaggcagggatcccctcctggaatccagtgcctcactcagtgcatagcagggtcttaatcaacaaatgttagatgggtggatggacaaacagatggatgaatgaaggggcacagggagggtctggtggcttctatggagagttcccaaaatgtctcaaatatctttgctaaaatgcaaggacttaaggcacattcttaggaggtatccagctggagtcagagatgcctccttgtcccttggggagccagcgagctcctagcccccgggacaactcaacatctccatggaggccactgtggtggtcgctggtgccgggtccacaggcgttcactgtgttctccaccgtggcgcttcttcccctggggccctcacggtcagtgcagagcaccaaagagttgccgctgtgtagagaattcttataattgtgcattgcatccattttgaatctaatttggaccctctcctaccagaagcagggtttattgctcttgacacggtgtctagggctccaccccctcccagttcctcaatgcggccaacccagatatctgccttgtacacccacctcctggtgaccatttccctgtgggacaggcagatacagcccatttgatggtctcagtgactccacaccccacagggacttcccagacatgcygccatgcccacctctcagccacagggaccccacggagcccgtgtctgtttgctctaaacccaccagtgagaagtccccttgggaaacctgcttgggaaacgtcctggaccccaataaaggcttaggacccaggtctctctctctcccttcacccccctccaggtgagtgtttgtgacccagacagctccccactttttgctggccccgtggggtgcactgccctctccctgggatctgtaagtgacacggtgcttgtgttgyttcctgtgtcttcttgtgctgcctcctgcatctcccctgacccacaccccaacccaactctcctcccatcagggatctcttaggaagtggctgtcttgataggaataaactggacatgggtcagacgagagccacaagggtgtctgtccatagaaacaagttttatgtgagagagacccctggtcactgggcagggmtagaatttatagtcagtctctcaaagtgagagatacagcctgctaccaatgacaggggacttggagagcagtggagcctctccctcagctgagatggtgctgaggtgtggtcccctcaggcccccagagtttcctggcactggctccagcagcccagggtcaccttctcagcaagtcatcatgggttggcttcctccttgtctgtttcacttcccctcccacataaactagtctccccaaatcctgtctcagggtcccctcctgggggatcccaaccaatgagcaaaggtctgtggctgcaggaaaagcacactgtgagtccctggcttttgccgagtcgcggtgtcgcrggagggcctgcccgggcttcgattcccgctccctgcccagatttccggcccttgctaggaatcctgagccgggggaagtgagcctgcaagccctgcgccacgaggccggacacattttcattttctttctgatgctttttgtgaccctgacacctcacaatgcaatatttccactatgaaacccccagaactgccaaatttcacccaatttggattaacattatcgaggagcttggcattatgttgaaaacccagacattcccacgacccgtatcctatttaaaaaatgcctgtctatttaaggttcacgatgggaggataaaagaaaaaaggctcccaaagtcaacagagaacatgagctaggcaaaaggaaagtccagtttgcttctaaaaaaggctgaaaattataaccatccatggccttgtgtcttaagtctcagaattttttttttctcttttggtggtttgcaaaccaaagtggaattttattatgggttactaagggagcttcctcgagttcctagcccccaaagcccctgctcactccatggcatgcctccgaggctcctcatgccatgagaaagagaatggagccaaaatcaagccggcagtatctcggggctgtaacgtcttccccccgtcgctgtttccacagtgctgagccagggacccggcagagctgcctgactccttttatgaacaacagcaccgtgatgaaggcagcaggagtcagagaactattcattgcaggaagccccaacatccggtgagaaataagaagtacaacagtacaggatgcgccttgggtcaggggracgtggaaagccctcagcctttgtgtccttctctgcgccggagtggctgcagctcacccctcagctccccttggggcccagctgggagccgagatagaagctcctgtcgccgctgggcttctcgcctcccrcagagggccacacagagaccgggatggccacctccatgggcctgctgctgctgctgctgctgctcctgacccagcccggggcggggacgggagctgacacggaggcggtggtctgcgtggggaccgcctgctacacggcccactcgggcaagctgagcgctgccgaggcccagaaccactgcaaccagaacgggggcaacctggccactgtgaagagcaaggaggaggcccagcacgtccagcgagtactggcccagctcctgaggcgggaggcagccctgacggcgaggatgagcaagttctggattgggctccagcgagagaagggcaagtgcctggaccctagtctgccgctgaagggcttcagctgggtgggcrggggggaggacacgccttactctaactggcacaaggagctccggaactcgtgcatctccaagcgctgtgtgtctctgctgctggacctgtcccagccgctccttcccagccgcctccccaagtggtctgagggcccstgtgggagcccaggctcccccggaagtaacattgagggcttcgtgtgcaagttcagcttcaaaggcatgtgccggcctctggccctggggggcccaggtcaggtgacctacaccacccccttccagaccaccagttcctccttggaggctgtgccctttgcctctgcggccaatgtagcctgtggggaaggtgacaaggacgagactcagagtcattatttcctgtgcaaggagaaggcccccgatgtgttcgactggggcagctcgggccccctctgtgtcagccccaagtatggctgcaacttcaacaatgggggctgccaccaggactgctttgaagggggggatggctccttcctctgcggctgccgaccaggattccggctgctggatgacctggtgacctgtgcctctcgaaacccttgcagctccagcccatgtcgtgggggggccacgtgygtcctgggaccccatgggaaaaactacacgtgccgctgcccccaagggtaccagctggactcgagtcagctggactgtgtggacgtggatgaatgccaggactccccctgtgcccaggagtgtgtcaacacccctgggggcttccgctgcgaatgctgggttggctatgagccgggcggtcctggagagggggcctgtcaggatgtggatgagtgtgctctgggtcgctcgccttgcgcccagggctgcaccaacacagatggctcatttcactgctcctgtgaggagggctacgtcctggccggggaggacgggactcagtgccaggacgtggatgagtgtgtgggcccggggggccccctctgcgacagcttgtgcttcaacacacaagggtccttccactgtggctgcctgccaggctgggtgctggccccaaatggggtctcttgcaccatggggcctgtgtctctgggaccaccatctgggccccccgatgaggaggacaaaggagagaaagaagggagcaccgtgccccgygctgcaacagccagtcccacaaggggccccgagggcacccccaaggctacacccaccacaagtagaccttcgctgtcatctgacgcccccatcacatctgccccactcaagatgctggcccccagtgggtccycaggcgtctggagggagcccagcatccatcacgccacagctgcctctggcccccaggagcctgcaggtggggactcctccgtggccrcacaaaacaacratggcactgacgggcaaaagctgcttttattctacatcctaggcaccgtggtggccatcctactcctgctggccctggctctggggctactggtctatcgcaagcggagagcgaagagggaggagaagaaggagaagaagccccagaatgcggcagacagttactcctgggttccagagcgagctgagagcagggccatggagaaccagtacaggtaaagggggccctgagtgaccgggggaggggatgggcaggcatgggggcactgactacagtacaaagaggtggcagcaagagcargcccaggtttcctgtgggcagacacaccctggtccttgcagctgacccctcaacctccccccacgccaggcactcgggcccccttagagcatactgcccatctgcagcacggccgcacgtggggctctctcccaaggtggggacgtgcaggcacagaggcgccatggcttccaacgctgtctgttttgtttcccatagtccgacacctgggacagactgctgaaagtgaggkggccctagagacactagagwcaccagccaccatcctcagagctttgaactccccattccaaaggggcacccacatttttttgaaagactggactggaatcttagcaaacaattgtaagtctcctccttaaaggccccttggaacatgcaggtattttctacgggtgtttgatgttcctgaagtggaagctgtgtgttggcgtgccacggtggggatttcgtgactctataatgattgttactccccctcccttttcaaattccaatgtgaccaattccggatcagggtgtgaggaggcyggggctaaggggctcccctgaatatcttctctgctcacttccaccatctaagaggaaaaggtgagttgctcatgctgattaggattgaaatgatttgtttctcttcctaggatgaaaactaaatcaattaattattcaattaggtaagaagatctggttttttggtcaaagggaacatgttcggactggaaacatttctttacatttgcattcctccatttcgccagcacaagtcttgctaaatgtgatactgttgacatcctccagaatggccagaagtgcaattaacctcttaggtggcaaggaggcaggaagtgcctctttagttcttacatttctaatagccttgggtttatttgcaaaggaagcttgaaaaatatgagaaaagttgcttgaagtgcattacaggtgtttgtgaagtcacataatctacggggctagggcgagagaggccagggatttgttcacagatacttgaattaattcatccaaatgtactgaggttaccacacacttgactacggatgtgatcaacactaacaaggaaacaaattcaaggacaacctgtctttgagccagggcaggcctcagacaccctgcctgtggccccgcctccacttcatcctgcccggaatgccagtgctccgagctcagacagaggaagccctgcagaaagttccatcaggctgtttcctaaaggatgtgtgaacgggagatgatgcactgtgttttgaaagttgtcattttaaagcattttagcacagttcatagtccacagttgatgcagcatcctgagattttaaatcctgaagtgtgggtggcgcacacaccaagtagggagctagtcaggcagtttgcttaaggaacttttgttctctgtctcttttccttaaaattgggggtaaggagggaaggaagagggaaagagatgactaactaaaatcatttttacagcaaaaactgctcaaagccatttaaattatatcctcattttaaaagttacatttgcaaatatttctccctatgataatgtagtcgatagtgtgcactctttctctctctctctctctctcacacacacacacacacacacacacacasagacacggcaccattctgcctggggcactggaacacattcctgggggtcaccgatggtcagagtcactagaagttacctgagtatctctgggaggcctcatgtctcctgtgggctttttaccaccactgtgcaggagaacagacagaggaaatgtgtctccctccaaggccccaaagcctcagagaargggtgtttctggttttgccttagcaatgcatcggtctctgaggtgacactctggagyggttgaagggccacaaggtgcagggttaatactsttgccagttttgaaatatagatgctatggttcagattgtttttaatagaaaactaaaggggcaggggaagtgaaaggaaagatggaggttttgtgcggctcgatggggcatttggaacttctttttaaagtcatctcatggtctccagttttcagttggaactctggtgtttaacacttaagggagacaaaggctgtgtccatttggcaaaacttccttggccacgagactctaggtgatgtgtgaagctgggcagtctgtggtgtggagagcagccatctgtctggccattcagaggattctaaagacatggctggatgcgctgctgaccaacatcagcacttaaataaatgcaaatgcaacatttctccctctgggccttgaaaatccttgcccttatcatttggggtgaaggagacatttctgtccttggcttcccacagccccaacgcagtctgtgtatgattcctgggatccaacgagccctcctattttcacagtgttctgattgctctcacagcccaggcccatcgtctgttctctgaatgcagccctgttctcaacaacagggaggtcatggaacccctctgtggaacccacaaggggagaaatgggtgataaagaatccagttcctcaaaaccttccctggcaggctgggtccctctcctgctgggtggtgctttctcttgcacaccactcccaccacggggggagagccagcaacccaaccagacagctcaggttgtgcmtctgatggaaaccactgggctcaaacacgtgctttattctcctgtttatttttgctgttactttgaagcatggaaattcttgtttgggggatcttggggctacagtagtgggtaaacaaatgcccaccggccaagaggccattaacaaatcgtccttgtcctgaggggccccagcttgctcgggcgtggcacagtggggaatccaagggtcacagtatggggagaggtgcaccctgccacctgctaacttctcgctagacacagtgtttctgcccaggtgacctgttcagcagcagaacaagccagggccatggggacgggggaagttttcacttggagatggacaccaagacaatgaagatttgttgtccaaataggtcaataattctgggagactcttggaaaaaactgaatatattcaggaccaactctctccctcccctcatcccacatctcaaagcagacaatgtaaagagagaacatctcacacacccagctcgccatgcctactcattcctgaatttcaggtgccatcactgctctttctttcttctttgtcatttgagaaaggatgcaggaggacaattcccacagataatctgaggaatgcagaaaaaccagggcaggacagttatcgacaatgcattagaacttggtgagcatcctctgtagagggactccacccctgctcaacagcttggcttccaggcaagaccaaccacatctggtctctgccttcggtggcccacacacctaagcgtcatcgtcattgccatagcatcatgatgcaacacatctacgtgtagcactacgacgttatgtttgggtaatgtggggatgaactgcatgaggctctgattaaggatgtggggaagtgggctgcggtcactgtcggccttgcaaggccacctggaggcctgtctgttagccagtggtggaggagcaaggcttcaggaagggccagccacatgccatcttccctgcgatcaggcaaaaaagtggaattaaaaagtcaaacctttatatgcatgtgttatgtccattttgcaggatgaactgagtttaaaagaatttttttttctcttcaagttgctttgtcttttccatcctcatcacaagcccttgtttgagtgtcttatccctgagcaatctttcgatggatggagatgatcattaggtacttttgtttcaacctttattcctgtaaatatttctgtgaaaactaggagaacagagatgagatttgacaaaaaaaaattgaattaaaaataacacagtctttttaaaactaacataggaaagcctttcctattatttctcttcttagcttctccattgtctaaatcaggaaaacaggaaaacacagctttctagcagctgcaaaatggtttaatgccccctacatatttccrtcaccttgaacaatagctttagcttgggaatctgagatatgatcccagaaaacatctgtctctacttcggctgcaaaacccatggtttaaatctatatggtttgtgcattttctcaactaaaaatagagatgataatccgaattctccatatattcactaatcaaagacactattttcatactagattcctgagacaaatactcactgaagggcttgtttaaaaataaattgtgttttggtctgttcttgtagataatgcccttctattttaggtagaagctctggaatccctttattgtgctgttgctcttatctgcaaggtggcaagcagttcttttcagcagattttgcccactattcctctgagctgaagttctttgcatagatttggcttaagcttgaattagatccctgcaaaggcttgctctgtgatgtcagatgtaattgtaaatgtcagtaatcacttcatgaaygctaaatgagaatgtaagtatttttaaatgtgtgtatttcaaatttgtttgactaattctggaattacaagatttytatgcaggatttaccttcatcctgtgcatgtttcccaaactgtgaggagggaaggctcagagatcgagcttctcctytgagttctaacaaaatggtgctttgagggtcagcctttaggaaggtgcagctttgttgtcctttgagctttctgttatgtgcctatcctaataaactcttaaacmcattgattgtgaacttgttttaatatatttcacgacaactcgaaatacctggcagaacttgctttcaaggtcattacatttatccatctcccctttcaaagagttgctaaaaagaaggtaccttgtggctgagtttctgcacctgcacctgctggaggcgacagggggcgctgggctctgccttccttcattacctcagcaaatgtgtaccctgcccctcagcgtgctgcccttggggacatggaatacagagggctgggctgcactgcgcccagtgtccatggcagctgagtccactcatccatggccccctcatcactctttaattctctgcatcttgtaaattacatgggtgatgcctggcgcagaattaaacatgtccaatggatgcgatgtgaaaacactgttctataattatcattggagcatttatcactactttgtcagcaaagccctttcagtttatttaactaattggacaggcagatcagatcgctggttgtttggctgcacaaatctcatggtgattccaagtcaggaacagcagatggtggtcaattctgagtcagcctgcttttaagattgtgcaaaaggctgtggcaaaggcacaggacttaagaagaacaaagggttctgctctgttatgctaatggtacaggacacttgcaataaatatccattatttagggttaaatgcagctgatcctgttagaagtctattcattaacaacatacacttggaagttattcctcgatatgaacaaccatggctgttcccccaacacacacacccacacacataaacacacacatgcatgacacagagatatgcatccacaaacacacacaacacacacccacaagacacacacccacaagcacacacagttctaacatccttctgtgtcgtactggaacacctgaggccagtgtttctcaatttaggaaaagcctatgaaagaaaacaccaacttgtgatggttacattttttggtgacttttgctatctcactaaaatttcttaaatgctaggtaaatcattcgcaaacaaataatttgccaagaaaaattaatttgcacacatatctattgcacaatgcagagtacatttgtgttgctatcatcagacaaaatgcagattacaatgagagactcagacatgtactatgtaccttctgtgggattgaacatgcattgagtgagcctatcaagttctcagctgactcttgtgtatattcagcaagaggagatacagagagcagagatgataaacttgaaaaccagagaagtcggagtcagcctttccctgaattatatttgacattacaggtgcttagaaacagaatgactaatgggtttacccttcagatcctctgaatgcctcctaactctcccttttcagaggaaattatgaacagctcaacagtgaaaaagtgaagaaagaggcagagagagtaaaaggtatagatcaagtgcaatcatttttccggaactgtgattgacttaagggtgctcagcatgcagctcaggcacaggccctctcctgagtccccaggagaaccaccaccaaactctccatgagcggttgtccctctctgagttctggtagttgggttctatttgaggtttgtcgtgattaacttggatgatgatgttctcttgtggttaaaattggttcatagaattcaactgagtggaagaaaggatggaagggaggaaaagaggaagggaggaagggagggagagggaggaagggagggagagggaggagggagggagagggagggagggagggaggaaagaagggaatgaatgggaaggaatgaatggtagggagggaatgaataaatgggaaagagaaggaaggagagatgagggagagaagagagagagagaacacaaaagggggtagaggaatgtcccaggtgtggtggtcacaatcaggtctcacaaagctgggcttggagcctgagaaggaagggctgagtttctcagggcgtgccggtgcgaatttcaggccacttcgttctgctggccttggtgaggcccagcaccctcctgtcaccttcctgcaaagcctgcttgcctctgccactggccttacgcctgtccacatagttcatattgtaaggtctgaagccaagcctgtgacctgtctctgtggggctcctactgtgttcaagtatcatgaaataatgaaatttgtgaggtggaagaaaataattgggacgtctaccttctttctccagggtctggctttcccaaaaacgttatatcacaaatgttttacttcattgttgaaatcgctgcctcctgtcccgcgtgtgtttgtcggggtgtcacgcccttgtctgctttccttctcatccgtcctgcaagtcctcatgccctggcctccatccaggccctcatcccccatggctgtggcttcgtcagcttctcctcggatttccaccagttttgtcttctatttacagccgcgtggtgaagggactaatatgtgtttggcagatttcgtccttcaccaataaaaaatatacctttttgaaccttttcacttcaaattatattatatatgactttacaactgatatacccgattcattctgctgcatctgatgaatatctggtattttttccctaaattcagctttctggtgacacttcatgtttgtctcttgtaaacaacaaagctggatttcactttttttttcttttattcaatcaaaagtctttgtcttttaatgggagaattcaatctattcacattcattaaggttactaataaatttgtactgacttattttatatgttccatttataatgattcattgggatttctagcctctctctcgtcaattattagattgattaagttttctttgatctactttttcccttaatattttggaattgatatagactatttgtattcttcaaatagtcttactttttcacctcacatactaaagcctatatcttctattaatgtcttgtgttaattaatagctatctcctccctctattccccaaaatacccagcaatctgttatttctatttcctgtcctctcaggttacccagattcccacaccactgcccacctggattgcatctgaattttatttttttattgttatacatttttacaaccaaaacctacttggatgccatgagtttttgttgattttttctcatcttcacctctgattcccagtactgttggattcagttatcacgggagtgttttgttttgagttgtgtctttttctgagaaggtcatgcttgcatgaccagaaatgcctttcccttccgcaagttgaatgatgcctcacctagacatagatttctaggctctaaactgttgtcctgtagaactctggagatatccagcctttgctttcttgcatacgttgttactgatgagaaggctgatgtcaaataatgtgttttctttcatggaccatttctttcttttttcctttttttttttttttttttttgagatagagtctcgctctgtcacccaggctggagtgcagtggtgtgatctcggctcactgcaacctccgtctcccgggttgaagcgattctcctgcctcagccctcctgagtagctgggattacaggcacacgccaccatgcccgactaatttttttttgtatttttagtagagacggggtttcaccacattggtcaggctggtctcgaactcctgacctcatgatccacccacctcggcctcccaaagtgctgggattcgcccggccttctttttcttttccatttttccccgagtgctttggcaattttcttattctctgttgagttctgaggtttcgcttcaggttgcaggtgtggttcctttctggtcccgcctgcactaggtgagctcttcccagcacaggagggcatttccttctagctgtatttgaacctgagcatgtgtctgaatcctctggaacctcctgcagggctccttaaaacggaacccctccctcagagcttctgacttggccgatctggggtggagcccaagactgcatttctgctgatgctgctggtccaggaaccgcccttggagaaccgctgcttcatttggtcttgagtgatcttctcttattcttgttagtataccttcttgttcattgtcttgactctcttattttggaaacaattttagatggttctttccttcctcactttgtacctatcttctcccagtgggctataaggctgggccttctctccagcactcccagcgatccttgctctgctctactgtttttccaaaacaccaatcaccttccaccctggtttatgatttctgtttgtacactatgattgattatttagtatctgtatttatttactagaatgtaagagccaacaggggcacttttttgtcttttggtttctgatataccctaggcctctagaccagggcctggcatactgtggtgctcagtaaacacatgtggaatgcatgactgagctgggggttggagcagtgtaccaggtagggtgggctagcacaccctcctggtgggcctgtgtgagcctcgatgctgtccagggcctcttcctccaccatctgccacctgtcccctgtctccagctcatggcacggcctgcactcaagtcttcactattgctgctctgaattgtggccgccatatccagctggtctggggctctttgcactccagctcccagaaacagagcctgagagaaggactcaccatcctgtggttcactgggaagcacagggaacagtggtaatggcatcaagtggtgacatcactgtagaaatcctgggaaatggtgcaaaacatgccagggtcatcacatctgaaagccaagggagtggtgtgtagatacccattggtaatgagtagagggctgccctgggtggagttggcgggtaattcccagcacttccagatgaccacacatgtgggcaaagtggccttccacacttaggatggggaaaccttcaggtacagatgcaggccctggcaggtgtacttcacctgagcacagtgaaaagtgcaagcacgatttgttgagcactggcagcctccagcacacagctgtcctctaaactcagtgcagacagtcctccctgcctctagaggtcatgcctccatttccccaggaggagctgtatccatggggatggatttctctctcaggagttttctgctggcttttatcactttattccttgcatgataggtcagtggctacatgacttgtgtcttcctgagagactgtaaggcactcaagagcaacgggtacatctgtattgtgccttgctcacagtcaagcctcaaaagattttttaaatacaagaccccggatatgttattttataccacatatgttattaaagcaatgaagaggaaaaaaatcactgaccttttactatgtaccaaatgggaaaatagtatttgctattgagaaataggtagtattaatatctccattttatagttaaggaaattgaggcagagagaagatgagtggtgaattagatgaatgaaatcttacactctcactcttaatcactaggcttccctgcctcccattagacatgaataggaactgcaattgaaaaagtgtcaaccagcaaagagtggggagatgagtgggcctctcagccagtttcagataggaaaagcagagtgttaagcaatatgggtatttttaataatatgttcaaacaaacttacttgggcttgtgtatgtaccccccaaacacacacacacacacacacacacacacgcacacacacactggggtagaactactcaaaagccctctgatcagaaagattgtgcatcctgagacctgccttgcctgctctgagggcagatcccagggaacgcaccctcacagtccccccacgtggctatccccagtctgccttggtgagagcaatgtgtttgaatgcagtaggagaggaagggaagtgggaatgtgcaaatcgccccatggtccc

SEQ ID NO: 5758 - DNA, 68209 bp, Homo sapiens
tgagtttagtgctagagtcagaaaaatagttctcaagaccccgacagacatcagaatcctgtagtgatgcattatttaataaaaagtgctaaggcccctacatagacctaaggaatcaggatctctgagaatggggaagtacccttggtgattttgaggttcatcacagttgcagggcaactaggttagaggaagcagaatctgaggttagcaggttactacatttacatgtgagaatataagagttttatagactaatggcatctgtgttcagcacttgcaaatcagaatttgacttctcatgaagaaataatgacccttccaaaaataagcttgaagataagagaaatgacctttggtagaggaaatgggtaatgtaagggctatagagtcctaaaatacagccccagagcccttacaagcccagaggggccacgtgggtcatacaagaataaagcaacctgggataagggactacagagagagggaggggcttgggaccagctctgcctgtggccactacctgtgggcagtataggcccagggtttttttgtattatttttattcgacaaataaaaaaattgtatatatttatggtatataacatgatgtcttgaattatgtacatattttggaagataattatgtacatattttggaagataattagctaaatcgagctaattacattgggcattccttcacatacttatcattttcttttgtgtgtgtgtggcgagaacacttaaaatctactcttagtaattttcaagtatacaatacattgttattagctatagacatcaagttgtacactagatctcttgaacttattcctcctaactgaaattttgtatcctttgaccaatatctccctaaatcccccaactttgcccccaactagcctctggtaaccactattctactctctgcttttatggattcaaaacttttagattccacatataaacgagatcatgcagtatttgtctttctgtgagtataggcccaatttttaaaatcaagcctgaaaccttacagacattcacatgaaaaaaaacaacaacaaccagttaattaggaccaatgatctctgtgagaatggctaaaaaccaaagctaaatcctcagcaaaaaaacaagagtcttcacccgcatactctgacttcctctcgctctctttttcaagatatctgccctcacaaataaaaagtattcacatttctcatatcttatatttttatagcctcacaaaacacagaggtgaatagaaacacaatgctgcctgacttcattgaaggacaggctatcattaatgaatccaatgtcaaattgtcaaatttactctaattttgccagtttatcccagtccatgccttaacacaacctatagtaagcttgctcactttgctgggctgagtacatctgctgattgaatttgtagtcagatttgctaattcacaaggctggccttgctctaaaggtatgattttttgtttctttgttttctttgtagacggagtctcactctgtcgcccagcctggagtgcagtggcatgatcttggctcactgcaacttccacctcccaggttccagtgattctcctgccgcgacctcccgagtagctgagataacaggcacgccaccacacccagctaatttgtgtattttcagtagagttgggtttttgccatgttggccaggctggtctcaaactcctaatctcaagtgatccatgatccacccaccttggcctcctgaagtgctgggtgacaggtgtgagtcacctgcccagcctaaaggtataatcttatactaaattcactatcatttctacttagtgggactcaggctagttgtcctatataactatgattgccatttctaaatgtctaaagatggggtgactgggctgtacaacagtttatttcaaatcaagaaagcagttgtgatcaaagggaagaaccacctcatttccttccggggaaggtgaagttaccaatcttacaaaagtcaatttctctctgatttgggctttactactcacactgtcacttcaaagacagtaaaggtaggcaagtggactgaagatttgttcctgcttgagactgaattgaagatatttaattggtgttagaagtagaactatataaaaagctaaagactttttttaaagcaaggattttccagaaaataaagaggatttattaaatgttatttttccacttttatgaatatatatatacatacatagcaaaaagaaaactacacactaaggctattgtagtgttgtaccttataaggaagtacaaggtacaacatataaaattatgttgctttttatcgttttaaattattttattatttttcatcacaagtcctaaaattttaatatgtaagttctatgagtaattttttagtaacaagaaaaagtcatatatatatatgtatcccagtacatttaagaaatgctttttttcaatagtaaattataaaaataagtaataaattaaaaaataaataataaaaattatagtaatcccagctcatttaataaatgctctctctataatgtatccaataaaaaatatgagataaaaattatgtggaaatagaaaaaggtttgtgtaacatgcaaaggaacaaaaaacagactatatatagctcaaattaaacatgcaattatgtatatgtgtagacaaggctaagaatttataagtaaaatcaaaattctttacattagtgtggtgagataaagtataaatgtagtttttaaatatttgctttttgtttcacatcatgtggtcattttttctatatttacctatttaaaaataagaaagggatgggttcactgtcctaaatttggtttcaagttgctttttatcaatttcaagttttaaattgtgttattttatttttcatcataagtaaatagtctttagtacctattacaaaacatgtgctcatcaagggacttttggggcccaagataatttgccaaaagcaattaacttcctaggggctttcaagtggggggatttccttacttaggtttcagaccatctcttaagaaacagttattctctcaaactggcagtttactctggtaatctggcacccctaaagcaatgtagtagccttcaaagagattcctttgaaacactgacacttctcctatgtgtcagtataagagtattcagaaggaaattacttgtccagtgtctcaaagagcttactcagagacaacgtccaaattccagaacttctttgcctctaatttgctgctaagggtggtaactgtatttcaggcatgaacattagaggatttttcatcagtctaactatagctggtagtgggggtgctgccatttatcaatttaatttttgcttgcaaacctggccatcatttacaaatttgtgtttttccatcctggttgctaatgtcttaattcatattttatcattttattgtatttgtaagacttctcaagtcctttgtgatgtaaatatggcccattaaaaatgaaaataaacagcccaatatgttcgttaggttggcttaagaaaaattattaaattacaaattaagctacaaaaataaataaatattccattttatgctctttgggttggtttaagaaaaatgattaaattacaaattaaataactgttctttattttccccacaaaactattctgtatgactgcttgtaaatacacagctttattttccaaaggccctctccctttcctttgaccataagataaccattctacaaaatgtaaaggagagcaaactggctgtccagtgattgcctggccaatgtcctaaataatgcaagacaaaacctgttggggcccaataaaataaaaatccatggactcttagaggcttcggaattcaaatgagcctcatggatccacatcccttcaattagcaagctgggatttctgagcgagggactttccaaaacaggctgctcaagtttcttggccaataacagggtcatgcacaataaaaaaaaaaaatgcaacccacagctatttctcaaattaatttgtaaagtaagtttgactctttttctgtctcctttagaaatttgtcaactttttgggatttcaaacttttttattgtaagtgtcggagtaaaaacactcagaaataggaaagagaaaactaacaccaggaaggttgagagaaggaaagagaaagagaagcaaaaggggttaaggatggggatacttgttgactatagttatcaccagagtcagaggactaggggaagaggggaaaagcagaaaacagctccccacccatctatgtccagcccattaatagaattaaaatttgcttctgtattccaagtaattagcactttgcatctattttatttattgctactactaagaaaacataaccgtgaaggcataaaagcaaacattttctgtagacacatgaggtgacacaagagtgttgaaacttctttaaggataaaggcctgatgttaggcatgtcgtgagcgcaaaaccaatttctgtgtaactaaatttaaaagagtcatattagaggggagaaatggaagataaactgcaaaacgtaaacaatgattacttaggtgatagagttatgtctgatctttgtatttgactcatctgcatttataaattttatttaataagccttaatttcctaggccatatatcatatacaaatataagttatacctaacttataggtattataatatgtatatatacataaatgtatgaatatttacatatgcgtgtgtgtgtgtattctttcagaaaagcaaagttttcttcgggctttaaacacgcagcctctggtaaaggtgctattggtacaaaagttcaacaagcatagctccaagctttgacaattttcttacactttactaatactgctgtccaaaaactatgagattttcaaagcagccaacatagcagtggtgcaatggttaataacaagagagagaagagtgtggcctgaggttgtataaatgttttctcaatcttgaatcattaattttctccaaggaagtttctaaagaatcccaaatagtgcacactatttctgaaaggaacaggatttttttttctaatcataaaatggacccagacatctcagcctcttggtgtaatctggatatcagatgcaatcagcgaacagcctgagttttggaattagatctgagttcaatcccatatctcccatttactagctgtgtgatcttggctgaattactgaagctctctgaacctcatttcgccatctgtaaaatggggatgtggttatcttccccactacatggctctcgtgagaatccgcggagatcacatttgtaaacacttctctcgctatgcctggcactttgttggggcccaataaaataaaaatccatggactctcagaggctccggtactcaaatgagcctcctggatccacgtctctttgattagccatctgcaagctggcatttctgagcgagggacttttcaaaacaggctgctcaagtttcttggccaataataggcgccgggttctgtgcggtgggaacgagtaccaccaaccccagcaggagaccaagcagaaatcaccatgggagtgcaagctaagaaagggcaaaagaagaaagagaagggcagaaaaacaaaacaaaatgaaaccactcaggcagcgacttacagtcttaaagagagaattcccggaagggagacaaggcagtttccttttctgtgtgacaataaaaaacggtaaacaagcctccagaagctcattcagcccccatataactttttcgagaaagaaaaggtgccgttcttccgagccctccggcttaaccactgcttcggtgctgacttatttcctacgtctgagaactgccagaaaatgagcaatatctgttctgaaggctgcaggctctctccccgcccccgcggggcggcgcgcactcacccacccgcgccggagcggacctttggcttggcttgtcagggcttgtccaggagttccgctcctctctccaaccggggtccccctccagcgaccctaaagcttcccagacttccgcttcaattcctgtccgccccccacgcccacctcaacgtggagcgcagtggtctccgaggagcgccggagctgccccgcctgcccagcgggatcagcacttcgcatcaaggcccaagaaaagcaagtcctccagcgttctgagcacccgggcctgagggaaggtcctaacagcccccgggagccagtctccaacgcctcccgcagcagcccgccgctcccaggtgcccgcgtgcgccgctgccgccgcaatcccgcacgcgtcccgcgcccgccccactttgcctatccccgggactaagacggggtaagcctccacccgggcaggagagggctcaccagaggtaggagggtccagatgcccagcatggttgttgagcaatcctccgaagtgaaagagctyccccaactccgtactgagcgggtccaccaacccgcgggagaagaggcagctccgcctgggyagccagggctggcctcagggtgtgttccgtgccagtgcccgcccctgaggctccagccaagtcactcgtaaaccgcttccctcactccccagaagcgtctttgaacacctgtgtgtcactcttgcgcgagatcagagacgagctcacgaaaagccccggtggtcaggaggatgggaaggaagcctcgctggggaacgcccgggttggggagggctccattgattcagcaacttggcctgcgcgcgggtagggagggggagaagtcagggtgaggaaggagtcagggttcgttgcacaaatgggcattcctgtcccggggcgttcctgcagtggctggcatgctcacttcaggtgaggacctcgagagccggcctcctgccctttctaaaggcttctgctgtagttcaacctgggaagttggggaggtcttgaaggagaatggagctcagagcgcagaggtcctgcctgggtacaggagccttggctaattgctggagtcactcagagaaagacttgcggggcatttgactgggctgtccatgttgtggctgcaacatgagaggctcacagacgttyctggaatggacagttaaccrtatgaaaaagtacagatgttgcgccatagggctctgaaaagggagggccccttagtttttatttctcaagaggaaaacaaagctaacaacttaagccaaatcgcatagccccagctatattaaacattcacaattacttcctgtccttcgttactcattatttcctggccaattttctttaaaaaaaaatcttgtaattctttcgtgctctggtgaacactgttcaaagtcactattgctttggaacggtagatagctcttaggtagtttagcatgaattttacagaaggtatgtttggataatgacatcattactgaacctgaatttggatgcagttccagactggacacactaaaggtttcagtattcctttggcatcgtccaccaagctctgcacctcactctgcaacctctctcccttcccaattagattcaacccattaataacacattaataaccctttgcttagcccactgttcatccttcaggcttcctctcagttgacattttcttctggagcctgtttgggccctcaaatctaggttaggttaccctcctgagggctttccatcaccctgtgttttgcatctgtcactgcacttaccaccagtcttgtaggtgttgataggcttgtctctgttccacctttcagtagactgttagtgccatgaggaagaccctgggygtgccagccttgtgcacacactctgagcatctaatagacacaaaaagaagtgggataaggaggatggtatatgggcattctctgtattatctctgcaaattttttgaaatcctaaaactattccaaaatgaaaagttcatttaaataaaaaaatgtaaaaagaaggaaggaaaaggggtgtgagggaaggaaaggagaggtaagggaagaaggaatggaaggagggaagagagaaaaaaaggggaaaggacaattgacaaaatcagtatctcttgagtgtgaattataagccagcaactcacatatgtggatcttccttacttaatacttatcattatagcccagtgagatgagtgattattaaacttactttacaaataaaaaaatgtagccaaaaaagcttaagcaacattggcaaagatggttagttaataaatagcagagtcaggaattaaacttagatattcttgctcccaaggtcctgctctttctatgccatacccccttcccctaccctctrcccacgtacgtctaattatcctcaagttcaaggagataggaatatgtgctttgtggggagacatatgtttcatggtcaaataatcttagaaaattctgggttactttaayttgaaaactttctkaatccaaaacttctcagrgcccttagtatgctaatgtcaaagggttgggtaattatatatactgttccccaaacttctttgcctttggaatcctttgaagaatctattgaatgaacacctaatgaatgctggtgttctggggaaaacagtttgggcatctctaaaggttatttttattttaccagcatattcctgagagtcctcaggccttcaagggcaaagaaataaaattttaataatagaatttcaggcactccaacagatgttggagatrttttggacaaccatccttattcaaaccataccatataagttaaagcttctactcaaaagatatcctggtttctgaacattctgaataacacttaaacaagaatcttgactatgtaaaaaaacaggaagagtwaagatwaaaaamamaaaaaaaaaaaaaaacttctacatctttttaccactaaracttttgttcttttcccctttggtcctaatgtttaaaaaatgttgtcaaccaaattgtttttactaaattgcaataagttgattttaataactcccagctatagtgtatatccatgactgtttatcctgcctttctccttcttcttccttctggtaatagtacttccaagttgtctttaraaaaactgtccctctcccctcttcttaactatttgatgtgagtggttcttttagtcagggttctctagagaaatagaaccaagagaatgaataaatggaaagatagataggagttggctcacrtgattgtagaggctggcaagtccaaaactttagcattggccaacaggctggagacccatgaaaaagttatagttcaagtccaaaggccgtctgctggcataattctcactcactcagtggaagtcagtctttttttttttcttttttaaggccttcaactaactggataaggcctattgacattatagaaagcaaatgttttactcaaagtgtaaagatttaaatgttaatcccatccaaaacattgctttacagaaacatctaagatagtgtttgactaaatagccaagtgccatggcctagctaatttgatacataaaattaaccatcacagtggcattggtaccaatcccagggcttgggtatatgtgtaggtggagggaggtagtgggtgggaaatgtgacttggcttaagccaatcagcacatcacattcagttggagtagattttgggatctttactggaaacactgggacacaaaccctttctttttcattggatttgaagtagaaatatgtgagatgtgaaactgatgtggttggttgtgaagggagcttgtggccctgccagagctgaaaacagtcaactcatgctgagaggaaaccacactgagaggaaaccatgctgaaagatcaaggttggtagagctatccaagttctggatgcatttggttctkaaattgaaccctggaccacccaaagttacccaactctacaaattyttagtttctgcttaagctagattcttacaactgaaaaaatcttaactgataaattatcagaactttgatcagtataataattcttttgttacaaaagttaattgttacaaattagctattctagtttcaagctcaagtaaagataattgcttaaacaattctgtagactgctatctagggatattacttcttctaccaaagaatttttctgtcactagagggcgtcagagcccacagtggccaagtgacaaagtctattaataattatttctaccaattaatagaaatatgtatgggttcttgggaaaggaagagagaggacggagatcttagatttggataggtaatctgtgaatctaatcatatagacattgtcacctcctggagaacatattatttcctacaggattaaagaaatgacatatgcaaakcacctagtacacacaataaatactaatttttamttttacattgcttttcctaaatgaagtgacttcacaagacaaattgataatttgggggtcacagttcagatgaaaaaaagtaagttaaatggcttacaaccacttttcctgtactacttccttcctycactacttccttcctatacttcttccttcctgcactacttccttcctgtaccacttccttcctgtaccacttccttcctgcactacttccttcctgcactacttccttcctgtattacttcctttctgtactacttcctttctgtactacttccatgctcacattcctgaagsctaagaaaagtgtcctaaagcctaactgaccagggctggaaaacttggccaccaagatatgcagcaaattattaagtctcctaatttttcccactatgaaaactggtatactaacctacctcttgagcartgactgaaaaagacaatgcattaaagaatgtttagactgtggcaactaaaaagcagacagcaattgggttagtagggtgaaaacatctgttctgtgggccctggcttcttaatccaattgagtacccctcccctgacatttttgcatatggtggtcccctgaaaacacagatattctatgaaaacaaacatgagaagcatgcctaccccctgggtgttaagaactgacacaaggaaagatagggaccacttttcaagagatgttgatttgggggcagataaaatttcatcctgagtgggcttagcttaaggcaatgtttcttcaacttcaatctattttgccatttctgtagtctacttgtatatactaaatatatatttaactaataatttatttttaagtcaacttattttgttccctaagtcattttgtttttaaaataaaacattacattataaccataaatggaaaatcagcattccttgccaaaaatagaaggtatccataaaaataaatatgccactattgaaacaaaatatttgcctgcatgccaataaaaattgtttcccaaactactagtggcaagggcattatacttctggaaaggttggcttaaggcatggcagcgctttctctctactttagacttcctccctgcccccaaacaacctccagagaaaagactagctagtgtgggcctcaggccctcctcatgggcctggaagggaggtgactggaaggaacaagagacatcagaacagcatgagggaggggcagtcattgtctcccaagcccatctagtgccagggagtgggatgggggtgggggactctttaccagggcaccagcctttccctgttagaaaaggctgaggggacagcttgagggagataatggatgggcagggaggactacagggagtcctgcagagatagaaagagaatgtggaatgggatgttggaggagaatgggcaggggaggagccccagagcacttgggtagaaaggagacataggtggttttctgcagaaggcaatcttagtcgactaatacaatagtggtattaacatctagttcaactgagaaaggacaatggggagaaagagttttgatttggataatctgtgcatatgagcatatagacattttcctctccctgagaacacccccaaattagcaacttgtcctatgaaggacagagtccctagatataaatcctagttcagttacttcactagatgtgagaagctgtgcataatatttaacccctctcagcatcagttttctcacctggtaaacataagtctttccaacagtaatgatatgcccagatagattctgggagataaacttggattttgttattttatttattttattattttgttgtagcaatttgccaatggccccctaaagaccatcaccaacgccttttataggtggcagttgatataggccctgcctatattaccaactaaatgtcattttatttacctatactgctttcctcctcactaggctagagagcataagcactgcctgcagcctaacatcttggcttctccatgaagaataccatattttttaaactttccagaaaataactgaaaaggaatcatcagatcaggctctcccctcccatggtctcccattattgcctctgatcaggtctgaaggtgagaagatgtctctctctctttctctcactctagctcttgctctccctttcactctgtctcttcctatatgacttggccatttagacaggcccagtggtttcatgaataactaaacataagaagtcaagagaggcctggctcagagagcatggaccacatcagccttttgaagttcccttagtgtattaaagcaaaacaaaaatcaacacaatattgaaccagtttkcaaacactgggatatcttatgttttcatatagcaaatagatgcatttaatacttagaacttaaatgcagaatcacatttggtgctagtgtcatttgccacttgacatatgacactagtgtgctactatcatttaaggcccttcatgactgtggggtgtaatccattcctactcactcttaatagattctgacctatacaggcagaaaggtagtrtgggagagacctctgggaccataagatcaacacctcccactttagactcttctctacaacagccctaggagactacaccagccttagcttgactccttccagcactggctcctactatttctcaaggcaatttattacatatcagaacactttgcagttgttagaaattctcccgatgttataacttcctatagtttaacaagtgtttgctcaacatccactatacaaagaacactacttataaacagaactagaatagctctgtgaaaaaggaatgatagtaaccctcccctcacctgaggtaggaagaggcattttaccatctgaaacctccccacaaactctacacaaacctgcatgcatctaaagagttttttgtccaggcaacaaggataactaggcagcctaagtctctgatcacagtaaactgagggagaaattgaggcctttatcagcctttgcactgaggaaagacactaagcaggcattcctccacctggctttgaaatccccttggaatttccaagtcattcaatgggtttatcaaagttctttctgaaatttcttcaaacttatttttatttaaaccacacaaatatgttgaaaggaatggtttaaagggacagacatttaaaaataaacaaaaataagatatcagtaatatctaatgcttatawaatgtccagaacatttgtgtgtgtgtgtgtgtgtgtgttttttttttttttttttttttttttttgcataacctgttaacttatctaaaccttacaactccctgtaaagtaggtcctgttaccatcctattttatagaaaagaaacttggaaagacttgcccaaagtcacacagttactaggtaacagaagtgaacttccaaagcctatgctgaatccatttcctctttagttacctcagtggccttatcatcaagatgtaaactccctaagtaagtacaaagccttcttgttttgttgttctgttgaacacatggtttccggttgattaaaaccatactcttgtcatattattttcttaaattccgggtcatattgactaagatcataatacagtgagataagggaactctttcttgcactgggtaagtctgctaagtaagaatttttrctgtttatgttcactcctctaagaatcatagctcacatagccatgcaaattggattgaaataaagataatctaattaagacagtgtggccataactccacactctaactcagtgcatttcaaacctcaatatggatataaactacctgtcaatattattaagattaagattctgattcggtaggtctaagtatgaggttatgaatttctcaccagctcccatgtgatgttgatgccacgttctggaaaggacacatgaagtagcaagagtctttgctcagggaaaccactcatcagttcggttgtttacctcaaacagataaggaccaattaaccccacttttaccactttggccagttatattattattacagcatttctttagtggtagtagatgggaaatgtagggaaatcaacaaattcagtaatctcattataaacatatttgtatccagtctccatttagcttcatattacactgcttaggctgaatttttacttagcagaaacaagtcttacttgactacataaatacattttcctatcaagaaaaagaaaaaaaaacttagttcattttcaaagacactgagcttttatttctgtgaacagcaagaaaactggctagaagcctgctgactccctcagccaatcaggataatgtgaccataaatgtccatgaattcccccctcagtgaatctctgccttttttatttctgtcgtgggacatgtatcttacagttctgtaccacatattctgccatttatgtcttcctttcctcatttcaaaaaaaaaaagaaaaaaacacatttaagctcggtgagatctcttaccaaataatccattgtcttttatgttaaaagctgttaacttcatacacatgcaacttttaattgcttcttaatgataatacctcttcatttagatcacttagtatgagccaggtaccatttagtgggttttataaatatgatctcattcaatgctcataaaaatcttgggaggtaggtcttcttattgtgtgcacaatataggtgaaacaaacatgggcccaagcacttgaggatcttgcagtagtcacccaaccagtaagctgtagagctggggtttgaaccaaagcaattgcttctcgcatataacaacatactgccttcttgaactaacacataccagttaatcaagcactcactatgtgttagacccttttatatatactaacttatttaattctcatacccacacctacagggaaagaataactttcctgattcacatagaggtaactcgatcaagttcatgtgtcaagtaaaggtatcaagatttgcttgactctaaagcctgggctctttgcacagtatcatgataatgcctgtctttttagtgaatgggacggtttgcctcattgctgtttttcatggaaagcccatctgaaacctttacatacccacgagcacagactgaaacacgtagtatctgggactgggactaaattactttgcccaatcttttatctaccgtttcccccatccagcctctctctccctccctacagtgttcccttcccaggatatgatgcgtctcccactctgcccaccccactgcttgtggyactgttaacaaagcagctgttggattgaattgggaaatgtccctgttttgaccttggttcttcctctgtcctaggatcatacctcttcaatttgccttcctttccacggatactagtctagacctcacccaaaatgaaatttactatcaacttttcctggtgtgaatatagttaaaaagtataaatcacgacgatggaagataaagcaatggccagttctttaaaaaaaaaaaagtcatttctctcttaacccgatggttaataagtggctaatatttatcaagggtttaactgcacaggaaaagtgctttatgcacacaatgtctcatttgatcctcacctaatcttaacatctaatattatcctcattttacagattaagaaacataggttaggtgagtttaactaatttgcacacagctagtatgtggcagagctcgagttaggacacaggtctggaggctccacactgaacaccctgtggactggccccgctctctcttggatattgctgggcctgccctttgcttgtgctgacttcctcgcagttggcctccccatgccctgttcctactctgtcattcaaacatcccctctggaaggaccctattcctccatagtccaaatcccacttttcatataaggcaaaccaaagcctcctctgactcactttatccctttgtgacctttccaaatttagaactttctcagcacttttgaggagggagtgaaactgatttggcatttggagtctgggaaaattatctctctctttttaaatttacatatcagataaatccagattcatttggaattgagctatctcattctttcttatcattgccttgtaactgtacttgactttatatggcttgagtctcattcctaatcagaatgcaacttgctccagaggggggacattttggccactttctttgaatggaggctttgagcttaagtctaagatcccaacaattttccttaactaaacgaatacttacgagtacctactttgtaccatggactgtgttaggcctcagggaatagcagtaggcaggataagaacattccttgccttcctggactctacagattactggggatgacaaattagagtaattataagcatcaggcctggcctctctttgcctgtgaaatgcgtctctcttttggctcaccagacaccacagttctggctcttatttatccctggctgttgcttccctgtcacctccactgtggttatgttcagcgtcctgatgcttgctaatgtgctctcctcagtcctcaggtcccctagcttcaaagaaggcctgaagtgtcaaccatcacctcttcccagatgctcttcaaatctatacctcatgccctgacttcttagttgtacatttaaagtgcattatgtttaattcctgctcatgttccactcaccaccttgaattcttatcgtgcctaaaactgaactatttcatttctgtccagaccagaagggtgggaaaagtagaagtggtgaacaaaacttaaaaattaataaatgaaataaaatttcaagtggaaagaagtccactttatctttcggctcagctggccatcttctgaaactacagactttgcaaattagcgttgcctttttctgcatctgtcaagctccataaatagcttggaagctctttgaacgtaagaactatatcttctattattccattttgccaggatctaccccaaagcctttgtaggtgctttacacatgtgtgaggaggtgtgtggtgaggacacaggcactagaaatgacctttgctgttgctctctggatcctcctggcatttgattagagagtcaggactaaacaaatggctagcaaattatacagtcaagcacatgtaaccttttctgatcgaattgagtttagattttgtcctgatttttgataggaggatcaaaaccatggcatttatgctgttctcgccccatctctcaggttatgtagacttgttaaaaaaaaaaagkcatcattaacaattaaaagagagggagagtgagagagaacagccctagtgtgagactctcacattctctttccccatacttcattagggttattgctgcctacacttattactgtttaaaatcatcccaagatgagtagcctacattttaagggttcctgacaattatttggccagactctcatctgtcctgaatgctggcatcttctccttgtgaacgtctctctttgaagtcagcaggaatctggtctgtggtgagccacaagtcttcccttcctaggagccaaggctggcaaggcaccctgcggcagagccgggaaactcgctgacctcatttttttttttctgcttttttgtctcagtactcactttcttcccttccttatctctcctccccagatccctacgctcatacacaacatcataacccattaaaaccagcttagtagaagctaaagaatctataattttaattgtacttaatttttatccattttgttttcagtgtttcaggcagtggacagtgtttttaaacataaaaaggttttctgagctttcagttttctgatttataaaacaaatattaacagaataaactttatatgcttattaggaggatgaaaggaggtaattcatagaaaagatgctatgcagtgccagaaacagtaaattcttgatgaatattagttcctattaataataataatataataataataatagagaagagatcaaattcaaggacagaaagaataaggaaggttgcttctaatagcttcaggtgtcatagaaggctttttggagaaattaccattagacgtggaacaatttagcatgaatttgtagaagagaggattcattttaataaactccccctctcagggtgacccagacacctagacatcttcagttccctgaagtagggtgagctggagccgtggtgcaaatgaactgagcctggctcatgactagacccatctctcagcatgagcctgactggttgtcacttctttccattgagattggctttcaatagaacagaatcttttctctctcttaccactttccaacaggtcagagcaggggtgatgaaaggctgagcagagtacaacaaatgtattcacagttatgttttctcaacttcacccacttatgtgaaaaggacagtcaagagcttatcttaaattttatttatttatttatttattttttattatactttaagttttagggtacatgtgcacattatgcaggttagttacatatgtatacatgtgccatgctggtgcgctgcacccactaactcgtcatctagcattaggtatatctcccgatgctatccctcccccctccccccaccccacaacagtccccagagtgtgatattccccttccagtgtccatgtgatctcattgttcaattcccacctatgagtgagaatatgcggtgtttggttttttgttcttgcgatagtttactgagaatgatgatttccaatttcatccatgtccctacaaaggacatgaactcatcattttttatggctgcatagtattccatggtgtatatgtgccacattttcttaatccagtctatcattgttggacatttgggttggttccaagtctttgctattgtgaataatgctgcaataaacatacgtgtgcatgtgtctttatagcagcatgatttatagtcctttgggtatatacccagtaatgggatggctgggtcaaatggtatttccagttctagatccctgaggaatcgccacactgacttccacaatggttgaactagtttacagtcccaccaacagtgtaaaagtgttcctatttctccacatcctctccagcacctgttgtttcctgactttttaatgattgccattctaactggtgtgagatggtatctcattgtggttttcatttgcatttctctgatggccagtgatgatgagcattttttcatgtgttttttggctgcataaatgtcttcttttgagaagtgtctgttcatgtcctttgcccactttttgatggggctgtttgtttttttcttgtaaatttgtttgagttcattgtagattctggatattagccctttgtcagatgagtaggttgaacgccgcatatctacaactatctgatctttgacaaacctgagaaaaacaagcaatggggaaaggattccctatttaataaatggtgctgggaaaactggctagccatatgtagaaagctgaaactggatcccttccttacaccttatacaaaaatcaattcaagatggattaaagacttaaatgttagacctaaaaccataaaaaccctagaagaaaacctaggcattaccattcaggacataggcatgggcaaggacttcatgtctaaaacaccaaaagcaatggcaacaaaagccaaaattgacaaatgggatctaattaaactamagagcttctgcacagcaaaagaaactaccatcagagtgaacaggcaacctacaaaatgggagaaaattatcttaaattttttaacaattcagtccacacaagcattaattcattagatgtcaaaatagcagaaaataagcttctcctttgggatatgtaggcatacattttgctgctaatctaaaggaatctggggaatgtgggcaaaaattaccttcaccagatataaggatctcaagcacaatgcaacttctctacaaacatcagcattggtttgagcctctaagaagctctaataatatttaatgaaagaattattttattcaattttcaaacttcaactctacccagcacctggacctttacatttggttttatttagtaaaaatactttcaagaaattctgttcaacactttatttctatcatagcttcttaattatgaatacaattttgttaatttaaaattataatcatctgtctcaatagttggtgtgtattttaaaataacacaatatcattgaattgctgctgattatgttcagggtacattagagatatgttagtcattttcaatttagtggaaaggaagtgggtttttgctatagaactacaaaattttagggtcaaaacacttgaattagttcagtacaatggaaggactattcaaatgtaattaatgtactaattttctccattttccgtgatcctcataatgaaccaatatattttccttggcctatcaatccttttgttagagactaaatagtttccccttgtttactctggcatttgtgataatatcaatatattaattatatgttatctattataccaaccttgtccaacccacggcccgtgggccacatgcagcccaggatggctttgaatgcagcccaacacgaattcgtaaactttcttaaaacattatgagatttttggcgattttttttttagctcatcagctatagttagtgttagtgtattttatgtgtggcccaagacaattcttagtcttccaatgtggcccagggaagctaaaagattggacacccctgtattacacattatattatcactataaytaattgataatagtaatgtatggttgggtcctaatcgggatgggacataagattcagtggctgggtcatttgaccttgcctcaaacttgaaagagacatcagattttggtgacaattaatttgtcagccaaatgaagaggaaagaaatttggcttctattaatctcactgcatagtattatggtataacacaatgggagtagtactgtatactgatagtgcactaaaaactccccgaatctaagcatagaggacagattcaatggaggtgagcctcaaaagctcaagtcaccaagtcacctcctgctctgtcaagtatctcctggtttgtggcctttctttaattctcgaatatttattaagaggccaatatgtgccaggcactgttttatgacctggaggcgcagcattgaccaacattgaaaaaaaaaaatcctactctcatggaacttacgatccagtggaaaagtagtcagggccccattttcctaagcccagagcccacacatttatttgctgatagttccctttgctctccatgccccttcctgtaccatctctactgttccacctgattctttacgtattggagaactgggaaagcaggaatgacaggaaaattgttattatgtctagtctgtaataagaaaaaaacaaacactttcaggtactttcagtttttaaaaagtatgacagtactattgtccttctcaactaatttttctgcatggagctaatacctcattcaaatgcacacgctgctctgtacacggtttcttccgcctctgatttatctccttccttttgtataaatttagcaatcttttcctcacaaaccttaaaatagccaagcattcaaagatttggaaaatgtagaggcagtatcattgtttgctcttgcttgagagtttttttttttttaatcrttgacagcattctggtttcactttcacttcagtgggtaatttaatgtgatactaatacaacctgtaataacagttaaatgcatggagcacgaactacatgctagaaattacagtaaacaatttgcatcatctaactgaatttccaaaataaacttattattttcctcactttaaatatgccttttgagaggtgaagtaaatggcccagagtcacaagccagcaagtggctgatctgtacagtattacagtgatctagcatttaggatttagagcgctatatagtactatagtgatctcagctcatctaactgcagggccacgttccacatattttttggccccacaatattagagcattaatcaggatcccaaaaatgcttcctaattagagtgaaagagatttattttatcaaacaaagtcttaagtgaactatgccaaagtcaatgatctggtggaattcacagaaatgtttgtattacttaataaccattaactagccaggcatggtggctcatgcctataatctcagcactttgggaagctgagatgggaggacagcttgaggccaggagttcaagatcagcctggacaatatagtgagaccttgttactattaaaataaataaataaataactgatctcactggctacaagaggaattcattttttaaaagaccaccaacatttaataaattgcattctctagcaattgcttttttcatatttttcaactaattgggtaggaatttagtttcaatatcacttttaatacataaagtaccaatttgaagtgcaaaatctttagacatctattttggggaaaatgtcaagaacatttttctatttggcattggttcaccaaattgagtccttgagagcctgatttttttttttttcaccaaagagtcaagccaaatgaaattccacccacgttagtcagggtatatttctgggtcctctcaatgtctggtttagttctagttttaaaatttaaraaraatttaaagctctggagacatgtatttatgtaaatacacaaaacagaggcagggcacagtggctcatgtctgtaatcccagcactttgagaggtccaggcgggtagatcatcagaggtcaggaattcgagaccaccctggccaacagggtaaaaccccatctctactaaaaatacaaaaattagctgggcgtggtggtgcacgcctgtagtcctcgctactcgggaggctgaggcatgagaatcgcttgaacctgggaggtggaggttgcagtgagctgagactgtgccactgcactccagcctgggcgacagagygagactctgtctcataacaaaaacacacaagacatagaggtaaatatttatgtatgcaaatatatatacctgttaatatttggcctggcaaaaacagtttgctagatgatttttttggaaaaggctttggttcagtagcagaaatgaatatgggtgttattcaaatgtctgtaaattaatgagggccctttgaggttagttcagcttaagcattttgaatctgmagaatgaatggtctatgttaaagatgcttttggggaatgggaagtggtgacaaacacaacattgcatcccaaacagagccaaggtgacagggtacctggcctcacatccatgagtacttgagaaactgataatcaagatgaaatgacgtgtttttctttagaaaggaaaggcagagataatggctaacaagaaagagttgttttcatcgggaactctatgaaagattttcacaattgttcgcctggcaattcttggattacctaatcaccttctccattccacttcttgtctctctcagagctgttcagatggtgatgatgacctagagatccccaagagtgggaatccatttggtccatagccaattttcaggggctccatctccaaagcagtgccagaaattatcccagaaaggaatttctgaatctataggtcacacagaagaaagggaaggtgagaggattgggaggcaaggcccaggaaaaattaaaatagaaaaataaaacatagaagttaaaattattttttgaaagactaagtacttacaaggttagcttttaaaataaaacaactacaaactctaaatggtttcaattttgctttagtattctgcagtgtttcttttcaatagattggccctcacatataaacacatacacatacacaaacacaatctttatatttgccatctaaaacacctagtatcctacaaaattacctgtaagagtctcagttaagtagacactggaaaaacaatcagaaacagattaaaagataaatggggtctcactttgatagcacatatagttaactagaaacaacgcagagaaaaagtaaaaatcataccattgtatgaggcttataatatacattataatgggatgaacaagggtaaaatcgatttatacatttgtaaggttacagtaatttccatgaagtagatggtgagtatttaaggatgtatattgtaatccctagagcaactttgtaaaaataatgccaaaagatatagttaaaaagctaatagataaattacaatgaaatttagaaaaaaaattaaacaatataaaagaaggcaggagagaagaaagagaacaacaaaaaaggcaaaaaataaaaatagatcaaagaacagtaaatctaaatcgaactgtatcaaatattacattaaatattaacagactaaaaataaaaggagatcaatttttttcctaaactccctgttctcaaaactccttttgtgacatcaattactattacaaataacagttaccaatcccttaatttcctgctgcctgaagacaagacaatagctgaatttacactcctctccccttaatcgttagcaattgaggaccttgtttcatttcattttaaatggccagttaataagtagtccctggctgggcgtggtggctcatgcctgtaatctcagcactttgggaggctgaggcgggtggatcacaaggtcaagagattgagaccatcctggccaacatggtgaaaccctgtctctactaaaaatacaaaaattaactgggcgtggtggtgtgagcctgtagtcccagctccttaggagactgaagcaggagaatagcatgaactggggaggcagaagttgcagtgagctgagatcacgcctctgcactccagcctggcgacagagcaagactccatctaaaaaaaaaaaaaaaagtagtccccttggacagcagccttctagcgcttcagaaactataaatttggcttaaataaactgttaggcaaactgtagatctgctcaccatcagagcatcaccctctgaacaccaattcttggctgctttctagggagaaaatatgcaggaaggacaaaaagagggatattgcacaaattgctaaagccattacatgctaggactcctgtttgtattatagtcttacacgtgtcctattagttacaaaaagatagcaacaaaaaagagcagcaaaagaactcttaaagtggttggcattatgacttttattataagaaaaaaaggcaaatccaaatcatctaaaaaaggaaggagttagtcaaatgacaaaatctggatctaaacctgtatcagatgggatttgaggaaatatgtctgccactcattcttagcttattctgtttacccaaacactcagatcctaacttgaatttaaatgggccgtgttgccaaagactgcaacagaatcagatggctccatgccattggcaccctttacaaaacacaaaacatactgcatgaagttttctcattttgtgtttgtgtttgtccttagctgtacttattttatcaagttaactctttgaggatgaaaaacagatacatcatctgttacttcacacacttagagatgagatactcatttaagtagcagaagttgtgaactttaggaaaagtgaggtcaagaaaaatatctgccttttccagctcaaatgcttggtacaaactttttctgcccaaatctacaattggctaagcattgcttgaaaatcagacgccattattcgggaaaatgtctattatttgtgccatctgtagatcatgacagaagacaaggtttgcctttacatcttagtattattttatttattgcctttgggcggaggaatctgaatgtcagacatgagttcagacattatttttgtcagtttttggatgtataaatattaagtggggaattctttatatatatatacacacacacacacacacacacttttttattatactttaagttctagggtacatgtgcacaacgtgcaggtttgttacatatgtatacacgtgccatgttggtgtgctgtacccattaacttgtcatttacattaggtatatctcctaatgctatccctccccgctctccccaccccacaacaggccccggtgtgtgatgttcctcttcctgtgtccaagtgttctcattgttcaattcccaaccatcattctcagcaaactattgtaaggataaatggggaattctaatgctgtgccaactgtctaatttctggactatctaaatgcaattttagtattctggttgaatgtccttcttcctacctcctagcattcactacctctctgagttgtgagtagctagaaccagacctattcaggtagtctcagcactaactgaacrccctcctcaacaagcaggggcctaagctcctatgaagctggataaaagtgaaatggaagtcagaaaagggcacagcaatttgctgcattcaaaaggaactcagcgaagaggacagacaatcaggtcaataagactttactggaatttctgggtggttctggaaggtggaatacaagggagagattgaagagctgtttcttgagatggaaacgtccaaagacctccttaaacagggtagtgactttgcctatgagtagagaaaaagttggtaggtgccttgatccargtacagtaaaacctttctttaggtatcatatcctgaattttaacattaagtataagggatttatggactgcttgaatattagaaacattgttctatctctaaaacccatctaaattcatttttctttccagttatcagtgtggttacatctgacgtctgccatgagcaattttttccaaaaagtgtttattttatgaagagttagaggcattcattcattcgttcattcattcattcaacataaaggccttggcagagtttacaatttaacaacatccttgcaagagatatttactgagcccctcctatcccttargcactgtgctagatactgggatatgatggtgaacaatcagtgtcccttccctaggctggtgaggaagatgtatacgaatgaaataattgtatcaaatgtattactacaaactacagtaagtactatgaaggaaagatagagtgctattaacgtatatgaaaagatatagttgggaggatgatatggtggtcagaggaggtttctttccttgagaaactggtcatcccagagagccagaaacaatttgagtaggagtaaaccagccaaaaaaaaaagtgatcttgatgctgcaaacataaaactgatctaaaaaatagtctgtttgaaaaatgatcatgacagatggagcctaaagctctgaaagtctcctttgcacaacagagactatgccaatgggggcatgctttctttggatttgtaggctttttcaaatagagacatcaaaagcagagtgaccattcagccttacaagcatgagtttgggcacagctgatgccctaaggcatagcagaatgtggaaatactcacttcttccaaagatttttttttgatggaaaattgacactaaagagctttttttgggaaatgaaagaaatggcaaggtaatttggacattacggaaatctatgctgatcctatgggaataacaatgtgttccaatttcccccattctcactgcttaagattatacttcttgcctcaataatcaagatcctacttataaaagtgtttgtcttgagtattatttaataagagagaaaaaaacacaaagttgtaatacaacccagataacagctttccagacccttccttcttatttaggaggaccttctacctaaacacatttttcatctctgtgtagtattgcggggtgggggttggggggagacatcaaataatgtaatgttttatgaataccaaacctacacaaagttctgaaagacagaaacttttccaattctagatcctccacatctactttccaagaagaaggctttaaaagggatgaataaggtataagggacctgcagaatctctttaacatgcacacattatggtactagaaaagaggacagaaatgcctatatcaacagctgcctctaacatttttagcagagcctcattccaggccagccagtgagaattaaggaggaaaaggctttcagtgattcagaagctgccttcccttataaagtcaaggttctctggagtggtattttgactacttttggaggagggattgcctacatccacttctctaaagaagccagaattttctcttcctctctaccaaaaaagtactctaccgacaaacatgtgtgcaaaatgcactgtgcctgcattccttcaggtcagcagagtgcccgtgttaccaacattcacagctggttttgggataaagttattgttgtcatggattcaggaaaacaaacatgttaattgctttatgagttttaaacccaagatgatcaaaaaccctgcatatagatttgtccagctcccatcgctgaaaggaatcacctgtattacatatgctggctacaaaataagaacattcattaaatgcatagataggaccactcaaaacataattaggtgtctggttagtcaaatattctggataaatgaggatgtctatacgtaacatttctgagttaccagtttttagcgatttaaatacaaattaaatatgcaaaatacaagttaaatacatataactgcaaacacagaaactactgaattgaatagtttacttctgcagaaatgtcaagaccatgacaacacaccttaaggtcacaagtagaaaactctaattactgttatatgttacagaaaaaaaaaaggacttttatctggttactatagttgtttgatttctggataagccataaacttgaagtatgataatcatactaacaaactcttgagatatcattcatgtaaaattcaaattcatatttatttcaagtagtttctccagaggaagaaagggaacaactttgccaaccattttcctgttttaaatttagggatgattgaaatgagttctggtgtgtgagccatcatttattctgaacctgctgatgtaattcacagattcagcccattttccttgtattggtctttaccagacatggcttacagtaacaaaatcatgaaacaaaatattctattttatatgttcatcttctgtctttgaaagttcaagaaacaagggctctgatacctgatttggttagtgtttgaaggttgccaagctgcgttgcakgtaataatttgggcttaggtaacgtggattgtcataaaatgcatgtaagcatgggttagtgctgaggaatagaatattgaaagtcaccagaattcagtattccactgtattctcgcatctgtcctcatcgccacctgatgaagcaggtgttacatccttctcattttatagatgaaaaaactgaggtgagatgctagatgatttgccaagggactcaaaataaattgttgaaaactgggatatgaatccaacctacctccagagtccatactcttgcccctacctgatgatgccttttatcataggtaataagagtcttgtcctgttccaactatctcaaattccaatcaggtttaaagaactgggagctcttcagtataaaattaccctatagggtctcaattttgttggaaaaggaagtgaatgctttgaattccaagttgcagcttttaaaattcttgatgcatccaaagatatctcgagggtctcttcctgttcactttcttttctaggggctaaagtatgtctgaagctaaaataagtgttgtataaactcccaggctgatcttggcacacagcctgccctcttggcgctgtttgagccgtgttgctctttatgggatcttctcactcaagcctcaggatctcctaatggtatcctaagcttccagtgcttcccatgtcactctggacaacaaggatttaaacaccacctgacacctaatatctgacctaattaatccaaatttgagtgacaactgataatctgattggcacttaatagttttcaaaacatttgagcaggttacgtctttgacctgctcaggagccctgaaaagtggtggctggcaagtgccattgtcattttgcagatgaggaaactgatatgcaggtgattgcccaaacacagacagccagtagatgaggagatcatggttcccgggacagaattttaggcactctgtctaagtcatgctttccttttgtgaaactatcaacctcttctgcttattacctcacagacgccacagataaacagaagagtttatactgcctatttatattttcaaattcaatatttcaatcagaaattgttagaggtagacaggatattaaaataataggcccacacacttatagattacaaaatgagggccaaagggcttagtgaactcttcaaagccacacagacaatcagaggcagggcctaaaatagaatgcaggcccacagtcctgtccaatccccttccctgtctataaatctgctctccattctgttctctgaggacataagcctgggatcctataatctaacaagaaaaagctatgataatattgatgaagatcattcctyactattcttctgtatttttgagacttcagtatcacattcccttcttaccctctgtccaagtgcttctgtgtggctcttgtttaaatgcagatctctaggccccatgccagaaatcctggctcaggtgagccccaggaatgtattaggacccttactttcaatggcaaaaaccgtgattacttttgcaccaacctaatacattttaacaaattgcccaagtgattctgttgaccatggttccgtaaattcaggccatgctttaggaaactctgctctaactcaccattttcaaggactggagtggaaaaaaacattggtgtacctcatttaaggaatatttatttttggcagggctctctcaaaagttagtcattacggtgatcaataattagttaaaagcaaatcagcccaaaccagcagtggatcataaaattgacactcttccatggagtctgctgtttctttagtaaggggctctttgctcagcaatccctgggaaaatctgtgctttgcagaaacgcaggggaaagcatgatggtcacccttggatgctttgcttwatggcttgaccttgcaactatggttcaacctgtttgcccgaggacctctgttctgtgcattggcttttggtggtcgatatgttggtatacctaatgtgtttgacctcctaaggcaagtacactaggcagccgcgtgctgcttaaggaaaatagggcaaggcttttatgttataataatcctgaaatgtgctaaagaaagcctacagccagagaatgtcccttatcttatgcatcttatctgttctttccttaaaataaattagggaaactttctgaaactaacaacgtctgagatggtcattgcagacagctcttttaaggtttggggaaaatagaaagttgcttaaccaaattcctgagtttctactatatgtagaagggcagggtgccctaagggaaaaatgaacacactggctgcctccaaaagtttacaacctaatggtgaatatactgcaaatgtgagaaaatataagagcttacatcaagtaagtgtgctgatgaaatcactggagtgattggagcattctccctgtagaaaaaatgcatctaagaaggtttgctgtagatgaattttgagtagacttttaaaataaggcagaaacatgatttggcagaagaagaaaagggaagctatccccggctctggaaatagaatacacagggctggactatatgaatttgtgtgttgtggggaaggaggaaacttaagacactaaaaatgtttgtaaagcttggagtgaaagttgcaaaggagcagcaaacaggagggcagaggaaaaacaggcgggcaaaagaaagttacaaaggagcagcagaacgggtgcctcctttgaatgaccatgctttcataataccttaatttgtacagctgcaaacagggaaggagaccagttggtacaagatatgtagatactttttgctgaagggtagctgaatatgccaccccaaaatatgcctctctggcataaggattattttgggttgaaagcaatcgagaagtagatacaaaaaatctctctgccctacccctatttgcttaaaagcaggacatacacttataaaggtgtccctccttccctctctaccaagaaggacaaaggttgatcaccagggatgaccttaggcccttgcttgcctgaagatggcacagggaaatctacataacagactttactatataaccttttgtctatcattagtttcccatgtatttgttttcccacaatttgccacccctagaaactcaagatcctttccccttgtcttgttacttccccaccaatgtgttgttctttgttgatgatgccacataaaccagagttctaagccacttctttgagaattgctcattccctgggtatctcccatatatacgtgaagcctatttgttaataaacttctgttcgcttttttctttttcatctgcctttttttgcaggggttccagataagaattcggaagaatagagagagaattcttttttcctcccatacaatgcaaaatatgtgaaactaaactaaaatatattaaactaaagtaaatatatgaaactaaagtaaactaaaatatataacaaaatacacaaattatagaataaaataaaaaaatataaaaacatatgaaactaaaccaaagtaaagtaaactaatatagaactaaacttaggtagggcctgttaggaaaactaggaatacaaaattagacgccaaagtaggaaagagccttttagtctagctaaaagaggattagaaactgtagcattgtaataaagtgtggacatgcagaaaaaaagacaagtttaagaaaacctgccggaatgtatagctaaacaaagactgtacatcccatcctggttctttacaagccaaacacggatattagtttgattactccagaacctacttcttttttgacccaaaatggtaatgcccaagcttgtcaactcaccttcttcactagcctccaatgagaatggcatttggctgcagacaaaaatcaaattcaccctccagggacagagacgtgccaacactacagtgatccaaaagtatttgctattggtttaaataggtccagagatctgagcattggtaagcattgctgaaactgctgaacttcccagagtgacctctaggagagggacaaaaaatgtcttgactaaataaaataaggtgagtgtaaaaaatttaaaattctcatgagattctagtcatccctttcctagtaagtcagacttactcctgasgagtaagaaataaactactttattcatcttattatctatgtaataagtactatacttggggacatggtaggcattaaataaatgtaagttccattcccctctgagaatctctggaaataaatttacactaagacattagtaggcatttgctccaaacctatgctgctcaaaagcttcccagaaaattggcatcctggaaattttctgattttcttactgatatggtttggctgtgtccccacccaagtctcatcttgaattgtagctcccataatccccatgtcatggaagtgacctggtgggaggtaattgaatcatgggggtgggtcttttctrtgctgttctcgtgacagtgaataagtctcatgagatctgatggtttcataaaggggcgttccagcttcatccatgtgcctttttgcaaaaaaaaaaatattatatatatatatatatatatggggcattcccctgcactcactctcttgcctgctgccatttaagaagtccctttgctcttccttcaccttccaccatgattgtgaggcctcctcagccatgtggaactgtgagtccattaaacctctttcctttataagttacccagtctcaggttatgtctttattagcagcatgagaacagagtaatacacttatgaagtttattccacatcatggtaatcacgtgctgataaaatggtcatttctttttattttagacactgaaatagtgtgtgacactcttacgttcatacacttgggatataacaccatctgtggtatttgtcaccaaagacaattagccaagagcttttgttactacttccttcctaagcaaaacttacagaaccacatctaagaagctgataacaaagtaaggcaggcagatgcctgtctgaaatatcctaactgagactatctcctctttttttaaaccactaatccttgatgacatttcatacttttgttttcttattatttaattacctattgaaatactgtaggttgggttgtcaggaagcactggagctgtgattggattggttattgtttgtagatcagaatttacaaactgaagacccacagcaaacattgatttagcctgttgtccttttttaaaaatgttagttaattgccatcattttaaatgaagggatttttgcacaaaggttacaatttctaccttctcataaaaagtggaagatctggcaactctgaactagcattacaacaacagatggggctgagtggtggccaatcccttgcaggagacctaggtcctctgtttatcagaagtaccacttggccttttcagtcatccttgccccaataggcatctgaatttgcaaaacttgtcttagattttggaatatagattactgatgcatggcaaaaatatcatataaagggtgtgcacacagagaagttaagaagttaagaagtagaaaggcaaatcaatgcagccattataatcctgtcatttatattttctaaggcaccatcagtaaacactaaggtttgtgattttcactgaataataaagcctagtaccttttcattgaaacctagcaaacaccatcagagaataaggacaaagggaagactgcatagaatgtcagaactagaagaaaactgagasgtgaattagcacaaagtcttcattttaggaaagattattgagattcagagatgtaaagatcttgtcctctttcataatagcatcttgatggcaaagtcaggactgtggatctctacactgagggtctctctcttactctgtggctattcttgcctaagttatgtcttcctctgatgtgtataaatcagccagtttaagaaaagcatcacactcttctaagtgcacattgcatatgtgtaacagctgacactgatgaagaaacagagatgagcagtgacatcccagacagttggcaaggtgtcactcatactatatcaagaggatggaaagtgaaagaattaaaggatacttaaaagtctcttcacattttctacatagtacacaaaccttttctataatagccctgaggtcatcttgcatccacttacttaattcaatggacaaaacactcactatcccataaggcaatctgtcctctgtgttgctaggttgttagaaactttaacttatgtttctaggtgaaggtgaaggaaatctatttctctgtagacataacccatgagtgctacttatattttcacagggaacatgaaagacgctcactcttctacctcacatcacttcagtgcattaagtgtctccccatagtcctcacttctgactaagcattctcagttactcagagctgctcctgggtgtgaccaggcttctaaacctcccacaattctcaacacacacactccttgattactaaaattgaacaatgcactaattaatgttctgagaaaccaagaggttgagtctctaactgtagctttaccaaagccaagcagggatccagagaacagagactttctgtggcttataagcagcaatagtaaaacaatttccccttggtaagatagctttgttactagttcaaggaatccactagtgacaaatgagtttctgaatcaccctttacaccgtaaactaactctgctaacgacttagtgaatgtttgtcattgttgtcaataatggtattgtagctctaaagtgtcctgtacatgccaatgggtcatggtggtcctcttcacatggccatatattccaggaaccttcgggccaccagttccctatttctctacctgataccactgatattttgtcttctttagggaatgcctcttggtcgctatgattttggtccaaagcactatatgtatccttcttggtatggcttttttctcctccaatatgctggattccaactccaaaacactcggtggtaatatcaacaattctatgtttattcactgttttgcgtttagaggagcagtgatctggtttctagactaaataagtgactatcagctagtcttcacagaagtctagcaaatccgccagttcaccatgtcatccacactcagagaatcagggtcaaactggatgtcatgtggttctgcctccttcagctgtttgtctgagtgattcccaaattttgttatgaataagaatcattgaggattgtatcaaaaatagatttttattctggataatttatataaatactctgtcctcaagggggtgaagtgtaactccccattctttaagtgtgtgctgtacttagtaactactatccaaagagtatagtatggaagatactgacagaaaaataattttacagtagagaaacctggcaaacattagtcaagtgattaagatgaacatctatagtgataagtcatcctggtagcatcttgtcttgatatcaagggatgagaatagcaacttacctctagggtctttttctcaaaaacatgtgatttcagtctaatcatgagaaaaacatcagacaaatccaaactgagagacagtttacaaaacatctgatcaatactcctcaaaactgtcaaggtcattaaaaataagaaaagtctgagaaactgtcacagctaagaggacatggctaaagagacttgacttaaatgcagcatggtatccttgaacaaaaaaggaacattaagtaaaagctgaggaaatcagaatgaattctgaagattccttaaaaatgtataaatatcagttcattaattatggaaaatgtaccacagtaatgtgagatgttaatattaggggaaactaggtgtagggtacatgagaactctctgtattatcttcacaacttttctattctaatatgaaaagtttattttggaarattgactctaaggtcttctccagggattgtaatttaggaggtgtttttaagrggaaagagagtcagctttgcatattattaatacactcctctgttgattctgatgcagtcaattcgtaggccatattttgggatccctggtctattctgaaggttcttattcttggatacacattagacatctgtgtcccatctcagatgctctgatttaattgatctagagtgtagcctgtgcattgggattttttaagccccttaggcaatttcagttgcagccaaatttaaaacttattactcctgtgctgtccaatatggaagtcagtagccacatgtggctattcaaattaaaatgtaattaagattaaataaaatttaaaaagcctatagacatttcaatgatcaatagtcacatgtggctagtagttactgtattggacagcactgatgttgaatatttccgtcattgcaataagttctgttggacaacgctggtcaataccattggtataaatggcttgtttgtggtcttctccaaaggcttctgaaaggaagagtccctatgagtaatatacaggacaggctgctctaatcattggtgatgattcaaataaycaactcatcctagatttcctgggacttttaaggcactgaaagtctcatatcctcccttccccccgaggaccgaggaaacccgtcgggtacaccaggaaccttggtcatcctgtagatccaaagtcttttgtgaaggagagcttcaatcastaggaagctggggcagttgggtctagtcagcttgagagaaaagagctaatactgggttcacttgagctagctggtgccaatattgtcctgtgtgcccaggctttcatgaggcagggatgttgaatagtgaagtcatctgcttttgcttgatgatttaacctcacgctccctactacctgggtggagcctgacatacaggccactacccacacctctgtgcatgtgcttgaactcaatttctggtrtcagatgggtctgggtttgaatccctgctctaccacttaccagctctggggccatgcaagttatttggcttatctgatcctccatttcctcatctgtaaatgggaaaaatagtattccttatggctgctgtgaggattaaatgagtttatgtatgtagagcaaatagctcatagcattgtctgataactattagttgacttatttttatttgccctcacttcagaatatccttgaccatttgctaagcattttctgtgctttattcagttcagttcaatcaacatttactgaatgttccaggttctaggaatgcaaagacgaaatcaatttagtctgccttcaaacatattatagttggacatattattatagaacaatatagtgagtgctacgagagaggcaaacacaaagtagtatggataaacagaggaggcacccttaaccaaaattagttgggtagaagtgggtagggagtcacgtctgtaatcccagcactttgggaggctgaggcaggcagatcacgaggtcaggagttcgagatcagcctggccaagatggtaaagccccgtctctactaaaaatacaaaaattagccaggcacagtggcaggtgcctgtaattccagctacttgggaggctgaggcaggagaatcacttgaacccggtaggcggttgttgcagtgagccgaggtcgcaccactgcactccagcctgggtgacagagcaagactccagctcaaaaaaaaagaagtgggtagagagggcttcctaggggaaggggatacttaagctgagtttaggaggatatgtaaagtgtgctaaaagaagagatggcattaggaaaggagttagaggagtacaagggggaaatactgtttcaggcagaggagcagcatgagcaaaggtcctcagttaagagcttgtctgacttgttaatgggaaagtccattgttccatatcaccggggcaatgttggcacatattagttgtgagttggggtagataaggcaggagaggcaggaaaaaatgtaagtgcaattgacaaaggagtaataggtattttccttcttttccaggaatttaaaacatcttttaaagctctctgttcttcatagttaaacctaatttctcaagttatctttggtgacaaagagaatgctaaaagttgttctgtctcctaaatctaacaggtgctattctgcaatctgacatgtattttgttctttcataaacaaaaataaaatgcaataaagttcttgaaggtgcctcgtgaatcttataaatacattacattatctagacattctgaaaagcataaaggagtgatacaagtttattccactttcctagttggccattacaggatcatgggcatgtagctttacagttttctgatccctttcctaagataagacttgtgtaccgtgtcttaagtgtctgctaygatcttaatatgtctcccaaaattcatgtgttgggaacttaaaccctagggcaacagtgttgagagatgaggcctaatgggaggtgtttaattgataagggctccacctccatgaatggattaatgccactataaataggacttgtgggagcaggttcaccttttcttccaccatgggatggcacatcaagaaggccctcaccagatgctggcaccttgatcctggacttcctggcttccagaaatgtgagaaataaatctcgtttttaaataaactatccagtctcagctatttagttacagcagcacaaacagtctaaggtagtgtttatttaagtgtagtaagtacatctgatgccaacaccattggtagaaatactttttggaaactgagaaactggtataaaagccttgacatgtaatggcaaacacattgggtggtgagatgggggtatgtaataggcgggataatgaatcctccctgcaagatgttcacctactaatcccctaaacctgtggatatgttaccttacacacaaaatggtgactttgcagatatgattaaatcgataatcttaaaatgggaagattatgttgaactatcctcgattatccattagagcccaatatattcacgaaggtccttctaagagggagacaggaggattagtgtcagaaagagagtttgaagatgctctgctgcaggctttgaagaaagaggaagcagccatgagtcaagtggactctagagactagaaaatacaaagacatagacccccacaagagcttccagaaggaatgccttgattttagcccattgaaaacctgttttggacttctgacctcaagaattgtaacagaatacatttgtgttgtttgaggccagtaagtttttcataatttgttagagcagcaataggaaaccaacacagggtgtcagagtcttctgggtaagagtttacctctgcacttttgtctgaaaaagtgtctgtctcacctctagaactaacttcctcattatggagcatccgacaataataatagctaataattacatcgtgctcaccatgggccaggcagtgttctaggtgcttctaacctattaacgcctcatatctcattgccaccttgtgataaggcatgaatattaaccctatttttcttataagaaagctaaggcacagaggggatacagtggtagtaaatgatagctttggaatttcaactctgaatcataacccccgtgtattgatccaaaatgtttgcctttacacaaagtcaaggtctgagggccaattgtcactgcattccttcctcacatcctcatgttgcatggtttttctcacatttaatataccatgtatcttctctctgatcttctcacattttgaaataaatgaaaacattatgaaaataaatccctgaaataccagcctttagaccttcatagaaagtgtccagtcaaatttcccataaagaatattaattatgctcaaatgaggaacagagcagagcctggcaaatccctgcagatgtggcaggatggccattgtgccagcgtagactccatgcctttgtcttcatgggctatcttaggagaactgtttgtgactctcctggggaattccaaaggtgggaaatggaaaggtttccttgctctcactgtgtcttctcagaaaaatgaattttatgaactgaacaaaatagccaatgcatatgatcagtctagaaaaaaacaatttctacagcccaatttttcggcaccagcagaaaatcattttccttaccagacatcaatattatacggctatttgccagtagttacatggcctaatctaaatctacagagtgctgccccagcgctcaaggaatttacaataaatcataactaaataatcttactaagatggtgcatgatgtttgcagaacaacgtgtctggaaatgattgttggatatgttctttagcttggaatttattttatagtgtccctgaactgcaaccaagttatccgacactactgtttttctttctttccttcttcttttttttttttttttttttgtgtgacactactgtttttctaattgttccataaccccttggatacatggctgctggccccaggaagtatctggccgcttggctggagatatctttgcacacacactcatacccatgcagtgctggtttctctcactgaagagacttggatgggatgtgaaactataaatctcaaacccaggcaataagatcatttaatcacttgtttagaaatttattttcaattataagtctttcctggttagtgtcatagattatttgaaaaaaaatcttgcaagaaaaactaaaccttgagtcctcttccaatatgtctctttatttcatcatagtctgattattatcagagctttggatgtacactaatggtagaaatgatgtaagaatcataaaagtgaatgcaaaaactcttctctttggtgtttagatgaacagtcacttcataaagatcgcaaggactacacagacactgcgtgagtcaaaagcaggaggaaggggaatccttcctctactcaaattgccctcctactcaagaaaatatggaaattttgcttcacatgattcctgtgatgaaaattaatgaattaaccccaaatgcccaactttatgttgtactgtgtagattttatattktaacattctaatggccgtgttttctggttggtaaaagctagacaaatcccgagcagtatagagaaatcctgttatgatttagtcttaagctatttaaaattttctaatcaatagtgcaattcttcaaagatatatatgtatgtatatgtgtgggcaccattaatcaaacagatctgacatagtaacatgagtgaacagctggtcatggctgtaaaataaagccactcattttgggatttttctcacatgtccacagtccagaaatactcacagtacccacaaaaatatttctttatgagtttagtgagaacctagtagacaaatataaaatcactgaagctattcattgatgcttgagatgagggcttatatctttgagaaatgagagggtcacctggtatcttagtccattttcacattgctataaagacatacccaagactgggtaatttataaaraaaagaggtttaatttactcacagttctgcatggctggggaggcctcaagaaacttaaactcatggcaaaaggggaagaggcrtgtcttacatggcagcaggcgagagagagcaagcaagagcagggaaaactgccttataaaaccatcagatatcgtgagaactcactcactttcatgagaacagcatgggagaaaacgcccccatgatccagtcacctcccacctagcctttctctggacatgggattatggagattagaattcgagacgagatttgggtggggacgtagaaccaaaccatatcacctggtctctctacttcctgtcaaggaggttagtgggcagagaggagggctacagaggcttcctttgaacaatctcctttcttttccaaactacttctttgacaggctgctgggtagactctctggtcaaaggatggtccctacttatgctgctaaattgctcggtgacaaattagtagacaaagctaatgcaccaaaaaaatgaatgtagttatagtaatgctaacatccaaattcctctttgtaagacataggcctgtcaaccttgtctccatacttcaattcctatttccactcacctccctcaagaacttgatttataaacagtgtgcctaccataaaatcatcactccctctatgtatttatagacgactgaaggaatatctttcttctttgcatgctaccgtggtagaagggttttaaaagtccgtgctaggcagaggcagccctttctgcccctttctgttctcagttyattaggaaatggcctgaaattccagcatgatagcaagctggcatcctctgtggaatgtgcaaaccatgcctgcatctgcccattaccctagctcagtgtctctgggcatttctgcagttgttctgaaggcttggcstgtttatctcccacaggcggctgaaccgcctcccgyttcatgagcagaccagtggaatgcagtggaagagacccaggcctccggccacccagattagagagttttgtgctgaggtccctatatggttgtgttagactgaacgacaggctcaagtctgtctttgctccttgtttgggaagcaagtgggaggagagcaggccaaggggctatataacccttcagctttcagcttccctgaacaccacccagtgtggagcagcccagccaagcactgtcagggtaagtggcgccaggccaaggatgtgacttatagattccagtggctcttttaattacccggtataataagacatcatctgcagggatttggctgggttcatgcactgatatttctgaatgaagattgtactactaaaatgattgtagcttttggctttaatgatctaacgttaaagacagggctaatatgtagtttggtatgatggaaggggtagagaagaatatgaaaattttattaatgcatgtcttctgtaaaatgttcatcctaaacaaacagcccagatcttgcagcacaatacaggtatgcaggttagctgtgtgcagtaagttatacatttatttgtatttaggcactggaaactcagatttctttctggttctgatttgttgtaggggttttctttcactgggctgtatttttggtgcagcttaggtgtctggaagtggattttggaagtgaacagaagaatagttgcctagtctttgattgtgcctgaatttgtgtattcccttctgggtttccctggctctaactggtagtgtcttttgttggaaatgtatatctcttttttgttggaaatgtgtatgtgtgaccttacaagtttggatctacatcattggtcatttgcagcagagcgcagcaggtgacctgctgaatttttctctggaaagaaagagggagggagcagagcctgcatctgacagctgtgtgtgcctcccggccggatatctggtttgcatctcyctcagcttaaagctcccttcagcctggtgaggcaagtgtgactgtgcagccagccctgccaacccaggctgagtttcactgcaaatcaaggtttggcagcttcagcccagactggagttttcatgctgagattttcctagcattttgtgtttcatgactaaatatggtttgtgtttcaagaccaatgagctgggaactgtactgttctttcccctcccatcaactcatttttggcacaagacgcactctagtcagttggagcaaatcccctgacccgggtgcagttccaaaagcagacactcgagcgtgttttacctaattaggaaatgctttgctccaaaccgaactgctcattcaggttagagaggagctgtaaaccactgagctgactctttccggggacacagtgacttcttcaatgacagtgctccttttggacatyataacattcttcctagattttctttttctttttcttttttttttggccaagtaaaaaacatttttctgcattcttgctgatgctgagggccagtctcctttttctgagtatagtcaacccctcctcccaagccatcactgcccaacaaaacagttattaaaaatatcccagcattcatggtaaccataccttcccattttcagagaccatcctaatttgaaatgttttatcctcttttcagcccttacttttggtttggaaaatgcacttagcacatccatagagtgcctgcttatcccctggggctggctgcttctgacagataccccaggctcttaggcttcttcccttttttctcctttatagttctcgcctcttttctaaagcttcttaatctgctctgagggaagccaaatcacaggaatgccaaaataattcagcatctggaaagggaaaagaagggtgggaaaggaaagggcaagccattcatgagtcccatgtccattcttgcaagtggaatccacacgttgattatttttattctaagcctggagcagtgtggaaagaaagcaaaggttagaaacaaagagttctggataatgaaaataatcacacagtgatagtaataataatgatgatgaaattagtatttattgagaacttagagtatctctgccactataaattattttaaacactttaaaaaacccaatctctataagaactccatgaggtatgtcctgatatcattactgttttatagtaaggaaattgtggtttagagatgttaaataactgaaatcacacagcttttaactgttggagcctggactcaaatccaggcagtctgacttcagagtctaagctcataatcactgtgatctgaaatcttcgttgtcctaaatgtatcagttcaaggctcttggacaagtcacttcaactccttaagccttggtttccttgtcagttgaagataatattacatgccttgactttaaaatatgtcatctcaattgcagttttatgttctttgcaaagagttattttacatgaagcactgctaaggaagttttaggcctttggcaagatgcaggtttgattttgtgggaatgttttggcagaactccaactctgtaatagctattttatttccctacttctcagatgtttccttaaaagaactgccttttttatatggatttggaggtgcaatcagttaacccatttagaagaagaaattttctcaatttgaaatcctaattgagatctcaatgccaggcagataactctgggtgtccttctcttaacggaacatttcgacctaattgtgattagaaaagtggaagaggtcttgaactggaagccaaggggtggctaaagagtacctgatgtctggctggagctctgcctctaatgccctgtgtgcccttgagcaatcacttcctgattttcttatttgtgaaaatgagagcattggatgaaaatgtcctctaatatgccttcaatttctcaaatttgtaagttgataggctgctccagcctttctaattttatgaaaggatccaagtataagatccaagtataaaatgggttatttaaaattttgttttattaccaaagaaatacacattcaatatagaaaattaaaaaaatatgacagaaccatgggaaaataattaaaaacacctataaaacccaccacttcataataacctcagtcaacatcttggtaaatatgattaatctttttgcaatgcataaaaaatacatttttaatgagatttacaatgttactttttctaacctattactcttacataagaactaccttttgcttatcctcttactctacctttttaatggcagtaaagtattctaccatatgatatataatccatcaggctcaccctcacttgttggactgttagcttaacagtgacttttattaacggtggataattgcagcccctaaaatttaaagcaccttctcagaaaattttatttcaaagcttctctgagggtaaagtaaaagtcctcatgattcaaaaagatttttccattaaacacttgaccattttaacatttctaaatttttacatgctgcctgtccctcaaaaatctagctttttgaaaaaatttcaaaaaggtatagcatatctagaaaaatgtgcatttgggttgatacagacaggaaaatctagatgcttctttaacataaggtaggcaacttgtctctgcaaagatctggtctcagactctggatttcccatctgtgctctgcagtttgtttattcattcactggctctatccacctttaaagtgctcacgagaacacatgatatgccggtcactacactaaggttgtatcaacatagaagtcagagtttcagaagtcagagtttcagcttactgaaagcttatagtgtaactaaagtacttccagatacatgctatattagataagggtcagaggatagcactaggacacagaggagggcccccaaacccagccttggaggtgggagttgtcaggtaagtgccacaaatgcccaattacagctgaggctgcttcctccctgttttctatagaatcctgtgaagcagctccagctatgtgtgaagaagaggacagcactgccttggtgtgtgacaatggctctgggctctgtaaggccggctttgctggggacgatgctcccagggctgttttcccatccattgtgggacgtcccagacatcaggtgaggaaaattatgattggaacataacaggacacagattaggttcctctgtgttcmtgtttatccccagattgtctatctctttctgcccagaagttatgtaaccttgttacaaatagacctctaatgattaaggtccaggagtaaatgccaatttcacatataatgtagacagattatctgatgggcatctatcagatacaaagtctgcccctttttcatgtcctttttgtctaaatatagtcattatcatcatcatcatcatcatcaaatcatttcatcaccatcagaaatgcttatacattatcctgatgtataccaaagctactgtttggaaagaaactaaaataaaagtccaggtcacttaaccatacagggctgatgttagatgaaagcaagcatcgataccaaatgcaattttacataatattasctgtcaacaaaatatatttggacagccgcatggtaattttacacattatgtgtaaacaaagtattggtggcatcacatggtaaaaactcagtaatttcacctcagaaattcttcttcacatcagaaatgkagtttgtgcattgaggctatctgattgatgtttatgcctctctgcttgggatatattcakgagaataaataatagaaacctctcccaatgaatgcagtctgtctgaattcattgatctttatgcagtggagatattctgcacaagccgctattttatgggtccatagtagccatggctgttttgtagttctaaaatagtcactgcagtgcaatttaaaatctagtaacaataattttttaagaacttcaccttaatgattttttttaaatgcagctgactaatttaggcaaatgtcttaacagttgattggtatgaacttatccattagaaatcaagcctcaagtggttatttgtagatgcaatgcttttgcttataatagttagaaaataatgctcatattcttttgggtaggtgatgactttaaaagtacagtttaaaggatttataagacacaaaatgccatttaacaaatatgtaaaattgtatacattctttcaacaaataattattgagtgccacatatgtgccatgcaatttgctatagtgatggacaagacagacatgatctctgccctaaaaaagctcatcaaggaacataggagataaaaatacaaagtaaagttgactttcccccaacatctcctgttatttggaggcaattcaggtctttttccaatcaactgcagaattttgcttaagagcatagtggcaatgagactcaatatgtttattgttgctgataatcagaagaggaacttcccatctcaatgacttaaccttttgtggcttggctgtaattgattcacaagttttgggagatgctgactcataatgtgttgaacctttttagggggtgatggtgggaatgggacaaaaagacagctacgtgggtgacgaagcacagagcaaaagaggaatcctgaccctgaagtacccgatagaacatggcatcatcaccaactgggacgacatggaaaaggtatgggaggtttgctgcagcttgggccctcaggatgcataatccctgtgttctctgatacagaacaccacactactgctggggaaataactggctcacattgctcaactgtacttttacttgttaatgttcattctgggttattacccattgaaaaaaaaatccttgtagccataaaaaatgatgagttcatgtcctttgtagggacatggatgaagctggaaaccatcatcctcagcaaactgtcgcaaggacaaaaaaccaaacaccgcatgttctcactcataggtgggaattgaacaacgagaacacatggacacaggaaggggaacatcacacaccggggactgttgtggggtggggggagggggaggaatagcattaggagatatacctaatgtaaatgacgagttaatgggtgcagcacaccaacatggcacatgtatacatatgtaacaaacctgcacgttgtgcacatgtaccctaaaacttaaagtataataataataaaatttaaaaaaaaaagaaaaaaaaatcctaaaatgtttctttaaaaaaaaatcccttgccaggcatggttgctcacacgtgtaatcccaacactttgggaggccaaggtgggaggatcgcttggcccaggagtttgagaccaggctgggtaacatagtaagatcctgtctctacaaaaaataaatgaaattagccaggcatggtggcacacacctcagtcccagctacttgaaagattgaggtgggaggatcacttgagcctgggatatggaggctgcagtgggccaagatcctactccagcctaggtgacagagtgagatcctatctcaaaaaaaagaagaaaaaaatcctgcagggcacagtgactcacacctgtaatctcagcactggatcacttgaggccaggagtttgagaccagcctgagcaacatagcaaaaccctgtttctactgaaaaaaaaaaaaaaaaaaaggtttaattaacagtgtgtggtggcatgcaactgtagtcccagctactcaggaggctgaggtggtagcatcattcgagcccaggagttcgaagctgcagtgagctgatcataccatcagctgttgcactccagcctgggcaacagagcaagactctgtctctaaagaaaaggaaaaaaatgtccttgcctattaggttttattaactaattaaaggatgatagttctgtagatgagaagagtagccctttgccactgcagggaattaatcatctgttgctcacgtcaactctgttgccctcctaggacaagcagtgcatgagcagcagctcagagaatgaaaaccctcctttcattttcatcaggggctgcatggttatccctctcagtgcaatrtagctaaaggggcttgaaatgctgggagtagtcttaaacagcccattcttgaaaggttttcattaactcactctaaacatctaaattaaaaatgtttttgttttcactatagtaaacaggagtgtaacattgcaggtttggtacatttctgaatgcctctccacacactgaagcacaagagccactgaaaaaagctatatgataaatattttaaaaattatttatctgtgttgcattacatgaggccttatctcccagacacttaataaaagagctaatgagaagaagagctaaattctaagattttgatgtttggtcattaaacattacagacaccagtgatcagagaaaaaaacagaagaaataatgagaaagtgacataaaaaattttaaatgcagcaagatatatcagaatcacgatatctggccttttatttatctatcggctcactactactactacgcacacaatttatcacttaaaagaaaaatacataatgttgttagaatttatcagcagtaatgctccaagctctatctttctacaaaaatttcatatcagtaggtttgcttgaggattctagatttggtaagattgcagtttgcacagagaaaaagatatcaatatcaataggaaaatattcttttagaatttctccatggagctgacaacatcttagaatgtatcgtcctagacagagactattggaagaaaaaactttccttatttctaaaatttaaattcaaagtatcttctggtggggacgaagagagagagaggagaaaggttgcttgctgtgactggcaggattttttgagcagtctgctgctttcactccactaaagaaacaaaactttcagaagtttcatttcccttctataaaccacaaatccaaaacaaaagaaagtggaataagatagtctttaaagctaatcttggttttgctaatttgtaagctttcaccagcagttcttgttttgctctgttttgattttgagtgaatctcatattcctggctctggtggagaattttcgtgcttttaaagattaattaatttagtcctttttgcaatggtttgttcttttcggcatctaggaattaaagaaagtgctcaaccataaataaatgtagttatgtccaaagtaccttcacatagacacactatacacaggcgtgggccttttggaaacacctgaaggccaaatgtctgactgtgagtggaagatccagagtgtgctgatagaggaagcttttctcatccctcgagagcaaagagggtgatggaggcaagagtcagagagccctgttctcttcttcatgtacactgcaaagggcaacttctctagaagcattaaaagtgtcaattaggttttcaagtaagcgtcatttattcatatatacattcatttgtctttttatttacaaaattaaatcattttcccatgaacattaaaatgggaagagagaacaaagaaaatagagttgaataataataacattgattctggaccagacactgggctggacaataactcgagggttaccttatttatttacacaaagacccgatgaggtacacactaattattttcatctccctattaccaatcatgagactgaagctgagaagggttaaaaacttgcctaagctcacacaactaagaagtgtccgagctgggctttgaacccaaggtttgatcaagggttgtgcccttaactgccataccatcctgcctcacagatctgggttagggattctgctcagtcacttagtagatgtgaatcctttgggaaggtacttacacactttgagcttcagtctctgcatctataaaaccatggacacatgcatgagtacttgtagcatttcctttggtcttggtttcaagtagcttctggtccctttttgggaaatgcaggacctcatgacagcacatcattgtgtttctcctctgtcccccaactcactagatctggcaccactctttctacaatgagcttcgtgttgcccctgaagagcatcccaccctgctcacggaggcacccctgaaccccaaggccaaccgggagaaaatgactcaagtaagtatgctaccccagcacacaacactstggggtctggggaaacttctgttagaaggaggctrtgcagcacagcagagagaaggccrgagctaggagtccaccaacagactaacagccttcagtgaactcagggatcccaaaggacaggaacagcttgaaagtacttgcatccttcctgcagggaccagccctttgcctccaaaagcaataggaaatttaaaagatttcactgagaaggggccacgtttaagttataatgtctaaggagaagtcacttcaaaatgcagcatcacatacaataggaatttgggttccagagtcagacatatctaggtttgaaaactggatctgccacttatcagttatgtgaccttaaagaactccgttaatttctcagagcctcagtttccttgtctataagttgggagtaatattaatactatcatttttccaaggattgatgtgaacattaatgaggtgaaatgacagatgtgtatcatggttcctaataaacatccaaaatatagtacttactattgtcattattattacttgtttgaagctaaagacctcacaatagaatcccatccagcccaccagacagagctctgagttttctagtttggaagagctattaaataacaacgtctagtgtcaattctatacttgttatggtcaagtactgggctcagcattttacattcattgtctctttaagttctagcaatgtgaagcaggaactatgattatattgactacataaatgaagaaattgaggctcagatacattaagtaattctcccagggtcacacagctagaactggcaaagcctgggattgatccaygatctkccagcattgaagaatcataaatgtaaataactgcaaggccttttcctcagaagagctcctggtgcttgcaccaacccactagcacttgttctctacaggggaacatctgtgggcctgggaatcactgcacgtcgcaagagatgttgcttctgatgaattattgttcctgtcagtggtgtgaaggcaaaaaaaaaaaaatggttggaaattatggcttgctagcaaatgatgtcagacattctggttaatagagtaggaagggtcttacagatggagaaatgaagacccacggacatctcctgatgcacaaacttctcacaagtgacctggaggggcttggttctaatcttgtccctggactgcaccaactggggcactgacattctatgtggtcctctattaccattgggctggtcctgtcttccaggaaccagggcctctcccactgcaaccagaatggcctcagattctagggttagcattgacccagtaactacataaaaaagtggaatagattaaatagaacctcagacaaatcacagaaatggggctaaacctagccagcctgagcttcagatttaaaagttctctttctttataccagggaaatcaaaacctggatgttgtcttctctttttcttctggctttgacatagttaacaagccctaggatgtctgcactggaaaaatgggagatctcatttagtccaaactcctcctctgttaagagacctggaataaagccactattaatcaactattagtttggtgactattagtcaaagccaggaccagagccagaagctggactttcctttcccctggccaaaccttgtgtgcacactgtttcttcccctccccaccctgtcaggccattgatgtgatggctccccattcacaccttcatttctcctctttaacgtgaccagggctgttctgaacctccttactttggcctcctctgcccagaacaggtcaggcccctctgcatccatcaaccaggtgtgctctcctgaccattctttgtcagatgggcaccttcactaactcagcyctttggattgctttgcagattatgtttgagactttcaatgtcccagccatgtatgtggctatccaggcggtgctgtctctctatgcctctggacgcacaactggtaggtggctgggcgggacagcaagctggttggagcgcactgccagagatgggattgaatggtcgttaacacgtgggggtgacggactggagttgagttagaatggacacggctgaacccagccctaaaagatcttcttctagtgttcaaaataagcccttgatctcatatttctagcagaacttttttctactgttttcctcttcctgttctttactttttttcatcttcccygagccctgtcccacctcacctctcctatcacatgccctgttttctctttttaaataagaggctcggaaattccctctcccccaaggcttccctctacttgtccagcaagtaaccacatgccagctgccatggtgacttatcacrcccaattgtctcccaggcatcgtgctggactctggagatggtgtcacccacaatgtccccatctatgagggctatgccttgccccatgccatcatgcgtctggatctggctggccgagatctcactgactacctcatgaagatcctgastgagcgtggctattccttcgttactactggtgaggcctgtgggagataagggggagaggggagcagtgtgttgctcagtaacttccaggaccatcctcactatccaaggagatgatgggatgaagttttgcaaatggcaaggcctggctctaatgcacagagcaaagcacatctttctttgctgtgtgaagttgcaaaatgattacactatttccttgaggagaacagttatagacacccagtgttatgcattagtcagtgttgtataattgatctttttttaatcccctccattagcaaatagaagaagattgtgcagagactgaagatggcatggtgtggtgattggcaggagacattgtgataggactcgagtcccaactctgctactcagtagctctgtgagcttggacaagttaaccaaccatagtctctttatttgtaaaatggggataataatagaccctatatcacatgattgttatcagtattaaatggaagaacgcatgtggaatacttgacatagagtaagcattcaataattgttagctattaacagtgatacttattaatagctaacacagtgacatatgtgtattcagattctaagccggtgcacccagtcctcccttcacaagaggaaagtgtcagcattgccagaaacattgtatgtcctcagtgctggtggctccagctacctgtcctccccttagcaatttggtattgtccaaacatttaggtttctgaacatgcctgaggcttattttatgctccaaatttgaggcttgagacttgaaccctgccaatgttaaagtctccacttgcaatatgaagttgaataattgcattcctcctckgctccctacaaagaatcccaagatgcctctaaaaggttcctagagcctcagatataattaatagcctagaacttcagagagcagaagtctgaaaggtctctccctgcccacttcttccgtatctcgttcagtatgcaccgctgaaaccttctggactaggcctggtcctgagacagcaccacctctttcctggagggtgagaaatgtgccaaaggtttaacctgctatccactggcccaggcaacaggatctcagactttttgaaaattgtgaggcccctgaggagctgattcagcataagatatcctggttaactgaaaatacaatataacaaactttctgtcataaaataattataacacagagtagttatcctgcccacccaccccaaaaaatgttatggtacaaaaggatccgctactgtgtgcctttctctagctagctcattttattcttgttatgcatttcccagacaatgyatgctgagggcctactatgcatgagacactgtcctaggaacagaggtggttccctggtggycctactacgtcattatcattgtggattttggattgcagaatattgaactgacacattttttgatggcacatgtcttgagggagagactgcagtagggcaggtgaatctttgccacctgtgcagaccctaatgtttgccacaatgtttgtatctggttgacagctgagcgtgagattgtccgggacatcaaggagaaactgtgttatgtagctctggactttgaaaatgagatggccactgccgcatcctcatcctcccttgagaagagttacgagttgcctgatgggcaagtgatcaccatcggaaatgaacgtttccgctgcccagagaccctgttccagccatccttcatcggtaggcaacaaacgcccttttcctgggaaggggagtcattgtcttcttccatatcaagccagcctccagaacatggagacaagtgacggttgccccaagaccaaaagcatttctaaaccagaaaaagggaaagtgccacattttcaaggcgagaagacataatgaggccaggaaaaaggttttcttcctaagaaaacactatctatgttgcagttaagcccaaagcattcatggtgtatgatgaaagaattaaataatgcctgtgctttggagacagcggaaagggtagcaagggtgtgctgaaggctgagaatttgggaatgctgggggagagaaaaatagaagagcactcaaagtgagtctgttcctacattcacattgtcttggagagacaggtttgcatagttgtttacagaggcaggctctgagaggggtgagcctgggtttcagtcttagttctcttgatcttgggaaagtcacttaacctcccaactagtctcctcatgtataaagcggagactgtaatattacttatgtcctaggatggctgtgagaattacaggagatagataaagagcacttagcccactgcctggcaaaagcaagcattcaataattatcagatatcactagtaattaataatcaggtagtgctattgttaacgttatcattacatcacagcactgcagaagatgaaagggcacctagaggttttttgaaaacacctgcgtcagaaattaacaaaagtccagacccccacccccacccaaaaaaaatgttagcaagattggaaaaatgagccttttccaacaggataaaaaatagagtaagtttccctgataatccagccccattagctttgggggctggggcagatgcaacgtagctgttaaatggagacctgggagagctctgaagagttgttgcaacattggctcagcgtggaagctttgcagggaattggaaggcttcatcccttatttaaaccacatggagtgagtagtgagtctattaaaaaatcagtgatacctgttgtagcccacacctcaggatgctgcagcaggccttcctcattagaaggcaggcaggaagacatagagcataacaagacccttttgtctctcagacaggtggttcctagattattatgtcttcccagcctcagtccactgcaagatcatccagatgttcaagtctggtcttccatgtctagcctgggttttactctccacttaaggaccatggcctgtgtctcttttccagggatggagtctgctggcatccatgaaaccacctacaacagcatcatgaagtgtgatattgacatcaggaaggacctctatgctaacaatgtcctatcagggggcaccactatgtaccctggcattgccgaccgratgcagaaggagatcrcggccctagcacccagcaccatgaagatcaaggtactgttcagtgacagacccagtggcaatgccgccagcagtgtcagccctataaccacagataaraactcttcagagactgtattttggtgacatgcaattgtgggttttagsggtaggtartggacacaaatctcatattttacaggatgtaagtcaatctagttcataagaaaaattgagttactttatataaaatttgatctctatttatccttgtctgtcagctactttcagtagctgcagtcaaagtcaacagagctccccacatgctcatctctctttaaaatatgcattttgttgtttttctcgacacaaaaatagtgcatcatgcatgtaacacattttttaaaaatactgatgacctagacttatttctgaagaacttcaaacactgtagatttaggaggagcttatactcttcctccactactaacctcaatcctgtggccaagaattcaaattttatcctcattcctctgtctagcacatcttttggtacaggtgctcaaaagcacagaatgactctaggatgaccaagctcagtccctgagccacccaggacccctgtatgtggtgtgaatgttgagccctagtgaagggaactcggggattaaatggagataattctttggaggcaaacttaacctgtggctgggtcacttctcaaaggttattatcactctctgaagtcagaaggccacacttgggaccctctgacccatgtcacaggaagtagaggggcaattctagtgcagttcacacacgtgggtatttaaacaaattatctcctctttgcactcccttctgtttttagaaggagtatgcagctaacactagagagtgtgctagactgaaacatgcacactttctctctccatgataggctctggctagtcctgccctaaaagacttcagcatgagagaagagagactgttttccaacagsgtttgtgtttcttggatgccattctgatcagctcttaccccccttacttccacacaagagggaggtgaatgaagccagtagctgggctcactactgagttgatctcatgagggtcgataacagaaagaggctattgctagagttgggcagttcctagttctctaaacttggtttcttgaatagaaattaatgtgaaactctgggccccgatgtaatgagatagtatagagaaccaagaaaaacctaggacaataagatgataacatttggcaaaaatgaaactggatgagagacctatgggaactcccatagaatttgtcataggctgttcttgcgttgctataaagaaatacctaagacttgggtaatttgtaaagaaaagaggtttaactggctcacagttcagcaggctgtacaggaagcatagctctagcatcagcttctggggaggcctcagtctcagaaagcttcgaatcatggtggaaggcgaagcaggggcagacacctcacatggcaaaagcaggggcaacagagagggcaggggtggggggagggtgccacacactttgaaataaccagatttcatgtgaactcggaagaagagctcacttatcaccaaggagatgtcctaagccattcatgagagatccacccmcgtgatccaaacacctcctaccaggccccacctccaacacgggggattacatctcaacatgagatttggaggagatatccaaactatactaaattctttacaacttttctgaaaatctaaaattgttccaaaataaaaaggttatttttaaaaccaaaccaaaacataaaaccacctgggagaacccaggtttgaatatcagatctgacactgatataaccggtgttacctgggccagttacttaaactttctcagcctctgtttcctcatatgtaatatgggagtaatttaagacttattcttcaagatgtttatgagaatcaaatgagataatacatgtaaaatgcttagcatagtgcctggcatataattacatgctcagtaaatatcagtactttgtattaagaagtaaatgctcagaagataaagattaaactggttagccagttttcactgttctctgtgcctaaaccattcatttatttaagaaacatgagcatgccttgcaggttaggcctgtgcactgggaaaggccaaccagtgcagcttaagaggcacctattgcaagggaatgtccccagcaggggaccctgagttccccaatgttaaacagagcatctgggtgaaaagtggtagttcacttcaccacgtggaaacacatttgtatactaagtcctagcacaattaaaacttctcctttgaataggctagggtttgtttctacagaaagtgtatcgtgttgaattctgaggcagagttcatggaaatcagaggcattgccagggttcttaagtgggggccatggctggatttggagccaactttcagtttgctcaataatgtggtcgaagagttacaggtgagaaaaacgaatgtgcttactgaagaatttctaaatccatggctccctctggcggtcctgccaagaacatgacacaattaggacamaattggcatctaacagacaagyctgtgtccctgctgaacaagaaactaggccatggtagaacatccaggctctgtcctaccgcactaacgactgcactaatgatgacattaatgaccattctttttcatcttgactgacagatcattgcccctccggagcgcaaatactctgtctggatcggtggctccatcctggcctctctgtccmccttccagcagatgtggatcagcaaacaggaatacgatgaagccgggccttccattgtccmccgcaaatgcttytaaaacactttcctgctcctctctgtctctagcacacaactgtgaatgtcctgtggaattatgccttcagttcttttccaaatcattcctagccaaagctctgactcgttacctatgtgttttttaataaatctgaaataggctactggtaacttcttgcgttggcctccgatcaatactcgactgataccatttgttaggttgacctcacccgttacaggatggctccctctagtggtccagctgagcacatggcaattaggatggatatgtttctcaggcaaagggtagaatcacattacctgaagtggggagctgcacttcggttctgtaaagaggaataatttgagaatacattggagattttaaaaaataacatggattaaagtgtatcaatgggataatctacagtacctcacaacttgcaaagtgattatattactttacactcataaccccagtactggtaacctgatgggtgaaaagaaaataattacacacacacacacacgtatatatacacatatacacacatatatatgtatgtgtgtgtgtacatatatatatgtatgtgtgtatatatatatatgtgtgtgtgtgtgtgtgtgtgtgtattagagataaggtctcactctgtcacccaggctggagtgcaatgatgtaataatagctcattgcagccttgatgcagccttgaacttctaggctcaagcaattctctcctcttgactttccaaaatgctggaattataggcataagccgctgtgcctatatatcttaaaagtcatatcttgtatattaaaagtcacacacacacatatagatacatttcccatacatatatacatatatatgtgtgtgacttttaatatacaagatatgacttttaatgcatatactatgtattaaacttatatacatatatatacacatacatatatacatatagaaacaggtggtctgacttttatgtttattgagggaaacatggattttttaaaaaacattgagaaacactgccttaaaatctcactacacatctggaccatctgtttcccttctcttgatctatctgtctttgaaaaggatactatggatatattcacgccagaaggaatgagagagagaacaatactttccaaggaccattagcatcaatcatcaggtaagggttttacacatatcatctctcagctgttcttcacaactatctggggaagtattatcagcgcactttataattgaggagacagagattgctctagaaatgcaatgggataggagagctaccaacttccatttggcctgaaaggcacaaagatataaaaaaatactgaccctgctgttcagggtcttagcctcagagcactccttgcccaggctgttcaccatcctcagttgctcccaagctgggagctgcttgccctccagtgcatagtgtgtgtcggaagccactggttgtcctgaggagttaaggtggctctgtctgtggcagcacctcactgcagagacctccaggcccaggactgagtgtctgtttggtctagaaaacccgaactcccctagtcttctctggccctgtaacttgcagataattaggattaataccacaaataataagagctgggatgtactggtgcctgccatgaccagagcctgaatcaagctctttatattaggatcccattttctcctgcaacagccctgtgaattttgcctgactttaaaaaaaaatagagatgggatcttgccatgttgcccaggctggtcttgaactcctgggctcaaacgatcctcccactttttggcctcctaaagtgctgggattacatgcgtgaggcacagcacctggccattactgcctttttacagaagagtaactgaggctagcagcagcccaatgtcatgctgctggcagaagtatcagcttgctccttcttgtgcttggtttccaattcatgtttttagccattaggccagcatttcccaaagaataggctacacggaccaacctcatcggaagctcattttaaatgggtagagccctgggtcacatctaacacccgctgagctagaatctctggagctgaagctggaaacctgaacttcaatcagatttccctggtgattcttatgtacatcaaaatttaagaaccactggaatatgatcgagggaaatcttccagctgcaaattcatgcttgccatgcaggggcacctcatagccactagatttaaacttaaggattagtgtgcagatacttgccaccagatcactttcataattgaggcagaaatcaccaaccattgctgtcatctctacagggtttccttggagtaaaactggtctgttgcactgctgtacttcatatttaccaccaggcggcatgagctcctagtaaagcaacattcttggaacagcctctcaggctgaaacagccatgcccagaggcaaaaatcaggcaaaccagaaccacccactgaatacgcattagtgaaattttagctccttgtgagccactcaactgcagtgcctaagcaccctcctcccagtcatctatcagtaattcatcccctgactccatgagatgcccagtgacttaataaagggctgggctttgcacaggtggctgagtccccttcatgagcgtcacaccaatctccagaggagacaaaaccagcaacatacaggtttggcagccttctgaatcctcttctctcctctaacaatagcaaaccagactctcaaaggaggggaacatccttctatgactataaaattttcctatgacaggcttttgcaactctggaggacagcatgggtttctaatgacattaattcacatcatgctgccattactgtgagcagatgtgtgggaagaggcattatttacttaaaaataatcctctgttgtcttgggaggccgaggcagacagatcacctgaggtcaggagttcaagaccagcctggccaacatggtgaaaccccatctctactaaaaatacataattagccaagcgtggtggcacgcacctgtaatcccagctactcaggcatctgaggcaggagaattgcttgaaacccagggacaggggttgcagtgagccaagatcgcatcattgtactccaatctgggcaaaaaggagtggaactccgcctcaaaataataataataataataataataataatcctctgttgttaatgtggtatcatttgtgtagctaggaaattctctttagaagaatttctaacagaacagcttggagaagaacgtctgactgtagttagggaggaggctgtctggaccaacacacacttgcaggcaaccagaagccattgctgcagcgcagctcagtttattcagaaagagacagccaaaaaaaaaaaaaaaaaagagagagggagagaaaatggggcagcctgagatagggttcttccttttcagagtatgaagtaatgtttattcctgggagagcagagtcaacttaagtaatgtctgaagagcactatgagctaggacagagagcagtgtcaaggaaatagaactaggcaaggttctgcctggatggaacctgcagccaagtgaggaagatgggcactaaataagcagttgggtacattgtcaggggttcaaaagaagaattatatggggtactggcttttatagccatgggctctaacttgagccaggagctcaggagaggctgcctccctgagaagatagtgcttaagcagaagcttaaagggtaagaattgagtagacaaaaaaaagggctgggggctagaaggggttaaggtttgggaaggggaagtaggacctgcatgggatgtgttccaagcagaggcccagagatgtaaaagtgctgcatacctgggaaaaagagaaccccaaagaactggaccacacacacaagtgtgaccatgacttcactacaattttccaaagtaatattcataacattttttctatgaaaaaatcagacaccaatttcaagcaatggaagcaatgttgcatgagaagtatggcatctctggaccatctgcttttcctgagcatttcacctttcaggttaaattattgcttttcctgagcatttcacctttcaggttaaattattcatctcacatctgggaaatgaacatgcaaacattgccacctctcagtctaatttactcatggaggctgtagctctcccagaatgtcctccttagagcaatttctagccccttcttggctaaagggaataaaaatgattactatttgtctgggtttgaaacaatgctatcctcaaggaaaactgatgatggaacaggcttccgtatcgtgaggttaatgacagttttccagaggcctaaaattcaggggtccttaagcagatttccttatccttggagaaaagtatgtggtattgcagacacaccacatcaaaaggtgttctttttatactcttcttagttcttgccttctgtttctttccctgcacatttagttttgagccttagtcctctgtcccttcattgaatcaattatttttcttcctttaagacctctctgcatatgccataacctgaaattccctacaaaatgacctaaaatcatgtaacttcaggccttcctttaaaaaaaaaaatgacatcacctactcaggcaaaaatatattaaacaagtaaattctatttttcaaatttaacatgagctcttgctcttaagacttaaaaaagtccgtgatttcagagagatgcctcaacatagtattcttccttatgaatgcttaaaccactgactttgatggaaagcaagagtagtattctaaagtgccatgactagtgccttttgttggttgctctctctttgtatttctaatcctacccagctgaaacagctgacctgactatccttgataaaaataaattctccctctaaacatggtgctagtgaccttgataaagagtcaggactggtgtcccacaacactaagagagtgattggagtgagtgaattctggaggcctcagacatcttcatcatcaactttattttactactgaaatttgactttagaggaattaagctgatcacatattgctctgtcaaaaggagaatgagatgctactttacatttactaggatggctgtaataggatgtagagaaatcagatactttatatgttgctgttcggaatataacatggtacagctgttgtgaaaaacagtttggaggtctctcaaaaacctaagcctagagttaccgataaccctgcaattccacttctaggtgtagatccaaaagaattgaaacaggtactcaaacaaatgcatgtacatgcatgtttatagcactactactcacaataaccaaaaggaaatgtctttttggttattgtgcccattaatggatgaataaacaaaatgtcatcaatatccatcaatggatgtccatcaatgtccatcaacggatgaataaacaaaatgtggtatatacataaatttatatacataattcatccataaagatgaataaaggactgatacatactacaacatggataaaccttcaaaatgatacgttaagtgaaagaagccagacacaacagctcacatattgtacaattctacttgtatgaaatatccaaaatagatagatccatatagaatgcagattgacagttgctaggagctgggggggagagggagggaaggggagcaactgcttagtgggtgatatggtttggctgtgtccccacccaaatctcatcttgaattgtagctcccataattcccacatgttgtgggagggacccaatgggagataattgaatcatgggggtggttcccccatattgttctcgtggtagtaagtctcacgagacctgatgctttataaggggaaaccgctttcacttggctctcattctctcttttctgctgccctgtaaaacacgcctttcgtcttccatcatgattgtgagacctccccagccaagtggaactgtgagtccattaaacctctttttctttataaattacccagtctcaggtatgtctttatcagcagggtgaaaacagactagtacagtggacaagggattttactctggagtgacagaaatcttttggaactagatagggacggtggttgcacaacactga

SEQ ID NO: 5759 - DNA, 13682 bp, Homo sapiens
acgagggttggggaacaggtggttagcacttcatcctcgtctccctcccaggttagaagggcccccctctctgaagacccccactccctgggatgctacaatccaatgatggaagatggcattagctacaccaccctgcgctttcccgagatgaacataccacgaactgggtactgagggtaccaggagggtgaccctgcaccctgggagggaggcgggaggaaaagctctgtcccgcctgccctctttgtgccaggcccatgccaggcaccctgatacatgctctgcctcattcccactcggcaacaagcctctgggtaagggccagtctccagaagtggacctgctccttcaagtcagcagcacacatgcccagtccgttcttatcacaaagatcaagagctcgtgatacacacccacgcctactccctccacgcacatttgcacgagctcctactgtgagctttgggcactggggaggccacaggttttacataaggggctgaggttggggtgctgttgggggctctgggtgttgagagggaggagagttcgtgggagatgcttcatgcgtggtcgtctatctgccctgtctctcagagatgcagagtcctcagagatgcagagacctcccccggactgcgatgacacggtcacttattcagcattgcacaagcgccaagtggtaaggagggtctccccaggtctccccagaggggctgtggaaggctggggacagggcctggcctcagtggtgggtcccacataggaaggagttgggtaggcatccgtggtggcagaggttgggtgttggagacggttgctccggcagagctggccagagccaggcaggtacctccaggtcctggatgccggccacagccagtttcctgacacgaggacacccgcctgggcttttggacccccgggtggaatgaaggagagaatgcggagaaaagcggcggtggaggctggcgacagtggggccaggctaaccaccatgcggttttctcagggcgactatgagaacgtcattccagattttccagaagatgaggggattcattactcagagctgatccagtttggggtcggggagcggcctcaggcacaagaaaatgtggactatgtgatcctcaaacattgacactggatgggctgcagcagaggcactgggggcagcgggggccagggaagtccccgagtttccccagacaccgccacatggcttcctcctgcgcgcatgtgcgcacacacacacacacacgcacacacacacacacacactcactgcggagaaccttgtgcctggctcagagccagtctttttggtgagggtaaccccaaacctccaaaactcctgcccctgttctcttccactctccttgctacccagaaatccatctaaatacctgccctgacatgcacacctccccctgcccccaccacggccactggccatctccacccccagctgcttgtgtccctcctgggatctgctcgtcatcatttttccttcccttctccatctctctggccctctacccctgatctgacatccccactcacgaatattatgcccagtttctgcctctgagggaaagcccagaaaaggacagaaacgaagtagaaaggggcccagtcctggcctggcttctcctttggaagtgaggcattgcacggggagacgtacgtatcagcggccccttgactctggggactccgggtttgagatggacacactggtgtggattaacctgccagggagacagagctcacaataaaaatggctcagatgccacttcaaagaaccagtgaactcttttcagtctgtggagtcagagtggggatgaggagaggggaaagtcttcatggggcctggggggaaggaaatggagtcacagtggtttactgatcaaaccagcagattagagagtctggtgtcttgttaggaaaagcatactggctttgcagacagacaaacatgagaacttgaatcttgattcttcggcttaactagcccggtgatcttggcagggctcgccagcttgcctgagtctcggcttctccatctgtaaagtggagagggaaaggccactgcctaccacgcaggtggcccacgataggaagtgaggcatcgtcttctatatgctggagccacattgagacccagcacagaagccgaaagtcccccagaaaaccaacctccatcctttatttgcatttttcgaagaatgtgaaaaggggaagccgattcaaaacagctcttcccaaaagtgacgctacccaattcttgcacaacccatagctgccagagaaagtcttgaagaccagccaccctgagaaacctcacagcttttctgtcattcgaggtcctctgcacccgttctctaattctgttcactgattcagactttccagttaggtgccccagctcccctctccgcttctcgggtttgatctttctccacccattcacctgcttctgcaaaggggctaaagcccattctccttagagggcaggggtgtaattatctgatcatcagggagattggctcctggcacgtggcaggtgtccccaaactgccaccttcctctcccaccttcctttccctcccatctctgctcagtacccggacggtaactctaggaattatggttcagggaggccttgatcgccccatcaatccactttgtccctggtttgattctcgtgagcaccattaacttttctggaggaaggtgaggctttaagaactgtttaaagcccaggcgtggtggatcacgcctgtaatcacagcactctgggaggccaaggtgggcagatcacctgaggtcaggagttcaagaccagcctagccaacatggtaaaatcctgtctctaccaaaaatacaaaaattagctgagcgtggtgattcacacctgtaatctcagctacttgggaggctgaggcaggagagtcgcttgaacctgggaggcggaggtagcggtgagccgagatcacgccactgcactccagcctatgcaacagagtgagactccgcctcaaaacaacaacaacaaaaactgtttaaatgagacaggagggtgttggggtgtctgtgcccaaaatggggtctggtgtcattcaactctttcttcattcattctgcacacagatactgagcacctggaaatgcacccagtacagagccagttgttaggacaccaaaaagataaggcgtaggaccaaccttggggatctctagtcgagagccgccaagggtttttaaggcaagataccctggagggagctgaggcagtcctaagcctgaagggcctggcttaagctccctggcaaccatcgagcatcttccccttcccaccctgtccctcagcacagctgctgacataaacctactacatggctgattgaccatgagatatggccatcaatagacattgctgaggcgtgaagagcaggtgaagagcaggtggccaggaagctagggggccaggactccagacgcaggccgccctccacaaccccagctctcacagtcctcccagggtccagacaatggatcgtgcatttaggttcccaaacacctgctgtgcaacgtgtagtagacaaagcagaccaaagcctttgccctcaggaggccggcattctagctcaggagccagccaagacgatgtcgcactgaagaaagacaacaaaagtgagattcacaggagggatgagtgtggctgaggcacccgggaaggccctcggagaaggtgaccttgggcaaagatccagacgccaggtgggtggggccaaagcagagaagatctggaaaacccaatggctccccagggcttcgctcttgctgcaggaggggaaaccacactgctgtggattcttcctccattctgtccatttctcagttcccaacaacacactgaacagtaggaggccagttctccgctcacagcgggcgctgcaccccaggtgctgctctcgagaaaaaggcgagcatggaccaatttagtggctccgaggtatgaaaagcagtgagatggtgtctttgagggagttagtgataggctgagacccccttgctgtcccccctgaagcctggtgaccagagctgccaggaggccacacagagagaggtttatgatgggggacctggaattcggaaggggcagagtggtcaggtgacccatacacgcctgagaaaactgatgtggagagctgtgttgtcattctgaggcaggaaatagagacagactgacagacagacagaaagacacgggcacattgagagacagagacagaatcacagagcagagctggcttctcaccagcaggcgtgggcacacctgagagagcatccagagaggttagaaatcttccttaggtcctcctgggaggctcaggtgaccccagtgggaaacatgaaaggctgggaggacttccagggctgagagaaggaagctacgcagccggccggtgccacattccctgtgccttggggagtgtcccccagtgtccccagccatgcaccctggggggagtcggcttggacatctgtgccaccccttgacaggcagagtgggggccacaacctgggccctccagtgctggtcagcagaggctgcccccgccccttgccttcctcctcccgctccttcctccagccctgggaaggtcggaagccaccaccatggggctagtgcggaagcagagggagaacagaggggccctcctcgcaaaaactaaaacaagcccacagcctgtgcagaaccgcacccgggtgtgatcactccttaccccacacacccactgccacttggagatggcttcatggctgcagtcacagggcaccctgtgttgtcaggggtgagccagtgaggcccgggacctgcccaggggtgcatcaagggtggagaagacctggccccagcgcaggtgtgaacaggcaggagggctggggagggaatagcgctgggttgtggccgagcccccaagccctgctcttgagaggcactggctacacactcggcccctacccagacaggaccccaattcctccctggcccctctgtgttcctgcatcttcccagcccctcacctcctctggcgtggcctcacctccagccgggatgccccattagctgctcacccaagctgctagaacctcaggctaatggccctgtcacccgccctcctccccttccggctcactgcccatcccgggcatcctccatcagcccgctgaggggactgctgagcctcagagacatctggcagcaccaggaggtgggtccctctctctgtggctcctctcttcacctgactgttccccagacccccagaccccctgcccaggtggcccctgagaactgctaagctcaaccgtgacatggatggggcccagctgacccttgggctctccctgggggacccccttttcctgtccctggccacaccctcaccttatccacacccttctcctccctgctgccccgccggctttccaatgtgggtggggggtgggggcagctcctgccttgccagggaaccagggagggcagtgggctcaggagtcaaactcccattcccagggaaggctcaggctgtgggcccagccctgttctgaattctctccacccctcctccccacagagtctcagaaatcgagaagctttcttcctctgggacctgtgcgccacatcctatctcctgtgacgctgcaggagcttccctggttttaagaggtgacatggtggagagaaagcacaggactgggggccacaggtcctggcttctcatccaggctccgctgctccctgactgctgcctttctctgtgggcctcgtttcctccctgatcccaccaggtgaattgtaattctccacacagggctggaacccgcgagtgatcccaggagcccctcctctccggggccccaagatctgaggacagggagccaggttgcacacaggagccgtgcaggccaggacggcggccccatggacctgcccccgcagctctccttcggcctctatgtggccgcctttgcgctgggcttcccgctcaacgtcctggccatccgaggcgcgacggcccacgcccggctccgtctcacccctagcctggtctacgccctgaacctgggctgctccgacctgctgctgacagtctctctgcccctgaaggcggtggaggcgctagcctccggggcctggcctctgccggcctcgctgtgccccgtcttcgcggtggcccacttcttcccactctatgccggcgggggcttcctggccgccctgagtgcaggccgctacctgggagcagccttccccttgggctaccaagccttccggaggccgtgctattcctggggggtgtgcgcggccatctgggccctcgtcctgtgtcacctgggtctggtctttgggttggaggctccaggaggctggctggaccacagcaacacctccctgggcatcaacacaccggtcaacggctctccsgtctgcctggaggcctgggacccggcctctgccggcccggcccgcttcagcctctctctcctgctcttttttctgcccttggccatcacagccttctgctacgtgggctgcctccgggcactggcccrctccggcctgacgcacaggcggaagctgcgggccgcctgggtggccggcggggccctcctcacgctgctgctctgcgtaggaccctacaacgcctccaacgtggccagcttcctgtaccccaatctaggaggctcctggcggaagctggggctcatcacgggtgcctggagtgtggtgcttaatccgctggtgaccggttacttgggaaggggtcctggcctgaagacagtgtgtgcggcaagaacgcaagggggcaagtcccagaagtaacgccactgctcggrggaaggagcatggggcaggagggcccggctgcttctccaggcccctgcggggggctgcttcggaggaactgcagggcagcctggcccggaggcctccctggagccactcaagcagagagcggcgcctgctgagggcagcaccccagtcaagagaggagcaccgagccagagcacggtggcagggggaggtaagtttgcccctgcacgtgtcgaggaagtttgtcccttcctcgcctatctttctctcccctctgcacgtcctcacctgcctgtcttccgtgggccgcgagcagaggccttgtacttacgggaaggaggaggcagtctgtttctgacycacaggaactgccactccggtgatgcacttgaggacagctactctgaaatcagttcccaggagagaacatttgatttccgagtaggagaggaggcaggaggcaggataatgacgctgttataccatgtgaaactcgcaagggggcagccttggagcttggaacggaggctggcaggaaaagatgcttcagccggggagggaaaatgcaaggtcccgcagtgatgggcaaaggctacggagttgactcttgaacaacgtggggatggggtgccgaacccccacgcagtggaaaatctgtgcatgactttgactcccccaaagttcaactactaatagcctactgttgaccaaaagctttacccagtatataaacaattgagtaagacatatttgaagccaggcacagtggcttatgcctgtaatcccagcactttaggaggccgaggcgggaagactgctcgaagccaggagttcaagagcagcctgggcaagatagtgagacccccacctctacaaataataaaaataaaaataattagctgggcgtggtggtgcgtgcctgtagtcccagctactcaggggtctgaggtgggaggatcccttgagcccaggattgaggctgcaatgccatgatcgcaccactgcactccagcctgggtgacagagcaagatcctgtctctggaaaaaaaagaaaaaagacatattttgtatgttatatatattatgtgctgtattcttacaataaagtaagctagagaaaagtacatgttactgaaaacattattagaaagagaaaataccttcacagcactgtgctgtatttatcaatactgtaagttttgttgtctgtttataagagaagttgtctgtctcaagcggcagtaaccgcggctgcagatctcaatctgtggtagatatcaagcagttcaacccttttttataatgtcatgacttttctttgcttcttggaagcagctctggcatcactagtggccccgcatttggggccaagggggttattcaaagtttacggtattgcattaaacatggtgaaacatatgcaatgactatgaaagatcactttttacttctgtacacagtgtactggcgagaactgctcaccaggaggtgattagcttcacgtggtgttggaagcagatactcaacagttgagctcacggagaaagcacaggaggtggctacgaaattattataggagtacagtatgtctacagtaaatatgcacttatgactttaatactgcacatctttatgtttgcttgcatttctcttgacttcaaatggcatcaaatagagtttgtgtttgcgtgcatatatttttgataaattttaacttttttgttttgttttgtttttagacagagtcttgctctgtctcccaggctggagtgcaatggtgtgatcttggctcactgcaacctccgcctcccaggttcaagcaattctcctgcctcagcctcccaagtggctgggattacaggcacctaccaccacacctggctaattttttgtattgtaagtagagatggggtttcgccatgttggccaggcctgtctcgaacccctgacctcagttgacccacccgcttcggcctcccaaagtgctgggattacaggcttgaaccacggtaccctgccaattttaactttctataagagatttgcccagcctgggcaacatggagaaaccctgtctttaccaaaaatacaaaaaatttagctgggcatggtggcgtgtgcctgtagtcccaggtacttgggaggctgaggtggaaggatggtttcagcctgggacgcagaggttgcagtgagccgagatcatgtcattgcactccagcctgggtaatagagccagatcctgtctcaaaaaaaaaaaaaaaaaaagctttgtatccattttggcatacatagactagtatgtgtggcagtaaatagactagtggcagtaaatagactagtacctacatatattttttgtattcgtggcatacttaacttttgcttaatttttaaaatatatttctaggcttgtagttcctctgtaagttttttcaaattgttgcaaatctctgaaaatgtttccaatgtatttattgaaaaaaatccacaagtaagtggacctgcacagttcaaacctgtgctattcaaaggtcaactatatagtctgtaatacgtgatgggtgtcacgctgagtgtctacagtgagtgttgtctcacttcagcttcacacaacgctgtggtttagccttgccactgccgtacggatgagcgggtgttcactacacgaaggtactgggcagaggagcaaacactgactaaattctagcctgtgctttgctcaacaagccacatgcctgccttgcttgcatcaagggaaggagtattgtgttctaatttgaagaaatacaccagccactccttaggcagcacttggtgcgggatgggctcctctggaaagggagcacctaatttgcacaaaggtgctgcaccaggtagctacgatcctggaatgggatgaagaaacttgcctaaggccctacagcaaggaaggggtaaaagcaggatgtgatccttccaagcagaacccccaagagccaggggacatttgggaaacctgggggtgtgggggttaaccctgtatttgtggtccatttcgcaaaggatagcatcccacatccatgagagggaggtcagaagggagtggctgtggctgtgaaggagacagacacctgggcacctgctctaaattacagcaatgccatgcacatgatgatgtattggagcacaacaaatggcagccaccagctggggtgcacgcaccaatttctacaaatgagctctgttcaggctgaaatgtctacgcatgcaaggatttttcttgtaattgatgatatatccccagcgcccagaagacagagtggcacgcagtaggtgctcagtaaatgttcgctcaatgaatgaatgaatgcctctactagccttccaaagaaagttctatgtctgttttatcaatatggaaacaggccagagaaattaagtaacttcttttggaagccagaaacaagcccggcacttgtgcagtgacaacaccagggaatttcagtaaaaacccaaactccaccccagggagccccagtgcctcctcccgcatcacagggtgccagggcccactctctttgactcctgctccatagcccctgctgggtactgggctgcttctcccagttcctcctgcctccccccacttagggcaaatccagtgcctccctggggcccaggagactcagtgtgatccaccccaggcgcctctcactcctgtgagacccaaacctcctatcagctcccccagcaggccaagtctgtgcacccgtgactcccctgccccagtgttccctccagtggctctttgcctcttcagtatccacgtcttcatgatccttcccctactccatcccccaagccctcaccaccaaatgtaatgtaaacagcatgacagcaaaaactttttgttcacaactgcgtgttgttttttttttttttttttttttttagacacagtctcactctgttgctcaggatggagtgcagtgacacagtcatggctcactgcagccttgaattcctgggctcaagcgattcttccatttcagcttcccaagtagctgggaccagaggcacatgccactaaacccagctaatttcttttttctttctctcttttttttttttttttcccctgtggacatagggtctcctcatgttgcccaggctagtctcaaacaacctgtgctcaagcaatcctcccacctcagcctgccaaagtgctaaaattacggacctgagccaccgtacccagcctactgctgcacttttaacagcttaattgagatattatgtacatatcatcaaattcaccaatgttaagtgtacaattcaatgatttttagtaaatttactgaggtgtgagtccattaccatcagctagttttagaacattttcatgaccctagtaaaggattttacttcatgttcatttaaacttaatcttgggccaggcggggtggctcacgcctataatctcagcattttgggaggctggggtggacggatcacctgaggtcagtagttcgagaccagcctggccaacatggcgaaacctcatctctactaaacatacaaaaattagccaggcgtggtggcgggcacctgtaatcctagctacttaggaagctgaggcatgagaatttcttgaacccgggaggcagagtttgcagtgagccaagattgcaccattgcactccagcctgggcgacaacaagaccctgtctcaaaaaaaaaaaaaaaaaaaaaaaaacaacttaatcttcatttctacctccatcccccagacaaccacgagtctactttctgactctataactttgcctattctggacatatcatataaataaatgaaatctgacaatatatgtacatggtcttttacgtctggcttgtttcactcaacataaggctgtagtgtgtatgggtagctcattccttttctttgccaaatagaattccagtatatggatgtgccacttttttattcactcaccagctgatgggctgccaggtaacatttccactgttggtgactatgaccaacactgctgtgaacatttaggactgagtctttaagtagacctgagtttccacttctcttaagtaaatacctacggtggaattgttggatcgcatggtgaatttatgtttaactttttaagcaactgccacctgctttccaaagcagggacaccacctcccattattctcaccagcagtgaatgaggcccctatctctctacattctcgccgaccataggcattgtctgactttttgcttgtggccattctagtggatgtgaaatcatatctcattgtgccctgtgattgtttgaatgaactaatagatcacctgtgaaactggacagcacttgggtttgaaccctagtggtgacatttcacaagctgtatcacctggagcaagtcacttccctacggtgaaggacaaggattttatgacataaaagcgttgccctagaagcagtgtctgctatggattatgtgcccatgaaaaggcagctgctgtcatcatcgccaccaccattattattgttattattattacattgtcaccccagagataatcctgcaccagtgacagggaaaatagcagctggcatccgctgcctgctcacgaccacacgccaggcttccgtcaaaccactcaacatgtattagtaatcttttaatcgacctacatattgttttaatttgcatgtgttaatgcgttgatctatgagatgggtattatgatgagctctgttctgcaggggagaaagcagaaacatggagaatttaagtcatttcccccaaatcacaaagtcaggaagaaacagacctcacggagctcgctctctgtcattgcatcacacttcctgcccttacaaggcaaattggataaatgccattctagagaagcagacaaaattcaagtgaagaaggggagaggaagacgtcggctggggcctgcttagagcatcccagctgagactgcatgaggagggaggcacgcagttgtggaatttgttccccttttagcatgctgaccagccctggcaacggagctcaaggcatctatgtgccactgctcaacagtgagtgacgtcatgggcacggccaggtctttatcagttctgccggataaatagccaactgcactaggtctggagagacagcaaggtgctgtgcggcagagcatttggggtctcaaagaagcaggtgagcctgggcccgaggggctgggtggaggagcaccttggtgcttctctgctggggaagggacaggggacagggcatgctcaggaagacaggcaggctgaccccgcctggaaggcacccagagacaagaggggtgggcgtagtgacctcgtgcccttttaggggagatgctgctggccagaggccgttagggcccccactaccaactccatgttactctctctcaccagtggccaccaccatggatacaggccccgaccagtcctacttctccggcaatcactggttcgtcttctcggtgtaccttctcactttcctggtggggctccccctcaacctgctggccctggtggtcttcgtgggcaagctgcagcgccgcccggtggccgtggacgtgctcctgctcaacctgaccgcctcggacctgctcctgctgctgttcctgcctttccgcatggtggaggcagccaatggcatgcactggcccctgcccttcatcctctgcccactctctggattcatcttcttcaccaccatctatctcaccgccctcttcctggcagctgtgagcattgaacgctt

SEQ ID NO: 5760 - DNA, 50529 bp, Homo sapiens
  misc_feature (1)...(50529): n = A,T,C or G, or insertion/deletion polymorphism (see Tables 1-2)
gagcgagactctgtctcaaataataataataataatattccatattctattgtatggatagaccacattttgtgtatccattcaccagctgacggatatttggattgtttcttctttttagctattatgaataatgttgctaaggagatttgtgtacaagtgtttgtgtggacatatgttttcagttttcttgggtataaacctaggagtggaattactgggtcatgcggtaactctacacttaactttttgtggaactgccaattttccaaagtggctgcaccattttactaaaggctaaatttttttttttttgagatggagtctcactctgtcgcccaggctggagtgcggtggtgcgatctcagctcactgcaaactccgcctcctgggttcacgccattctcgcgcctcagcctcccaagtagctgggactacaggtgcccgccaccatgccaggctaattttttgtatttttagtacagatggggtttcaccgtgttagccaggatggtctcgatctcctgacctcgtgatctgcctgtctcagcctcccaaagtgctgggattacaggcgtgagccaccgtgcccggccccctaaaggctaaattttaataatcattacaatcttcaggatctgactcttgcttcccatctctttccctgtcttttaccacaagcagtagctccaccagtaaataccactcatagctttctcatgcacaccatgctgtttcttgactctaggcctttatttctgcttcaactgcctggaaaacctgctagcctccactcccttaagacaactcagtggtcacctcttctctaaagcccttctcgtccccattcctgcttcctcaggaaaagataggtgtctcttcctctccacacctatacacatagctattaacaaactttaaatgtcatgacatactggatttcataactatgcttcttcatctgcctcttgcactgggtggaattcttttttccttttttttttttttaaaggcaggatcttgctatgttgcccaggctagaatgtagtggcctgatctcagctcactgccacctccacctgctgggctcaagccatcctcccccctcagcctcctgagtagctggaattacaggcatgtgccatcatgcccagctaatttgttttttgtatttttttagtagagatggggtttcaccactttggccaagctggtcttgaactcctgacctcaagtgatctgctcgcctcggcctcccaaagtgctgggattacaagcatgagccactgctcctggcctcaagagctcattctaatgccatcttttcaacaaataccttttctgatcatccccctcagcaaaaaaaaaaaagaaaaaaaaacctctcatgggactcgctttcattatcatatttaaatttacattttgtttacatacacatctcttctttttttcttttttccagtcttacccctgtataaactggatgaagctgctgccaatttaaccaagtgggaatcccagtgctaattgtctgctggatgggatatctttattggagcagattaacatagcctcaaatttgtggtttgtgaccactgatttagcaaatacattgtttttcttttttctttttctttttcttttgagacagggtcttgctttgttgcctaggctgaagtgcagtgtcacaagctcagctcactgcagcctcgacccccaaggctcaagcaatccttccacccagcctccacagcagctgggactacaggcacatgccaccaacgcctggctaatttttttttttttttttttgtggagacagcatttcaccatgttgcccaggctgatctcgaattcctgggctcagctgatcctctcgcctcaacctcccaaagtgttgggattacaggtgtgagccactgcacctggcgaacatccttttcttttttgtttttttcctttgagacagagtttcgctcttggtgcccaggctggagtacaatggcacgatcttggctcactgcaacctccacctcccgagttcaagcgattctcctgcctcagcctcctgagtaggtgggattacaggcatgtgccaccaggcccagctaattttgtatttttagtagtcagggtttctccatgttggtcaggctggtctcgaactcctgacctcaggtgatccgcccaccttggccccccaaagtgctgggattacaggcctgagccagcatgcccaaccaacattcttttctaaagcatgttggtcagaagcagtccaccacggaggggatgaacaacagtatacagtcatggtctttcatcagggctatgttaattctgttctctgtcacgatgtaatctaaaaaatgtggaccatttgcacattctgcagagtatcacattggtccaccatcttgtaactttacatccttcagacgtctttttttttttttttttcttttttttaaagacagagtctccctctgttgcccaggctgaagtgcatggtgcaatctcagctcactgcaacctctctgtctcccggattcaagcgattctcctgcctcagcctcccgagtagctgggattacaggcacacaccactatacctggctaatttttttgtatttttagtacagacgaggtttcaccatgttggccaggatggtcttgatctcctgacctcgtgatccgcccacctaggccttccaaagtgctgggattacaggtgtgagccaccggacatcttttaagtagaatgaagactacttagaggtaggaaccaaccctaccttggtgatttttgttcctccaaatatctttgcacataataattcaatatttattcaaagaaaacgttatatactgtttcataccacaaacaagattgttctgtccttgaaaacaaaaccttttgtatctttgaatcaggaaatattctataaatgcctattgacctactaatttcctcttccctaacaatcagatactctaccaggatatgtagatatcttcttcagggcaccttgcacttagcagagtcccaaatattttattttctccactctagcaccaccaaatcatgtaaagtatacagccactcacatttcacatcaacctctccattcttatgcatagctccttccagccacccctctgaaaactgactctcctaaacatttccgtaagacccaggatcatgttttcatatatacccatcaatccatttatccaaaacccacttgtaatttaacaagtgctttttatttttattgaagatggggtcttgctatgttcctaaggctggcctccaactcctggtttcaaaggatcctcccacctcagcctgcagagtagctgggattataagtgtgctccaaccaccatgccccgcaacaagtatttattaatctaacttcacttttatggagtttttgttttttaaaatatagagatggggtcttgctatgttgcccaggctggtcttgaactcctggcttcaagcaatcctcatgccttggcctcccaaagtgttgggcttacaggtgtgagccactgcacccagccctaacttcactttttttttttttttttttttgagacagtctcaccccagttgctcaggctggaatgcagtggcatgatctcagctcactgcagcctcaaactcctgggctcaggtgatcttcccacctcagcctcttgtgtagctgggactgcaggcacgcagaaccatgagtagctggaactacaggcatgcagaaccatgcccagctaagttgttttttttttttttttttttgagacagagtcttgctctgttgctcaggctggagtgcagtggcacgatctcggctcactgcaagctccacctcccaggttcaagtgattctcctgcctcagacacctgagtagctgggactacaggcgtccgccaccactcctggctaatttttttgtttgtttgtttttgtattttcagtagagacagggctgtgttagccaggatagtctcgatctcctgagctcgtggtccgcccccctccgcctcccaaggtgctgggattacaggcaggagccaccgcacccagccactttatttttagtagagacggagtttcaccatgtcgcccagaccagtctcaaattcctgtctccaagcaatcctcccacctcagcctcccaaaatgctgggattacatgtgggcaccattctgcccagctgtaatttttaaaaattattattaaaaaagaacaaaacacatagatgccctagactcaactcagctctactgatcaatctttaggggttaggactaggcttttgaaatgttaaaacacccagaaaactgatgaccagtcaggcttagtatcccccatctctaccattcatatggtacttaatgtttcatatttaaatggaaaggacacctcacacttttttgtttttcctatagttcctactcagagaatatgcctaataaatattttatgagagtagtacagaagtatgactccatttttctcttatatttcatttcagtgtggaaggctctttagaaacactattaacataacagcattatgtcaaaaagcgccaataacattctcaccaacttttctttttaaaggcattaggtatagctagactgtaaaaggcaagtggtgtgaagcccaaacctaagatcctaagatctaggatgagtcaagacttcatagtctacatgagtagaggcagcatctagaggaaaacaaaagtatgtggctatcaaattccaaagaagccccattttattacagagaaaatacaaagccgtttcctcacagggaaaagtacagtttcccttctccagggtgacagatgagccttttccgaagttctcagctttctcttctatcgaaacttcccatgtcggttaaagtgtttgtagagatagcggatgcgtttattaaggttgtgcaggtcatcagcgaacattctacttccaaccattttcctctttcggatacaacgttgcaattcattccctttccaacctcgaagccatatgggccccctgatcagttctttggggtgcttttcaaagtttcctgtgtaatgtgagagaacacattagatccaagacaagagaactcatcctacaccagctaagctttcaacccacggttgcatcttgctgagcagcacctatagacaaggcacattacagtacagaacaatagcacagactctggagccagactgcttggggttaaaattctgatgctgccatttattaactctggaaaaattgtttatttttacttatgaagtaaaaattatacgaggggactcagaacagtgccaaacacaatgtaaacagctacataagtgtttgctcttactattgagcacagtaccactctctacacaggaggaaaagatagtcgttacagcctaattgccattctgaaattgtgtaccacgtcgaaggtcaagtcttacccaggatcccgatgttgtcatacactccgaacatggcccttttctcgttccaacgatcaaccactttggggggcgggagagtgagccttataccgatcaatctaggcacacctggggatggggaagggagggaattaatctgagccgcctattatactacgaagcagttatcggggtgcctacatcagccacttaccaagagagaagcttctgcacgccagaggcacccagtcccacaggcgcctacctgccccggataagaggttccctgccatttctctagtctccccccttcaacagcacaccaaataagcccaagaagatgacaggaaccgtccccgccaacttcacacgagtactaaggcgaagacagccatcttgggccttacccaggtagctgtgggcacaccgcccacctacgccccatccgcaacagccacaagccccgccccccgggttccggcaggaggggcctctaccacccttcccgcctcagtgcttccggtccgcctgccggaagttttggagcgccggacaagctgaggtccgcgactcgtcgctaagattccccaaaactgagatttcaagaaaattcaccctttccgctttctttggcgcccttcaaccgtgaaggaaatgaaggttgagaacctggaacccgcttccaatgaccaagccctttctctgtgcctcacaacagtcttgcgctgtagctgtttttattacccctattttactactggggaggagatttgaggtcctgaaagtgaagtgacttgctggacgtcacttagcagaggagatggcgaaacctggattagaggcgatgccttctaactcccagcgtggacttgcctcctttcctgggggtgactgaatgcccagccagggacgcgacgtctctggccagcagaaatacggcctcctccccgccgactgggcaaagggggaccttgcggccaaggagggattcgcaggcgggccgggggtgggagcgggggccggagccggagccttggcccgcccccgggcggcgctgtgattggccggccgctccggcgggcgtcgcgattggccgtcctgcagccgttgagatttgaactcggtatttgtggctttgcccgcgcgttgccagactcagaggcggccctttgcctctgcctgccggggattggccggattctccgccgacttgaaaactgccttgctaattggtgcgtgttgtgcacgcgtgttttttccttttcatttcagcctgactgccggaatcagagccgcgggtgagatccccaggtaagatgtggtgttgcaggtcgtaaaagagtaggaaagtcgagtacatggcagtgtgacccagtcttgggcaaaatacaataggcctagtaggtatatccctggggcgcgatgtgtgagaaactgtaagtctgacagatccgcaacggaagwtgttaagcaaatcgcttaacagatccgcaacggaagatgttaagcaaatcgcttaactttcttacttcaatttccgctctgtaaactcatttgtattattatgcacctcatgggattgaggttaggatacttagatcagatatgatacatgcaaacagcctaacagacttggcacaggataaataaatcatcattgttaatgctcttaccattctggtgcaggaagcccactagcccatgctggggcactgttttggcctcagacgagatcagaccattctctctatacttaaggagctttgcacataaaaatggaaataatagtactttgcacattaatatgccactttatagttctttaaacaccttcgtactgcttgatttgtttgatcatcagagcaactttatgaagtaatcagagtttagtaaccctgtttttacagataaagcccagaggtttaagtgtcaagaccaagtgccaaagtcactactagaattagtttctagtccagggtcaatctcagatcccgtaagataatgttactagcttgctataaaactaaaarccattatatatgttgggggtggggaactaacaaaaccagatgatgttactagcttgctataaaactaaaagccattatatatgttggggatgggaaagtaatagaaccrgatacgaagacaggtcttgaatatagaccctgactttttcactgtttggtttctagccctgtgagcctgtaggagtagaatggctccccaaatgtatgagttccatctgccattatccccagaggagttgttgaaaagtggaggggtgaatcagtatgttgtgcaagaggtactgtccatcaaacatcttccaccacagcttagaggtaagagtccatagctgtcactgkacytagctctttcaaaggaccatctcacatggaattgctacattgtcatttctgttccactacaccaggaagcatcataagagcaagaaacatgtttttcctattttgctgttttatcctaaaattgcatgggatgcatgacccaaagagtacattcattaacttccttttctggattagtcaaaaacagtcttggtgtatgtgattactctttggggaaaagttattttccatctttaccccttactgtgtgtcaaaattaagtcctggtggatttaagagttataggagtggatcgctttttcagaatgtctcggacttaactcgacctgtttttggtaatacctttttggagtctttttggatgtgcaattatggggacaaaaacccataatatatatgtaccactgcaacactgagcaatatatgtacagtgcagtcacctactgaaacctgtaaatgatcaaaagcaccttttgcattaccagaaagacttcataatgtccttgtacttgttgggagcggtcttgtagcagttagcttgctttggagaggtatagagattaaagactggagccaggctgcctggatttgaatcctggttctaccactctgaccttagacaagttacttaattgtctcagtgccttggtttcgtcatctgtaaatatagagataataaccaattcatttgttatcacctacaagaagaagggttggttaatgcagcagctcgacaatatggtcctagcttgtctcctcttggcttttctttcatggttgctagatcgcaacttctttttgtttttcttttttttttttttttgagacagggtctcactctgttgcccagactggagtgcagtgatgcgatatcggctcaccacaacctctgcctccccaggctcaagcgattctcctgcttcagcctcccaagtagctaggattacaggtgcacgccactaccgcctggctaatttttgtatttttagtagagacgggatttcaccatgttggccaggctggtcttgaactcctgacctcacatgatccacccaccttggcctcccaaagtgttaggattataggcgtgagccactgcaccagtctagatggcagcttcttgctctaatgtccagaagtggaaaaaggaattttctttttgtactttttattctttattttattttgaaagacaaggtaaagactctcttgcccaggctggagtccagtggcatgaacacggctcactgcagcctcaacttcccagactcaagcaatcctctcacctcagcctcccaagcagctgggatcacagacatgcaccaccatacctggctaatttttaaattttctgtagaaacagtgtctccctatgttgcccaggctggtctcgaacttctgggctcaagcagtcttcccgcctcagcctcccaaagtgctgggattgcaggctggaatgcagtggcctgatcacagctcactgcagcctcaatctaccaggctcaagcagtcctcccacctcagcctcccaagtagctgggaccacagacatgtaccaaagtgctgggattgtaggcatgaggcaccatgctcrgccagacttttttgttaaaaactaaaacacctacacacattagcctaggcctacacagggtcaaggtcaccaagaagtcactagacgatgggaatttttcagctgtattatatttttatgacaccactgtcgcatatgtggtctattgtttaccaaaatgttacagggcacaggactgtacaggtaagagaaatagaattacccagactggtttaactgatcaagcttattacctaggagcctccctaaacttgagcatatcaaccatttggtaagcaaggaagaaggcagagtgtggaggttgcctaatggatggcaaaccaacagtgtccacaggtatactattctgtccatatcatgtggatatatgtgtcaccaattgaacatgctgcatactatgacaaactactcttcacttattataatgatgcatcatttttttaaatggtcaccttttttttttttaagttctggagtacacgtacaggatgtgcaagtttgttacataggtaaacgtgctgtgttggtttgctgcacctatcaacccatcacctgggtattaagcccagcatgtattagctatttttttcttatgctccccctccccccattccaccctctaacaggctccattgtgttgttcccctccctgtgtccatgtgatctcattgttcagctcccacttgtaagtaagaacatgcagtgtttggttttctgttcttgcattagtttgctgagtccctgcaaaggacatgatcttgttcctgtcacttttttgttgttgttgttgttgttgagactgagtctcccttctgtcacccaggctggagtgcagtggcgcaatctcagctcactgcagcctccgcctcccgagttcaagtgattctcctacctcagcctcctaagtagctgggattacaggcaatgccaccacgcccggctaatttttgtatttttagttgagacagggtttcaccatgttggtcaggctggtctccaactcctgacctcatgatccacccgcctcgacctcccaaagtgctgggattacaggcgtgagccaccgcgcccagccacttttttttttttttaaagagtcttttgttttttggagacaaggtctcattttgttgcccaggctggagtgcagtggctccatcccagctcactgcaacctctcgggctcagccgcccgagtagctgggactacaggcatgtgccaacatgcactgctaattttgtgttatttgtagcaacgaggttttgccatgttgcccaggctggtctcaaactcccgagctcaagcgatctgcccacctcagcctcccaaagtgctgagattacaggtgtgagccactgcacccagccaagagtcctttttaaaacaattgcattgctttgatgattttggtgtttagaatcctgaatacaacttctcctataaataagatcaaatcatttaattcatttaacaagtatttactgatcatgtgctgtgtgccagacattgttctaagcattgataatacaacagtaaacaaaacagacaaaatgacaaagttcttcctttcaaggttcttaacaagtaataaacaagtaaatatgtagtacagtaggacccttatcccaggagatatattccaagacccttattagatgcctgaaactggaatagtaccaacccctgtatatactatggttttttccctctacctgcctacctatggtaatgtttaatttacaaattagatacagtaagagattaacaacaattctttttttttttgagacggagtcttgctctgtcaccgggctggagtgcagtgctgtgatctcagctcactgcaacctccgcctcccaggttcaagagattcccctgcctcagcctccygagtagccggaactacaggcgtgagccaccgcacccagctaattttttgtattttagtagagacgggtttcaccatgttggccaggatggtctcgatctcctgaccttggatctgcccacctcggcctcccaaagtgctgggattacaggtgtgagccactgcgcctggcctgtttaacaataatattaataaaatagagcaattgtaactatgccagcatcactacccttgcactttggggccattattaagtaaaataaaggttccttgaacagaagccctgcaacagttgatctgataaccaaggtggctactaatgggtgagtagggttgcatatacagtgtggatatgttggacaaagggatggttcacatcccaggcaggaggcggcagggcagcaccagattttatgctactcagaatgacacacaacctacaatttatgaattgtgtatctctggaatatttctttctttctttctttttatttttttaagataagggtcttgctttgttgaccaggctggagtgcagtggctcaatctcagcccactgcaaccttcacctcctgggctcaagcaattctcctgcctcagtttcccaagcagctgggactacaggtaagtgccaccacgcctggctaattcttggggggtttttttgttgttctggagacggagttttgctctgtcgcccaggttggagtgcagtggcaaggtatcggctcactgcaccctccacctcacaggttcaagcaattctcctgcttcagcctcccaagtggctggaattacaggtgcccaccaccacatccagctaattttttttgtattttttagtagagctggggtttcaccatgttggccaggctggtctcaaactcctgacctcaggtgatctgcccaacttggcctcccaaagttctgggattataggcgtgagctactgtgcccagcctatttctggaatatttcatttaatattttcagacttgagattgaccacgggtaactgaaaccccagaaagtgagaacacagattggtgaggaccactgtgtgtaagatggttgtaagagccaaagagaaaaataaagaagacagtgtggccaggcgcagtggctcacacctgtaatcctagcactttgggaagccaaggtggttggattgctcaagctcaggggtttgagaccagcctggccaacatggtgaaaccccatctctaccaaaattacaaaaaagttagccaggcgtggtggtgcacacctgtagttccagctacttgggaggctggggtgggagaattgcttgagcccaggaggcaggggctgcagtgagccatgatcatgccactgcactgcaacctggccacagagctagaccctgtttcaaaaaagaaaaaaaaagaagtgtactgggaatggtggcttgtccctgtaatcccaaccacttgggaggcagaagcaggattgttaaggccaggagttcaagaccagcttgggcaacatagtctctaaaattaattatacaaagcttaaaaataaataatataaagaagaagatagtaggacctgtcatttcatgttggatcatcagagaaggcttkctgttacgtcacgtttgagcagagaccttaagaaagtaaggaaataaactatgcagattgttagggaagagcattccaagcaaacagaaaagcctatgcaaaggccttgaggtgggcaaatgccaatagagttggagtgcattaagctaggaaaaagagattaggtaggaagtggtacagattattctagaatcttgctcctcaaaatgtggtcctcagatcagcagtgttaatatcaggatctcatgatctgggagcttattagaaatgcaggatgtcaaggcccaggatgtcaaagctgctgaatcaggaaatctgtattttaagaagattcccccaggcaatttggatgcaattataagcttgagaagcactgatctctagagcctcgtagatcatggcaaaaacttgaacttcagtgtgaatgaacttgaaagccattgggttttgagcatgggagtgacatggtctgacattttaaaagattcactggcgactgtgttgagcagagactataagaggcaaggagagaagcagggatactagttaagtggctaatacagtaataccaagtagattggactggagggatagcaggggaagtggtgataaaacgactcaggatatattttcaaagtagagcttttacaggaatgctgatggattggattggattatagggttagtaaaggaatctgagatgagaatgattacaaggctttttttttttttttttgacagtcttgctctgttggctctgtcacccaggttggcgtgcagtggcgtgatcttggctcgctgcaacctctgcctcccaggttcaagcaattctcatgcctcagccacctgagtatctaggattacaggtgtgcaccaccacgcctggctaattttttttttttttttttttttttttgaggcagagtctcgctctctcgcccaggctggagtgcagtggcaccatctcggttcactgcaagctccgcctcccagggtcacgacacctggctaatttttgtatttttagtagagatgcggttttgccgtgttgtccagtctggtcttgaacttctggcctcaagtgatctgcctgcctcggcctcccaaaatgttgggattacaggcgtgggccaccacacccggccttacaaggctttttgacttgagcaactagaagaatgaagttgccatttactgagatggggtagcatatgggagggagaggtttagattgttggttatgtgagtgcagagttcaagggagaggttgtcagctaaagatacacatttaggatttaatactcagcgtgtagacagcacttaaagccatgagattgcagtgagtgtagatggagaagagcagcagtttgaagaccaagacctgagacagtccagcatttagaggctaggaggatgaagaagaaccagtagaagaaattaagaagcagtcattggggcagaaagcgaatgaaggagctaaatggacgctaaataaagagagtgtttcaaaaacaaaagagaggtcaactgcagattaactactggatttattgatgtcatagtcactggyaaccttgacaaagctgtttcaggagatggtgggggcaaaagcctgctaggaataggtttttaagaaaatggaatgacagagattagagatgatgaatttacataatgtatttcttttaagatgggcagcattatgtgtgtctatattgagtaggaatgatcagagagggaaaagctgatgctgcagaaggaagagggaacagttgttggagcagtgcctttagtaggtaagagagtacgtgatctggtacacggggaggagatggctttatcagaacatggacagtttatccacagtagcaaaaaaaaaaggcagagtgtatgtatgggcatagatgcaactagtgcaggtaaatatagagcttggggcagttgaaagttctcttctgtctgcttctgtttcctcaataggaagggaaagcctttaactgagagtgagtttgggaagaaggtcatggtgttatgagcagaggataggtgtgaaataattgcctagaagaaaacgaatagacttgggagtacgaatgcccacttcaggttagtagtcatgagtttaacgtaagactagtcagcttgtttctgtgtttttctcaggccatttttatttgtgtggtcacatgaatggagtaaccagaaagttgrtttaacctagatttgccaggggagtatgtgttgttgttgttgttaattagtggaataagttacaagtatcacagtatctaacaataggggaatagtaaattaagatagatataaggccgagtgtggtggcactgcctgtagtcccagctactcagaaggctggggcaggaggatcgcttgaacccagaagtttgaggctgcagtaagctatgatcctgcactgcacttcggcctgcgcaacacarcaaaccctgtctcaaaaaaaattgtttacaaaggtgtttttgttgttgttgttgttgttgttgctttttttttgagacggagtctcactctgtcacccaggctggaatacagtggcactatctcggctcactgcaacctcctcagttcaagcaattctcctgcctcagcctcctgagcagctgggattacaggcgcatgccaccacacctggcttttttttttttttttttttgkatttttattagagacggggtttcaccatgttggtcaggctggtctcgaactcctgacctgatgatccacctgcctcagcctacaaagtgttgggattacaggcgtgagccaccacgtctggcctacaaaggtttctaatacacttactgtaatgctaaattttaaaaagcatgacagagaagtgaatatgtgatacaagctcaacaatggaaatacgatgtatagaaaatggactgagaaaaattatgctgttataactgaatgcctgagactggatatttataatgaatagaaatttattggctcacatttttttctggagactgggaagtcccaaatcaatgcaccagtaactggcaagggccttcttgctgcattgtcacagggcagaaggcagaagggcacaagtgaacccactccccagagccctttttataatagtatgaatatatcggtgaggggttgggcacggtggctcacacctgtaatcccagcactttgggaggccgaggcgggcagatcacaaggtcaggagttcgagaccagcctggccaatatggtgaaaccccgtctctactaaaaatacaaaaaattagccgggtgtggtgacgcgtgcctgtaatcccagctactcaggaggctgaggcgggagaatcacttgaacctgggagccggaggttgtagtgasccgagatcgtgccactgcacttcagcctgggtgacagagcgagactccatctattttttttttttttwaaaaaagatggtgaaaccccgtctctactaaaaaatagaaaaattagctaggtgtggtggcaggcacctgtaatcccagctactcgggaggctgaggcactgaattgcttgaacccaggaggcrgaggttgcagtgagctaacatcatgccactgcactccagcctgggcgacagagcgagactccgtctcaaaaatatgtatatatatttgtgagggtggagccctcataacctaaacacctcccattagactccaccttccaacactgtcatgttggggattatatttccaacacatgaattatgaggggcacattcaaaccatacagcrtgctaagtgttgttctgactggtttgcatggactatctcattcagttttgacatatatatatacatatatatatatatakatatatatayayayatatatataccattggtccttgaacaacgtgggggttagggatgacaacccctgtgcagtcaaaaatctgcatatgtaagttttgactgccccaaaacttaaacacttatagcctactgttgaccagaagccttacaagtaacataacagtttttttattttgttttgttttgtttttgacagagtcttgctctgtggcccaggatggagtgtggtggcgcgatctcggctcactgcaacctccacctgctgggttcaagtgattttccggccttagcctcccaagtagctgagactacaggcatgcaatattgcacctggctaattttgtatttttagtagagatggggtttcaccatgttggccaggctggtctcaatctcctgacctcaagtgatctgtccacctcggcctcccaaagtgctgggattacaggtgtgagccaccgcgtcgagccttaatacatatgttttttatgttatgtatattatttactatatttttgcagtcaagctagaggaaatgttattaagaaaatcataaggaaaatacatgttcagtattgtgctgtatttatcgacaccataagtttacatgatgaatcatgtaaaatggcaggcaaccacagctgcagacctccgtccatggtaccatatgaagcaatttggcttttcttgtaatgtcatgactcttttctgcttcttgggaacacttccagcatcactagtggcacttcattatgggtcccatggtgtyatgtaaggtttatgatactgctttagacacatgaaaaatacctgaggaaccacaggagatcacttcttgctgccatatgcaatttttgttttgagacagagtttcactcttgttgcccaggctggagtgcagtggcatgatctcgactcactggaacctccgcctccccgggttcaagcgattctcctgcctaagcctcccaagtagctgggattacaggcatgcaccaccatgcctggctaattttgtatctttagtagagacagggtttccccatgttggtcaggctggtctcgagctcctcacctcaagtgattcacccgcctcggtctccaaagcgctgggatttacaggtgtgagccagcgtgcccggtctgccatatgcagtttactggagagacgaactgctcactggaagatgattaacatctcagagtttttaagcagatacttgcaacatttgagctcaccatagtatcgacaagaggcggctatgaaattattacagtactacagtgtgtactgaagtgaattttatgcagttatgatttaatactgcatctttaggccaggtgtggtggctcgcgcctgtaattctagcactttgggaggcctaggcaggtggatcacctgaaatcaggagttcaagatcagcctggccaacacggtaaaaccctgtctctactaaaaattcaaaaattagccaggtgtggtaaatataaaaattagccgggtgtggtggcatgcatctgtagtcccagctcccagggtgactgaggtgggaggatcgctggaacctgggaggcagaagttgcagtgagctgagattgtgtcactacactctagcctgggtgacagagcaagaacctgtctcagaaaaacaaaaacaaataatattgcatctttatatttatttccgtttctcttgggctgtgaatgatgtcatgtactgtctgtgtttgtgtgtgaggttttttggtgttttttttttacatggggtctcactgtcacccagcctggagtgcagtagtgtgatcacagctcactgcagcctcagcttcctaggctcaagcaatcctcccgcctcagcctccagaacagctaggactacaggtgcaccccactgtgctcagctaattttttattttttgtggagatggggtcttgccatgttgcccaagctggtcttgagctcctgacctcaagtgatcctcctgcctcagcctctcaaagtggtggggttacaagtgtgaactatcacatccagcctgcatcaagttttgataagttttaactttataatagacatatatatttggccgggcacggtggctcaacccctgtaatcccagcacttcaggaggccaaagtgggcggatcacgaggtcaggagatcgagaccatcctggctaacaccgtgaaaccccgtctctactaaaaaagtacaaaaaattagccgggcatggtggcgggcgccggtagtcccagctactcgggaggctgaggcaggagagtggcgtgaacccgggaggcagagcttgcagtgagccgagatcgcaccactgcactccagcctgggcgacagagagagattccgtctcaagaaaaaaaaaaaagacatatatattttatggtagtaaatgataaaatagactaggatctacataaattttatgcgttcatgacatatgtagctttaaaaaaaaattagccagatatggtagagcatacctgttgttctagctactcaggaggctgaggcagcccgattgcttgagcccaggaatttaaggctgcagtaagctgtgattgtgccattgcactccagcctgggagacagagtgagactttgtctcaaaagaaagaaagaaaaaattccagtatatttactgaaaaaaattagcatattagtggacctacacaattcaaatcgtattgttcgaagattaattgtagacatacatakgtgccttacttttctccagtgagagggcctaaaggcagtaatactctaatagaaatgagtgcaagtaatgcctagaatttggcttctacataccattattccrtaatagccaggattccaccaagaatggttgattacaggactgggccagggaaaatacaagatgagcccagaacatcttttattttatttatttatttatttttgagatggtgcctcaccatgttgcccaggcggatcttgaactcctgggcccaagcgattctactgcctccacctcccaaagtgctgggattacaggcttgagcccagcccatctcatgatacaagacagtcagggaacaaaaatgaagggaggctgggtgcagtggcccatgcctttaatccgagtactttgggagtgttgggaataacactcaaaatcctaaggaaaatgaacattcaaacaaaggattcttaggaaagcaattttacttctctgcagaggggtgcctctccttggccagtcgccgtgaaagcacacctgaacaaaggggcacgagagcctttattcctgacgcaagtcctgcccctgtacccttttcccatttgccggggtcgggttgcacaattagcccaattggctaaacatctgaactttctttagataaggtgggcacataagggagagaggggaaaaggtgaaggggtgtctgcaatgatctagagagctagtcttctttccaaataagggaaggaatagtaatagtaagaaatagtaagaaagaaaataaagaaatagtaataaaggaaagctagtcttctttccaaataaggaaaggaatgtgagctggtactgataagcctggtactgtggcgtgtccaggcatgtaacaaaggcagaaacgaaaaaaagagaaaaaggaaaaaaggttgtgggggagtgctatgaattaaagaatagaggattgatcaggctatttgaagagaaacctcatcatatcccacaggaggctgaggcagcagatcagttgatcccaggagttcgagaccagcctgggcaccaaagtgagaccctgtcgctacaaaaaattaacagaaaaaaaaattagctgggccgggcgcagtggctcacgcctgtaatcccagaactttgggaggccgaggcaggtggatcatgagatcaagaccatcctggctaacatggtgcaaccccgtctctactaaaaataaaaaaaattagccaggcgtcgtggcacgcacctgtagtcccagctacgtgggaggctgaggcagtagggagtaggcagtaggatcgcctgagcccaggaggtcaaggctacagtgagctatgtttgcaccactgcattctggcctgggcaacaaagcaagaccctatcttgaaaaaaacaaaaaaatggaagcatgttcaaaggacacaggccaagttgaaggagattgcagagaccaagtatgggacaatttgagcaggaaaataaatagtaatagtaatggattaaagcacagaataagacaaatatccctaagtccattctgctataaataagtgaataactaaataaagggaaagggacagctaatcgttacaatagcattcccattagtaaatgtagaaggaataatagagatagaaaatcaccatttagtaaacaccacagcagtaattgtggcaggcaagaatcattcatggatgcttcaattagtgggcaaaaatgtgatgtgaaacaggacatttacgtagtctgaaagtatcttcccacaaaaatactggttgcaaaggggaaaataataatgttacagtggagaaatgtggcagacactacgaagtgatcaaagttaacatcagcagtaataagacattcacttcatgcacctcttgatacgatgcctgaggaccaaccctcccttctgctgtaatcttacgaaaatacataacttcaatataatcgcgagaaaacaggccaacccaaattgagggacattgtacaaaataagtgacaagtactcttcaaagaagtgtcaagatgatgaaagataaagactggaggagaggaaggagacctgacaactaagtgcattgtgggatcctgaagcagaaaaaggacacaaataggataaactttttttttttttttaaaagatcctgagtttgtgttccctcctaactactgtaagttggacaagtcatataactactctaaggtgtaaagtaggcgtggtactgtctgcttttgctcaggtgtggtgaagctcaaacaaggctttaattgtaacacaaatataagatatcatcatcattattttattttatttttttttgagatgagacggagttttgctcttgttgcccaggctggagtgcaatggcacgatcttggctcactgcaacctccacctcttgggttcaagcaattctcctgcctcagcctccctagtagctgggattacaggcgcctgctaccacacccagccaattttttgtatttttagtagagatggggtctcacgatgttggccaggctggtctcaacttctgaccgcaggtaatccacccgtctcagcctcccaaagtgctgggattacaggcgtgagccaccatgcccggctctcatcgtcattataggttacattgaagtgaactgtttgtctcttttttgtgattctaccaataaaagcaataaacctagttttctgccatggatagaatttactgaaaaggtttctcttccctccaaattgatttgttttttccatcttcatagcttttcaggctgcctttcgagctcaggggcccctggctatgctgcagcactttgatactatctacagcattttgcagtaagtgaaacacccaactggtactttaaaaagaactggtgactgtttgtcctaactgtgcatgttagtcctgaaattccaagttataggttcacygataaatgcctctggatattgatatctctgatgagcatgtacccagcttgccaccgtatttattcagttgaacaatttcacgtgtatttttaaacattcgattccaygggttagatctgatctgttagaaggggctctgcaggctccttcctgtctcacccccacactttctttccctcatagtcactttcgaagtatagatcctggcctcaaagaagatactctgsaattcctgataaaaggtgtttatgggtcagggrgtaggggatggaaggtgtttgttatcgtttgtttgtttgtctgtttgtttgtttttcctacattttgtcagccacatgatgataycaaggctgttgtgattcagttggtttggctaagcccagggacctttggcctgttaaaggtctgtaatcttggtgggcgatacagagttatgtgtgttcactgtaagggcagaccaacaagaactttttcctacttttgagctacctctttttaataggggtgattcttccagttgctggagagaaattgtggtaactggagtgagagagtaggaacagggcatgttcagggtatcagggccaagggtcctaaaggacttagcttgtgttatggccactgagagatgaaacacagatctttggtaatctgatggctgcaagtgctgggtgttttgaagttggggtatatgaaagaagtgagtgaaactgactccaagattctgcccctcacagtggtatcccgccactcccaggagcttccagctatcctggatgatacaactttgagtggatcagatagaaacgcccatctaaatgccctcaaaatgaactgttaygctctgatacgtctcctggaatcctttgagaccatggccagccagacaaaccttgtggacctggaccttggtgggaaggtaatttggagttttgggctcacgttatatggggtctggggagatasgggaatagatggaaaagaagggaatccaatgatccacaaatcctttctgtcctcattgagaatttaggagaaagaactcaaaagtgtcacacgttttcttcctggacaagtagcgctgtggaacttgtaatatttcttccgtattaccttctatgttgtcttggtactagattgtttgggcactcagactgacagatcttgacccacttttttcccttattttttcctcaatgtatacatgatcctttttagggtaagaaagctcggaccaaggcagcccatggctttgactgggaagaagagaggcaaccaattcttcagcttttaacacagctacttcagttggacatccgtcacctgtggaaccactcaataattgaagaagaatttgtcaggtgggtagggaggatggctacagataatactgagctgtgagagtgaggctctgttgatagatatgccgtttttttgtttttgttttttttttgtggggggacagagcttcactcttgtcgcccaggctggagcgcagtggttcaatctcggctcactgcagcctctacctcctgggttcaagcrattttcctgcctcagcctccygagtagctgggattacaggtgcccgccaccacaagctgatttttgtatttttaatagagacgggttttgccatgttggccaggctggtcttgaactcctaacctcaggtgatctccctgctttggccccscaaagtgctgggattacaggtgtgarccaccacgcccagccagaagtctatttttaaaataagtaaaataagtttgatggaagaaggttgtgattttaaatcagctactctaggcccggtgcggtggctcacgcctataatcccagcactctgggaggccgaggcgagtggatcacctgaggtcaggagttcaagaccggcctggccaacatggtgaaaccttgtctctactaaaaaaatatgaaaattagctgtgcatggtggtgtgtgcctgtaatgccagctacttgggaggctgaggcaggagcatcacttgaacctgggagagggaggttgcaatgagctgagatcgcaccattgcactccatcctgggcgacaagagcaaaatcccgtctcaaaaaaaatagatagggccaggcgcggtggctcacgcctgtaatcccagcactttgggaggctgaggcaggtggatcacgaggtcaggagatcgagaccatggtgaaaccccgtctctactaaaaatacaaaaaaaaattagccgggcatggtggcgggcgcctctagtcccagctactcaggaggctgaggcaggagaatggcgtgaacccgggaggtggagcttgcagtgacctgagatcgcgccactgcactccagcctgggcaacagagcaagactccatctccaaaaaaaaaaaaaaaaaaagatagatagatagatagacagacagacaaacagacagacaagctactctagtaagacttctttgagatggtgacatttgagcaaagacccagaggaggtgactgagagctatgagaatatgtggaggaatagcaagggcagggaaaaggaatagcatatgcaaagaccttgaggagggagcgtgtccagcacgtacgagcaatagcaaggaggccagagagctgacagctgagagcaggtacgagggttaggccgtgaggccatgggagcagtggggagccagaccgcaggttyttgtgggccatcatggkgactttggcatttcctcagaatgaagtggagccactggggagccacaagcagggaggtgaggtgacctgacttgtacttcaacagggccatcctagctgttgtattgaaatcgactatggagggaaaggggaagcaagagaccagttaagaggctgttccaataactcaagcaagagatgatggtctcttagaccaaggcgtggcagtggagatggggagaagtagttggattctatactttttccttaaggtagagcttacaggatttgctaacagactgggtgtgaggtgggagggagagttcagtcaaggatgactctcccgggttttggtctgagcrtttggaagactggagttaatggtaactgagatagggagaaggctgtgaataggtgttttgggaggaagatcagatgttctgttttggacatacaaagtttgaggtgtttattagccacgtaaagtcagatttggacgttgaatatatagatctggagttcaggagagaggtctgagctagagataacacatttgggaatataatagtattcagagccgtgagactgaatgaaatyaccaaatcagtaagtgtagctaaaagagcaggaatccaaggactggtaccctagggcactccagcattaagagtgaggatgccgggtgcatggctcacgcctataatcctagcactttgggaggctgaggcaggaggatcacttgagcccaggagtttgagatcagcctggacaacatagtgaaactgtgtctctacaaaaaatagaaaaattagctgggcatggtggaggctgaggtgggagcatcacctgagctatgaggaggtcaaggatgcagtgagccgtgattgcaccactgcactccagcctgggcaacagaggcagaccctgtctcaaaaaaaagagtctgaggaggaactagccaaagaaactgagaaaggagtcttgttcttgtgtcctggaagcgagataaagcatatatttcaaggagaaagtgagtgattaactgtatcacatgcagctgtgaaagaccacttgagatgcagattgaatcagtcgttatatttaggaatgagaagtcattggtgactttgtcttttttttttttttttttgtgatggagtctcgcaatgtcgcctggcctggagtgcagtggcatgatatcagctcactgcaacctccacctcccaggttcaagggattctcctgcctcagcctcccaagtagctgggattacaggcgcccaccaccacacccagctaattttttgtatttttagtagagacagggtttcactatgttggccaagctggtcttgaatgcctgacctcgtgatccacctgcctcggcctcccaaagtgctgggattacaggcatgagccaccacacccggccaactctatcatatttttatgatatatttaggttctttgtcagcatcacaactggttgaaagttggtaatcttgaaggaaggagtacctaactggggtcagcaaagcaaagcaacttgttatagaaagtaatggctagaataaagaaaaccctgactttgggagcagtagggatagaatgaatgaggcagggctctgatacarttggatycagacagctgctttcatcatctcaaactcttcctttctcagtttggttactggctgttgctaccgccttctggagaatcccaccattaatcaccagaagaaccgccccactcgggaagccataacacacctgcttggtgtagccttgacccgttataaccatatgctcagtaagttaccagtcgctttgccccgccttttttgtattgcccataatttctcatgtttaatgcttccacaggtgctacagtgaagatcatccagatgctgcagcactttgaacacctggcacctgtactggttgcagccgtgagtctatgggcaactgactatggaatgaagagcatagtgggagagattgtaaggtgactcttccttctcgaagtttctcatgcttattttccttggggagggaataaagaaagattggaaatacattatctgtgcaacagtagattccttcagatattagatacctgtcttaccttcccttactgggaactgaataattgatctatgttgctatggctgtgttttcttccctgtgtagagagattggacaaaagtgtccccaagagctgagtcgagacccttcagggacaaagggctttgcagcattcctgacagaactagcagaacgtgtcccagctatcctgatgtccagcatgtgcattttgctagatcacctggatggagaagtaggtggtccactaggggtcactgagctttttctggggattttaagtccagcgttgaaaggctgtttcttaacagaacaagaaagtagctttgacaagttgtctagatttatcattgtgacatttcctttctgtagagaagcaggtcaagtttgttgaataaggagctctttattaatctgttaatctttcaattcacattgcttttatccagttctggtaagggagatgacatttctgcagcttaagtctagtaagagcaactcagctttgattttttttttttcttggaggtaggatctggctctgtcacccatgctggagcatgatcatagctcattgcagcctygatctcctgggctcaagcaatcctcccacctcagcctcccaagtagctgggacttcaggcacatactaccatgcctggctaatttttttagtttttgtagaggtggggtcttgccatattgcccaggctagtctcaaactcctggtctcaagcaaccctcctgcctcagcctcccaaagtgctgggattgcaggcgctaccatgcttagccttcagctttgattctgagtcccatctgttcctcaggataaagcgtcttcccaccagctggcttgccttgcttcctcaaacaatgaactttctcaaatcaacccatgtcatctctctcaattctcttttatgcctgaatgctaacctggctgattcccatactgatgttgggcactcctaggtgaatgtcaaggacaaagacagtccacttgttcatctcatttactttaactttttgtgcaagaccctattctctggttcttagcctggcaaaaccttaaccctgctctccactagattatgtattggacttgctggcactcttaaggctgatttccatgtttctgtctcattttctgtcagtaaagcatctgaaggagagtgggagggaaaggaggggatatttattagtaaggattaaagactttgaggccaggtgtggtggctcacgcctgtaatcccagcactttgggaggctgaggtgggtggatcacttgaggtcaagagtttaagactagcctggccaacatggtgaaatcccatctctactaaaaatacaaaaaaaaattagctgggtgtggtggcgcgcacctgtaatcctagctactcgggaggctgaagtgggagggttgcttgaacctgggaaatggaggttacagtgagccaagatcgcaccactgcactccagcctgggtgacaaaacgagactctgtctcaaaaaaaaaaccaaaaaaaaccacacagacgggcgcggtggctcacgcctataatctcagcactttgggaggccgaggagggtggatcacgaggtcaggagtttgagaccagcctggccaatatggtgaaatcctgtctctactaaaaatacaaaaattagctgggtgtggtggcgggcacctgtaatcccagctgcttgggaggctgaggcaggagaatcacttgaacccgggagtcagaggttgcagtgagccgagatggcgccacagcactccagcctgggcaacagagcaagactccgtctcaaaaacaaacaaacaaccacaataacaaaggctttgagacctcagctgaagggtagttaataaatgcttttcaaatgtgtgttggtgagtggatgtgatttttttattcagctactaccatgctttcctgtgtgagccctatgaggaaaaattggttttggcccttgttctagcattctctgagcaacaagtcctctttgggattcagctttctcctgtgaccttgggagtgaatacctaggcagttaatggaaaaagttatggccaagcacaagcaagcttcgccttgactaaaggtttgacccctctatgcttctctctcttagaattacatgatgcgtaatgctgtgctggcagccatggcggagatggtgctgcaggttctcagtggcgatcaactggaagcagcagcccgagacaccagagaccagttcttggatactttacaagcccatggccatgatgtcaactcctttgtgcggagccgtgttttgcagctcttcacccgaattgtccagcagaaggtaaccaacttctatgtggcaaaaacatatggtacctctccatataccagtgtaaagaggaatccagtgttgaagataaatatctgccccaaagaggtctagaattcacatttttattatcagtagtaaaagtcttcctctaccaaggacgaggatatctggctccctttaaggactstaatgtgtcttaccactacaaggagtactcctaatctatattctgtagaaagggtttttagagtgagtgggtagctcagtttagagtatacttaaagatcatcttgaacaaaatggatgatgtgggacttgagcagattcttctcttcctaccctacacaggctctccccctgacacgtttccaggcagtggtggctttagctgtgggacgtctggcagacaagtcagtgctagtatgtaaaaatgccatccagctgctggccagttttctagccaataatcctttctcctgcaaggtaagtagacttggtccaccaaaagagaaggaattaaatggaaacagggatgaaattatgtcatttactgaccctgctattcattttacctgatagcttastgatgctgaccttgccggaccactgcagaaggagacccagaaattacaagagatgagggcccagaggcgaactgcagcagcttgtaagtagttactgccttggagtcctaatgccagacaggcttctccttgcagtcagaaactctagtgaaagagactaagtgacactctcatttagctgcagtgctggacccagaggaggagtgggaagccatgctgccagagttgaagtctaccctgcagcagcttctacagcttccccagggagaggaggagattcctgagcaaattgccaatacagagacaactgaagatgtgaaaggacgcatctatcaactgcttgccaaagctagttacaagtaggcaaaagaatgggatattcttcgtgatctgtttatgtttagagttaacctttgagaaacttacataatgtgtcttttaaattaactgcacacagatatgctgccaccaggtgatggtagatgttttcatgtagtaatggtctgaccataggcctagtccacaattaagcatgtgtttctactttataaatgtttaaaaaaactactgaaacaattaaatgttaacaatattataatcaaacatgagtcctccttcaattgaagaagagcacctataaataagttctagttgtatgatcttgaataagttgcttaactttctgtgcctcggtttcattatctataaaataagaaattgattagatcttatgatctctaaggactttctaattctaaatttcatgaactaataatatcaaacatgcttaatactaccttaatcttcaaacctagtatgaatcctgatcttagagaaaagatttctcctagtgtttttgtgactctagaacttaacaacaaaagcccttacagccgtcaacaagttttttttttttttttttttttttttttttgagatggagtctcactcactctgttgcccaggctgcagtacagtgacacgatcttggctcactgcaacctctgcctcccaggttcaagcaattctcgtgcctcagcctcccaagtagctgggaccacaggcgcgcaccaccacaccgcactaatttttttatttttagtagagacagggtttcaccatrttggccaggctggtcttgaactcctgacctcaggtgatccacccatctcagcctcccaaagtgccatgattacaggcgtgagccaycgcactcggctgccaacaagtattcttaaacctcagccacaagttatttgttatttatttacttcttacctaattgggctgaattttttttttggagacggagtcttgctctgttgcccaggctggagtgcagtggtgcgatcttggctcactgcaacctccacctcctgggttcacgccattctcctgcctcagcctcccgagtagctgggactacaggcgcccgccaccacgcccggctaatttttttttttatatttttagtagagacggggtttcaccgtgttagccaggatggtctcaatctcctgacctcgtgatccgcctgcctcggcctcccaaagtgctgggattacaggcttgagccaccgtgcccggcttgggctgtttttagaaggctagagagtggcttgtttgccctatgactcccttatgttactttagtgtctctctttttattttgctaaagcaaaaatagagactatagttttataagtgcatgttccaccaagcattctagtattttctcctgtcaattagaaaaggattgtttgtttttgagacagaatctcactgttgcccaggctggagtacagtagcgcaatcacagctcactgcagcctctcactgtagcctcaaccctgctgggctcaagcgatctcccacattagcctcctgagtagcctggttaatttatttataatttgtagctgggattacaggtacacaccaccaggcctggcctttgccagcctgggcaacgtggcaagaagataacatgtagacaagcagtcaaacatgtattctttttttcccccttttatatgactgatagaattctctgcccactgatctaccatcttgtttttttcacttaactatgtgtctcagtggtttttaaaaatatttatggctgggtgcaatggctcatgcctgtaatcccagctacttgggaggctgaggcaggagaattgcttgaacccaggaagcagaggttgcagtgagctgagattgctccgctacactctaccctgggtgacagaggaagagtccatctcaaaaaaaaaaaaaaatttatagatggccaggtgcagtggctcacacctgtaatcccagcaccttgggagcccaaagctggtggatctcttgaggccaggagtttgaggccagcctggccaacgtggcgaaatggcgaaacccatctctgctaaaattacaaaaattggccaggtatggtggcacgtacctgtaatcctagctatttggggagctgaggcatgagaatcactcgaacctaggaagcagaggttatagtgagccaagatcatgccactacacttcagcctgggtgacagaacaagactctgtctctaaaaaaaaaaaaaatatatatatatatacacatatatatttatacataaatagtttcccactctcctctttttttgagagagagagtgtctcactcttttgcccatgctggagtacagtggtatgatcacaactcactgcagctttgatctcccaggctcaagtgatcctcccacctcagctccctcgagtagctgagaccacaggcacacaccattacacccacaggcacacaccatcacacccacaggcacacaccatcacacccacaggcatacaccatcacacccacaggcacacaccatcacacccggctaactttttttactttttgtatagttgggtctccctgtgttgcccagactgatctcaaattcctgggctcacgtgtccccattattttttatgactacatagaatcttattgtctggatgtgcctgaattaactaattattgaaagtttattgtttctaaacttaggaaagtttttaaacaggtgtttggagtaggtttatgattttaaaactttaaaaagccttattggagtttttttgaagactgtagtaatgccttgtaggttcagaaataggaaaagtgtttgcagatgagcagtcaggggaaaaaaataggcaaagtgttttgagccctaccccttagtaggtgctgtaacaactttttaagcatgttaagtgctccttttctctgggcagtaggtccagggacttgatagaatcatgaggtaagctcccttacaaacggctgcagtgacattcttctgggtactgacaggctggtgttctttcagaaaggccatcattctcactcgagaagccacaggccacttccaggagtccgaacccttcagtcatatagacccagaggagtcagaggagaccaggctcttgaatatcttaggacttatcttcaaaggtaatcattttccttcttcagtcaataaataacacatgtcaactggtatttactgagcattaactttatgccatcattggcctggttaacagaacctggtgctgaagagcccagagatgaattggcattacttttgctctggaatggaagcagcccacgggcctaagattgatagtcacagggtgactgtccagaccatagcggtctttaggtatggtttttgagaaatttagatattttagagtaagttttaatttcatatcttcacattgtgaaaagagatatccagggccagatgtcgtggcttatgcctgtaatcctaacactttgggaggccaaggcaggaggattgcttgagcccaggagttgaaaatcagcctgagcaacatgacgaaacccccatctctacaagggataccaaaaaaaaattagccaggtgcggtggcacgcacctgtagtcccaactgctcaggaggctgaagtgagagaatcaccttagcccggggaagttgaggctgcagtgagcggtgatcattgccactgcacagcctaggcaacagagtgagaccccatctcaaaagaaaagaagaaggaaaataaataagtaaatatccaggaatgttgacagctgttggattcccctgtatccccttgaacgaaaccatcctgtacttctctaactccttaggcccagcagcttccacayaagaaaagaatccccgggagtctacaggaaacatggtcacaggacagactgtctgtaaaaataaacccaatatgtcggatcctgaggaatccaggggaaatgatgaactagtgaagcaggagatgctggtacagtatctgcaggatgcctacagcttctcccggaagattacagaggccattggcatmatcagcaagatgatgtatgaaaacacaactacaggtatgccagagtccctttctataaggacagccttggggttcttttggattttttaattttttaaatttttattaacaatagagatggggccttcctttgttgctcaggctggtctccaactcctgggctcaggcaattcttctgcgtcagcctcccaaagtgctggtattacaggtgtgagccactgcacccggccatggatcttggagttcttttccatattttattgatatatctatctgctcctttaaaaggcaggggttctcggctgggcgcgatggctcatgcctgtaatccctacaaaactgggaggccaaagcaggaagacaggttgaggccaggagttcgagagcagcctgggcaacatagcaagaccccatctctacaaagaaacaaaaactaactgggcgtgatggcacacacctgtagttccagctactcggaaggctgggcaggaggattgcttgagcccgggagtttgaggctacagtgagctgtggtcatgccactgcactctagccagagcaacagaataagaacctgtgtcttaagaaaagaaaaaaaaaaggcaggggttctttttttctgtttgcttcctctagccacttacagcttatacattttaatgcatatagtatttcatgataaggcatcataggaggagtcgacattctcagggaaaatrcggaaggcctccatttgcatcttgctacattcagaaaggttctgtcgttaggtattgggggagttttgtgaagtagataggtgacatttgtacatgttctctcagtggtgcaggaggtgattgaattctttgtgatggtcttccaatttggggtaccccaggccctgtttggggtgcgccgtatgctgcctctcatctggtctaaggagcctggtgtccgggaagccgtgcttaatgcctaccgccaactctacctcaaccccaaaggggactctgccaggtatatggggtgcttttgcctttgctgacttttccaaggtcagcttctcacaggacttcccttgtctcctaaaggaagaggtgcatttctccaggggagttccagatccataggcagtccatcatagtggggcttagggtggggctcggtttccagggagagcagttttgtagcactgtggtgggatagccctaatcactgtttgccaagttcagcttcccaatcttatagtgaccgctgatctctgctgttcccacagagccaaggcccaggctttgattcagaatctctctctgctgctagtggatgcctcggttgggaccattcagtgtcttgaggaaattgtaaggcttcctgctttctctttctttattcattcaacaagtattttggttgttttttttttttttttttgagacggagtcatgccccattgcccaggctggagtgcaatggcacaatcttggctcactgcaacctccgcctcccaggttcaagcaattctcctgcctcagcctcccgagtaactggaattacatgcatgtgccaccatgcccgactagttttttgtatctttagtagagacggggtttcaccatgttggccgagctggtctcgaacccttgacctcgtgatccacccgcctcaacctcccagagtgctgggattacaggcgtgagccaaagcgcccggcaacaagtattattgagttattactatgtatttagcaatttacttagctccagaaagaagtataagactatttgctttcatgttcccaactttaaaggaaccaacagtctagttggtagtgaaaaaccacagaacatttttagaacaatgcagcaggtagataataaagtgccagaatgagttgtacgggtaatggttgtcatagcaataataacaacctcacttatatggtattgaatatatgacaggcactcacacgttactcacagtaacttgtttaatcctcacgacagccctgtgaggtagcattatctgcattttacaatgagaaatctgaggcacagagaagttactgaacttggctggttacagctagttagtggcaaagtttgagattcaaactcaggcaataagagctctagaaaacatactcttaacttctgtgttctactgagggatacagagtaggaaagagagcggtttggggtagaatggtcaaggaagcttcctgaaggtggtaggacttaagctgggtcttgaaagatgagtaggatttagagaatcagagcaaggagggagggcatttcaaacagaacccaagaaagagcacagttcacattgtagaacaaagaagactgtgttctggttcaaattatctggaaaagaccaggcgcgatggctcacgtctgtaatcccagcactttgggaggccaaggcagcagattacctgaggtctgaggtcaggagttcgagaccagcctggtcaacatggcgaaaccccacctttactaaaaatacaaaaaaattagccaggtgtggtggtgggcacctgtagtcccagctacttgggaggctgaggcaggacagttgcttgaacccaggaggtggaggtagcagtgagccgagattgcgccactgcactccagcctgggcgacagagggagactctgtctcaaaaaaaaaaaaaaaaaaaaaaatctggaaaagataataaagttgtgaatgtaggttggaactaaactgtggaagtccctgaatgacttcaggagtctaggactttaactgtgttagccaggcacccagcattttagtgagacattctgctttgtagcatttgcattgcgggcacagagagtggaggtggcgctgggaagcgtgctcctgccagccacatttttctcctcactggggaaaagaaaagagcctggtggtggtgattggccatgatgtcataggtcagttaccggcaaaagccctacaagaggcaggggagagcacctgcaaactggggtgcaacagaagggacgtggggaagcagaggctgaggagaccaacccatgggaaggaaggcccgtggaggctgctgcagtgggcagtaacgaggggctggacttgaggattggagaaatcactgcagaatgggcttaatggaagacaaatttttaaaggaaaaatagtgactgatttgtaaaaaaattagatgaccgaaattttaagcacatattactgatagagtgttgataccactggcaaaatgaaaaggcaaggaaggatgatggcttccatgttggacatgttgagtttgtggtaacggcaagaaaacctgttagaaatctccagacttagaactatggacccacgtggaactcaaaaggtcagtttcgatatgtcacttgaataaaatagttttgaaggcatgagagtagaaaagtagagaatggaaagcctctcaagaccctgctgtacattttgaacctcctcttttctttttctcttcctaagtattacttttgtctacttcaggttcgcaatatcatcttcagaaaagcagaccaaagatcaaggaattgttcatttttggcttgagccctttttcttttctctttagctctgtgagtttgtgcagaaggatgagttgaaaccagcagtgacccagctgctgtgggagcgggccaccgagaaggtcgcctgctgtcctctggagcgctgttcctctgtcatgcttcttggcatgatggcacggtgaggctcaaatctagcaggcaatggggtgggagagcaaaggaaggttctgagagggctccttttccttcagtgacattgtcacagtgaggcccaactgagctctgctgtgagttataacgccacctaaatggaaaagcaaatagtgagaggaccagccctcctgcctagtagtagtgggattcagtaaagcaacaggacccaagaggctggccctgcggcagagccacgctatagtgctccacggctctagacaccacatgaggtgctggtacctacccctattggccctttctcccccgatgagtccaatccatgactgcctttaactctgtggcttccttcccctagaggaaagccagaaattgtgggaagcaatttagacacactgntgagcatagggctggatgagaagtttccacaggactacaggctggcccagcaggtgtgccatgccattgccaacatctcggacaggagaaaggtatgtgrgggtggttccaaactaaggagagtggagattctcgtgtccaccctgtacacacacccacgttgtcttgctctccacagccttctctgggcaaacgtcacccccccttccggctgcctcaggaacacaggttgtttgagcgactgcgggagacagtcacaaaaggtgagctctcagggaaggccttgggcagawttgggccctttgttgcagtaaacaacttctccctcctcctctgcaggctttgtccacccagacccactctggatcccattcaaagaggtggcagtgaccctcatttaccaactggcagagggccccgaagtgatctgtgcccagatattgcagggctgtgcaaaacaggccctggagaagctagaagagaagagaaccagtcaggaggacccgagtaagtgggcaggggttgacccactgcggcagccagcttctgttctccctgcagggccaggagccactgccaccaccactatctgcaacaacccttagtgtacactgtgtcgtttttgtctaagttgaagttgggccagttcccacccccaactcttactacttcactagtttgaatagcacgtgagcaaggggaagatcagtaaaaatcggattcaggtttgatgggacttaaaaatgtctctttgccccaccttccctctccctctcctccagaggagtcccccgcaatgctccccactttcctgttgatgaacctgctgtccctggctggggatgtggctctgcagcagctggtccacttggagcaggcagtgagtggagagctctgccggcgccgagttctccgggaagaacaggagcacaagaccaaagatcccaaggagaaggtgtgtgaatgtcctcagcacttcccagatttatttcatacctcagctcagaactgagctgatccccttccggcaatctctgctcctctgctattacatgaagcgaagagtttctgcctctctgtggctactaccgtaggaaaggttcgtgtgaacaatgacraaactgtcagtgatcacccaggaaggaaagatttaggtaaatgcagagtgtggagttagagacctcagcataaaacagaggctttgtgtctgaggcagggtttgttagaacacgcacgtacccgccggccttttccatcagcttccattgctggcctggccccggatggggccctgtgttccctccactagaggcaatgatgtcttgcagacaaataagacacagagccttgcagcgctggagaaaagtctgacctctgtgactttgaaccattgtctggcgtgatccatctgtttaccatatataggaaacgatgtcttccatgaggaagaggtgcagaaacacgctttggcaacttaaaacaaatggggacctcattgttcccctgcttaattcaggaatcctttctctttacagacacatttgacaattctctaaatgtttttgtagaatttgcccttcctcactttgttcatgcaaaacaaagtatgggctggaatcaaaaatgttgtctctgcttatccatgatccccaatttcattccctttagaatacgagctctgagaccaccatggaggaggagctggggctggttggggcaacagcagatgacacagaggcagaactaatccgtggcatctgcgagatggaactgttggatggtaagaaaaatggctgcactcagcagtttcttcccaattaagataacctgtcccaaacctgcagttactcttccaacaggcaaacagacactggctgcctttgttccactcttgcttaaagtctgtaacaacccaggcctctatagcaacccagacctctctgcagctgcttcacttgcccttggcaagttctgcatgatcaggtaggccgtggggttggtacccccttctcaaggaagatggggatgaaatggcttccctaatgatcctcttcttgctcttagtgccactttctgcgactcccagcttcgtcttctgttcaccatgctggaaaagtctccacttcccattgtccggtctaacctcatggttgccactggggatctggccatccgctttcccaatctggtggacccctggactcctcatctgtatgctcggtaagagacccctcacaacgtggtggcagttcccaggagccccggagtctgttgagagtcagtgtgagaatcaccagggctcttcccctaggctttggcatcaccgcgaacatctgcttgatacttgacctgtacaggcccctggctaagagtcaccccagtgggactgacacttctggttagaagcttcacctctttcccccactccagctttcaactctagacagctttctgactgcttctggagtggcagagcatgggataattgattcctgctgagggccttttctaccagtgttagggtgtagcccggaggtctcggtccccatgacccgcaattccattcctagyctccgggaccctgctcagcaagtgcggaaaacagcggggctggtgatgacccacctgatcctcaaggacatggtgaaggtgaaggggcaggtcagygagatggcggtgctgctcatcgaccccgagcctcagattgctgccctggccaagaacttcttcaatgagctctcccacaaggtgagaggcagagaggcactgagggctggctgcagagggaatctgtaggtcacctcatctccttaacatggctctctctgtcttacagggcaaygcaatctatratctccttccagatatcatcagccgcctgtcagaccccgagctgggggtggaggaagagcctttccacaccatcatgaagtattgctccccgggccctggggcacattttccacatagcaygggcttaggaatcagacacacctgtatttgaattccacctcggctactctttagctgtacagccttcggcaataacttagcctctctttgtgcctatttcctyttcttttgaggctgatgatacttaacccttagttcttgaaaatattaaatacgataaagttcctaacatggtggcagacatacagtagcactcactccctagcagctgctcctgttaatttccattcacagtgaaaattcctgagccgggggcggggtggggtccctctctgctgaatgggacagggcaaggggagtggtgaggcagacaggggccgtggcagagaacatcagagaagacgagtgctgggggagggtccagggttggtcttagtggatggcagagctggccctgggccatcgaacatcctcatctycccttcctgcagacagctcctctcctacatcaccaaggacaagcagacagagagcctggtggaaaagctgtgtcagcggttccgcacatccckgtatgctgccctccctgagggttctttgtgctgagcggggccctgcaggggagaaaggcccatccctcaccccttcaatgcccccactgtggcatccctgggactggggaggctgatggggaaggttgagcctytactagctggatctcccagttcctcacaaagcccttcctatctgcagaactgagcggcagcagcgagacctggcctactgtgtgtcacagctgcccctcacagagcgaggcctccgtaagatgcttgacaattttgactgttttggagacaaactgtcagatgagtccatcttcagtgcttttttgtcagttgtrggcaagctgcgacgtggggccaagcckgagggcaaggtgagcagcacaggacacttcaatgcctgttgggttctgggctggctaagacatctgccggccctgggcagcatacggctcttgcagtcaccttcccgtcctccttatccccagctgggttgcaaccaaattgccagagtgacctaagaccagatctttgtctccagttctttttttattactccaaaaacacaaccaaagcagcatctcatccaattcttgtttgtttgtttttaatagtttttatttttcagagcagttttaggttcaaagcaaaattgagcagaaagtacagggagttcccttctaccccttgcccctacacatcacagccttccccaccttcaacatcctgcaccagggtggcacatttgttacagctgaacctacacttacacatcatctcctaaagtcatggtttaccttggagttcactgcacgtaatgacatgtacccaccattgcagtatcatacagaagagtttcactgccttacaaatcccctgcactccacctatttatccctctctccccacaacccctgatctttttactgttgccatcactttgtcttttccagaatgtatcattggaatgatccggtatggagccttctcaccttggcttcttagtaatgtgcgtttaaggcctccatgtcttccatggccttgtttctttttaatcagaagtaactgttttcaggcctgctctgaatctccttttctccctccaggctataatagatgaatttgagcagaagcttcgggcctgtcataccagaggtttggatggaatcaaggagcttgagattggccaagcaggtagccagagagcgccatcagccaagaaaccatccastggtacgtaaggcagcctgtgcgggcgagaccagactgggccctcccctcctgcagtgatttgtttcttcttcttttttaaatcacgttttcctgccttttctaggttctaggtaccagcctctggcttctacagcctcagacaatgactttgtcacaccagagccccgccgtactacccgtcggcatccaaacacccagcagcgagcttccaaaaagaaacccaaagttgtcttctcaagtgatgagtccagtgaggaaggtatgatgctcccgcctgttcccgrccgagaaggcacacagctagggtgcagagggctggtttccataggacctgctgcgggggcctgagtgtagatgctctgccccactgccgcagaagggcctctcctgtacagcttggattttatttcttctgtgcggtgtgggattgtctcacttgttctctgatatctattttttcaccatctttgtgactcagctttttcttattcctttaattctttgcatagatctttcagcagagatgacagaagacgagacacccaagaaaacaactcccattctcagagcatcggctcgcaggcacagatcctaggaagtctgttcctgtcctccctgtgcagggtatcctgtagggtgacctggaattcgaattctgtttcccttgtaaaatatttgtctgtctcttttttwwaaaaaaaaaaaaggccgggcactgtggctcacgcctgtaatcccagcactttgcgataccaaggcgggtggataacctgaggtagggagttcgagaccagcctgaccaacatggagaaaccccatctctactaaaaataaaaaattagccgggcgtattggcgtgcgcctgtaatcccagctactcaagaggctgaggcaggagaatcgcctgaacccagaggcggaggttgtagtgagccgaaatcacaccattgcactccagcttgggcaacaatagcgaacctccatctcaaattwaaaaaaaaatgcctacacgctctttaaaatgcaaggctttctcttaaattagcctaactgaactgcgttgagctgcttcaactttggaatatatgtttgccaatctccttgttttctaatgaataaatgtttttatatacttttagacattttttcctaagcttgtctttgtttcatctttcacattagcccagtttcatgcagcagagagagggttatcagtgcagagagagatgagtgagcccagagtcctagggcctgtcccgggatggcagatgagcttcctgccccgtcactgccacctttcccctctcaacctctggaccctgcacagtgaccagacagcctctctggggagaattatgcagtgcctaggctccagatcagtgcttctgaaccgggggcaattttgtctgccagaggacatctgacaacacctggggcctgttttgttgtcatagcctataggggaagaatgctaccagcatttgtgggaagaggccagggatgtggctcaacatcctgcagtgcacaggatggcccctcaacaaagaatcacacggcccacaatgtcaatagcgtcacagttgagaaaacctgctctagaccaagggttgctttctgccgtgtgcctcaccccacccccactcgtgttccctaatcccatctccaaaggttggcagcagaccggcccaggctcgtggaagttcagatcatgatcccctccagctctgcaggagacaagacctgtctcccagcattcctcattgttcccgggtctgcagagggcgtgagctatgctgcaggcgggctgccccctgaagcctgcgcacccctctccagctcctcaagtcttctctgctgagtcaccttcgaaccggaggctgtgagctggctgtcgtgaccacactggtgcctctgctgtcatgacaacagcacactacgtcagtagtgctccctgggcactgagctccctctttgcggggagaagacagtaatgaaaaatgacaagcatgaggcagaggggaagatcacgcttgggtggtgcaggagcatggaggtgctcttaatgctctcaatgagaaagggttaacggtcctggttgcaggaatagctgagtcagaggtggggcttcctccactcccccaccccacccctttcaccattagggaccttcttgccttgctcttgctactctgctctgggtggtcattgtgaaaagcccgcaccaaccatgccagtggcagccagacgaggacacagcctggctctgggtcccagcaggaaaggcaatcccagaaaggcagggtcagggactggagtcctgtgggtgctttttaagcaaagattatcaccaggcaggctaaacttagcaaccggcttttagctagaagggcagggggctggtgtcaggttatgctgggccagcaaagaggcccgggatccccctcccatgcacctgctgatgggccaaggccaccccaccccacccccttccttacaagtgttcagcaccctcccatcccacactcacaaacctggccctctgccctcctaccagaagaatggatcccctgtgggagggggcaggggacctgttcccaccgtgtgcccaagacctcttttcccactttttccctcttcttgactcaccctgccctcaatatcccccggcgcagccagtgaaagggagtccctggctcctggctcgcctgcacgtcccagggcggggagggacttccgccctcacgtcccgctcttcgccccaggctggatggaatgaaaggcacactgtctctctccctaggcagcacagcccacaggtttccaggagtgcctttgtgggaggcctctgggcccccaccagccatcctgtcctccgcctggggccccagcccggagagagccgctggtgcacacagggccgggattgtctgccctaattatcaggtccaggctacagggctgcaggacatcgtgaccttccgtgcagaaacctccccctccccctcaagccgcctcccgagcctccttcctctccaggcccccagtgcccagtgcccagtgcccagcccaggcctcggtcccagagatgccaggagccaggagatggggagggggaagtgggggctgggaaggaaccacgggcccccgcccgaggcccatgggcccctcctaggcctttgcctgagcagtccggtgtcactaccgcagagcctcgaggagaagttccccaactttcccgcctctcagcctttgaaagaaagaaaggggagggggcaggccgcgtgcagccgcgagcggtgctgggctccggctccaattccccatctcagtcgttcccaaagtcctcctgtttcatccaagcgtgtaagggtccccgtccttgactccctagtgtcctgctgcccacagtccagtcctgggaaccagcaccgatcacctcccatcgggccaatctcagtcccttcccccctacgtcggggcccacacgctcggtgcgtgcccagttgaaccaggcggctgcggaaaaaaaaaagcggggagaaagtagggcccggctactagcggttttacgggcgcacgtagctcaggcctcaagaccttgggctgggactggctgagcctggcgggaggcggggtccgagtcaccgcctgccgccgcgcccccggtttctataaattgagcccgcagcctcccgcttcgctctctgctcctcctgttcgacagtcagccgcatcttcttttgcgtcgccaggtgaagacgggcggagagaaacccgggaggctagggacggcctgaaggcggcaggggcgggcgcaggccggatgtgttcgcgccgctgcggggtgggcccgggcggcctccgcattgcaggggcgggcggaggacgtgatgcggcgcgggctgggcatggaggcctggtgggggaggggaggggaggcgtgtgtgtcggccggggccactaggcgctcactgttctctccctccgcgcagccgagccacatcgctcagacaccatggggaaggtgaaggtcggagtcaacgggtgagttcgcgggtggctggggggccctgggctgcgaccgcccccgaaccgcgtctacgagccttgcgggctccgggtctttgcagtcgtatgggggcagggtagctgttccccgcaaggagagctcaaggtcagcgctcggacctggcggagccccgcacccaggctgtggcgccctgtgcagctccgcccttgcggcgccatctgcccggagcctccttcccctagtccccagaaacaggaggtccctactcccgcccgagatcccgacccggacccctaggtgggggacgctttctttcctttcgcgctctgcggggtcacgtgtcgcagaggagcccctcccccacggcctccggcaccgcaggccccgggatgctagtgcgcagcgggtgcatccctgtccggatgctgcgcctgcggtagagcggccgccatgttgcaaccgggaaggaaatgaatgggcagccgttaggaaagcctgccggtgactaaccctgcgctcctgcctcgatgggtggagtcgcgtgtggcggggaagtcaggtggagcgaggctagctggcccgatttctcctccgggtgatgcttttcctagattattctctggtaaatcaaagaagtgggtttatggaggtcctcttgtgtcccctccccgcagaggtgtggtggctgtggcatggtgccaagccgggagaagctgagtcatgggtagttggaaaaggacatttccaccgcaaaatggcccctctggtggtggccccttcctgcagcgccggctcacctcacggccccgcccttcccctgccagcctagcgttgacccgaccccaaaggccaggctgtaaatgtcaccgggaggattgggtgtctgggcgcctcggggaacctgcccttctccccattccgtcttccggaaaccagatctcccaccgcaccctggtctgaggttaaatatagctgctgacctttctgtagctgggggcctgggctggggctctctcccatcccttctccccacacacatgcacttacctgtgctcccactcctgatttctggaaaagagctaggaaggacaggcaacttggcaaatcaaagccctgggactagggggttaaaatacagcttcccctcttcccacccgccccagtctctgtcccttttgtaggagggacttagagaaggggtgggcttgccctgtccagttaatttctgacctttactcctgccctttgagtttgatgatgctgagtgtacaagcgttttctccctaaagggtgcagctgagctaggcagcagcaagcattcctggggtggcatagtggggtggtgaataccatgtacaaagcttgtgcccagactgtgggtggcagtgccccacatggccgcttctcctggaagggcttcgtatgactgggggtgttgggcagccctggagccttcagttgcagccatgccttaagccaggccagcctggcagggaagctcaagggagataaaattcaacctcttgggccctcctgggggtaaggagatgctgcattcgccctcttaatggggaggtggcctagggctgctcacatattctggaggagcctcccctcctcatgccttcttgcctcttgtctcttagatttggtcgtattgggcgcctggtcaccagggctgcttttaactctggtaaagtggatattgttgccatcaatgaccccttcattgacctcaactacatggtgagtgctacatggtgagccccaaagctggtgtgggaggagccacctggctgatgggcagccccttcataccctcacgtattcccccaggtttacatgttccaatatgattccacccatggcaaattccatggcaccgtcaaggctgagaacgggaagcttgtcatcaatggaaatcccatcaccatcttccaggagtgagtggaagacagaatggaagaaatgtgctttggggaggcaactaggatggtgtggctcccttgggtatatggtaaccttgtgtccctcaatatggtcctgtccccatctcccccccacccccataggcgagatccctccaaaatcaagtggggcgatgctggcgctgagtacgtcgtggagtccactggcgtcttcaccaccatggagaaggctggggtgagtgcaggagggcccgcgggaggggaagctgactcagccctgcaaaggcaggacccgggttcataactgtctgcttctctgctgtaggctcatttgcaggggggagccaaaagggtcatcatctctgccccctctgctgatgcccccatgttcgtcatgggtgtgaaccatgagaagtatgacaacagcctcaagatcatcaggtgaggaaggcagggcccgtggagaagcggccagcctggcaccctatggacacgctcccctgacttgcgccccgctccctctttctttgcagcaatgcctcctgcaccaccaactgcttagcacccctggccaaggtcatccatgacaactttggtatcgtggaaggactcatggtatgagagctggggaatgggactgaggctcccacctttctcatccaagactggctcctccctgccggggctgcgtgcaaccctggggttgggggttctggggactggctttcccataatttcctttcaaggtggggagggaggtagaggggtgatgtggggagtacgctgcagggcctcactccttttgcagaccacagtccatgccatcactgccacccagaagactgtggatggcccctccgggaaactgtggcgtgatggccgcggggctctccagaacatcatccctgcctctactggcgctgccaaggctgtgggcaaggtcatccctgagctgaacgggaagctcactggcatggccttccgtgtccccactgccaacgtgtcagtggtggacctgacctgccgtctagaaaaacctgccaaatatgatgacatcaagaaggtggtgaagcaggcgtcggagggccccctcaagggcatcctgggctacactgagcaccaggtggtctcctctgacttcaacagcgacacccactcctccacctttgacgctggggc

SEQ ID NO: 5761 - DNA, 25327 bp, Homo sapiens
ctggcatcctcccctccttcccacttctgcccccaccccatgtctctgtccttgtcccagccaggccctgctccctctccagccttgacagcccctccccctgcctatgccaccctgggcccccgcccatctccagggggctctgcaggggccagttcctccacctgtcctctgggggggccctgagagggaaggagaggtttctcacaccaaggcagatgctcctctggtgggagggtgctggccctggcaagattgaaggatgtgcagggcttcctctcagagccgcccaaactgccgttgatgtgtggaggggaagcaagatgggtaagggctcaggaagttgctccaagaacagtagctgatgaagctgcccagaagtgccttggctccagccctgtaccccttggtactgcctctgaacactctggtttccccacccaactgcggctaagtctctttttcccttggatcagccaagcgaaacttggagctttgacaaggaactttcctaagaaaccgctgataaccaggacaaaacacaaccaagggtacacgcaggcatgcacgggtttcctgcccagcgacggcttaagccagcccccgactggcctggccacactgctctccagtagcacagatgtctgctcctcctcttgaacttgggtgggaaaccccacccaaaagccccctttgttacttaggcaattccccttccctgactcccgagggctagggctagagcagacccgggtaagtaaaggcagacccagggctcctctagcctcatacccgtgccctcacagagccatgccccggcacctctgccctgtgtctttcatacctctacatgtctgcttgagatatttcctcagcctgaaagtttccccaaccatctgccagagaactcctatgcatcccttagaaccctgctcagacaccattacttttgtgaacgcttctgccacatcttgtcttccccaaaattgatcactccgccttctcctgggctcccgtagcacactataacatctgctggagtgttgctgttgcaccatactttcttgtacatttgtgtctcccttcccaactagactgtaagtgccttgcggtcagggactgaatcttgcccgtttatgtatgctccatgtctagcccatcatcctgcttggagcaagtaggcaggagctcaataaatgtttgttgcatgaaggaatgtctggagagctggatggggcatcatgaagagggtagggggtggatacaagtcatcacccaagcttctgggaggtcctggggctgggagagggtacagactcccatgccccttggctgcaccatggaagtgaccattcttcacggggtcttaagagggacaaacgttctggtgaattcctccatgggtgttgctgagcgtctgctatgtgcccatggccatgttagggtggaagggggaagacatgatgccaccccttcaggggacctacctcacagtgtttggggagacttgccctctccactgtctgaacctccttttccttctctgctttagtcaccatcatcactaacctccccatcccccactccacttgctgagtcccacttaccacctggcggcaatgaaccctcatctgcctgcctcccatcagctgtctggtggtggtggaggatgatgaggctcaggccagtttctcctggaaatgcaaagccttatatggtcttattggtacatgattgcagagaggggcacagggaatcctcccagctttagtaaaggagagactgaggtccagggaggggctgaaggatgtgcgagtggaactccagctctccgatccttgtttctcccccactccagcataagacctggaatccagaagtgaccctttctcaccatctttggggattctgtccctgccaccttagtcttattcatcttaattgcagtctccctgttctgaggagccaaaggaggaagagactttcggggaaagaggagaaggagctggtgacaggggtaggaaggtagacagggtcatgacctgaaacggtgtgacgactgctgacttccctttcctggacttgagctgatgaaggggaaatggtgttgcagtctcctctgtcagagccctcaggtgcagacggcacttgtctgccccctcagcctcagccttggcccacctggtccccagtgccctctcctctggctggggcaggaggacctgccggacatagccagatgtattacggatgactgcagtcagctcccccaggctcctgcttctcttgcctcctgcttttttccccagagctgtctccttatctccattcacttgtctatgggttactcctggaccctggggttaggagttggaatcaggctgttagcgataaaagggttcaagttgactcattttccttatcaggcttagtagttgaagtgacttgctgagcttcataattcttagagaacctgccatgaacccagctccctttctatgactcaccctgccaccctgtgacacatagagtctgaatggcaggtctggggctagaacccacgtcatctggacttggagtccagtgaccctttgggttaagcatgtgtgtgtgtgtgtgtgtgccatgatgcgggaggaaggtccctgctctctgtagctgttttcttcatcctttgctctacaagccctaacagccgattctgtcatccctagtctgcccctctcctgtttctccatctcctctgaccatgatttttttctgtccctggagggatgatggtctcattctcacctcctccacgaaacgtgttagcttttcatattcctagatccactcacttctcatcatctttttttttaaacaaaattttattgaaaaatgtaatatgacgtgtcaaagttgtaaagttattgagtaaataagcatgtatcctaaatattgaaaaatattctccttttgtaccaggctatgtgtcacggctttggcgctttgcacagactattagaaataccttataacattaaaaataggacattgaggccgggcgtggtggctcatgcctgtaatcccagcactttgggaggccagggtgggtggatcacctgaagtcaggagtttgagaccagcctggctaacacggtgaaaccccgtctctactaaatacaaaaaattagccgggcatgatggcacatgcctataatcctagctactcgggaggctgaggcaggagaattgcttgaatccgggagtcagaggttgcagtgagccgagattgtgccactgcacttcagcctgggcaacaagagtgaaactctatcaaaaaaaaaaataggacattgaagttggtttctttttttgatacagagtctcgctctgtcacccaggctggagtgcactggcaggatctcggctcactgcaacctctgcctcctgggttcaagcaattctcctgcctcagcctcctgagtagctgggattacaggcacgcgccaccacgcctggctaattttgtatatttagtagagacagggtttcaccatgttggtcaggttggtctcgaactcctgaccttgtgatccgcccacctcagcctcccaaagtgctgggattgcaggcgtgagccaccgcactctgctttttttttttttttttgccgccctctcacataccatactcccctgtatcacttatccttctgaagttgttattaaatcattaatacaactagctgggcatagtggtgtgcgatggtagtcttagccactcggaaggctgatgtgggaggctagcttgaggccagtagttctaggttaggtgagctatgattgcaccattgcactttagcctgggtgagagcaagctcctgtttcaaaaaaaaaattaattgctaccacttactaaatgcttaatatatggcaaacacttgccaaacactttatatgcttgatttaagcatcaagctagctctgtgaagggtaccagcaggtttcccattttttagatgagcagaccgaggttcttctcgctgcttcatactggaaacttgcacttgattctgaggctcctgcttcttcaagaacactgctttgggttcgcttctcctgtccctggggtctccctttgtgatggtggtgagctgcttcctttctgaatccagcttcaaccctacagttctccagaagctggacgatggggtggagtaaagtcagctccccccgcagtgagggacactgaagctccattctcatctgcggatcacagaggggaagccaggaagagccaggggacggtggacttggggctgggaggtcatctcagagggataaggggtgaggagctctggtttcaagttccaaagccctaggacctccctcttctctgtctgcctgcatttctagcagcctcagcagctagcaggtctagctgcctgcatttctagcagcccagcgcccttgggcggggctggatgtagggaaggtcattgtaccaagaagatagttgggtaaatgtggtacctttgttgtaggattctcttgggagatgtctgcatcaatgaggatggcataaagtaaccagagtcaggatgtggggtctgactcagtgacagaaaaagtggcagtgtgtctctcatagccaaaggggcccttggaccggcagtcgggagtctggggttctctgttggctctgcctcctggcacattgggtttctggacctcagttttctcctctataaaaccgggcagttgggtgggcacggtggctcacacctgtaatcctagcactttaggaggctgaggtgggcagatcatttgggcccaggagttcaagacctgcctgtgtaacatggtgagaccctgtctctacaaaaaatacaaaaattacccaggcgtggtggtatgcacctatagtcccagctgcttgggaggctgaggtgggaggattacttgaacctgggaggtcgaggctgcagtgagctgcgatggtaccactgcactccagcctgggaaacggagcggaccctcaaaacaaaaacaaaaatgaaaaacaagcaaacgaagaaataaaaaaacctagggggttgtagtcgatgatctgtaaggtgagttataattgatgtattggaatatttaggaaaagggcactgggaatatgctaggaacacctgatggaggtatctttatttccacggcagcttcgtggatacgtctcattgattctcatggcatcactttccccatgtaggtgggcagacattgttacccctgtttaataaacaaggaaccaacagaggcttaggagaggagttgcctgatgtcgcatgattggtggcagagccaggatcaacagtggggcagggtggggggacctggccaggcagagactggatgagacctggggtgaggaatggcaggcacccagtcagggcagaaaacgagggttgggacttactttgagttttggattggatcagtaaattcccaagaaagagggagactaggaggctagtgaagaactctggagtaaaggggaggattactaagggacatggagtacctatcatgtgtcggacgcttatctatatctctcccatctgaacaaatccttacaggaaccccaggagacaggttatctccactctgcaaattggaaaacagatccagacagtttcagttatgtgtctgagaagttcatttatgtgtccaagacacattcttagctaaaaagctaagcattctgaattggaacccagagaatttgactcccagactctggatcttttcactgctgtgatccatctgggaaaggctagtgatgtgggcaaggggcttattgccccttggtgtttggttgggagtggtcggattggtgggttgggggcacaaggcagccagatctgggactcctgtgcttgtgactggactacaaagagttaaagaacgttgggcctcctcctcccgcctcctgtggcctcctcctccagctcttcctgtcccgctgttgcaacactgcctcactcttcccctcccaccttctctcccctcctctctgctttaattttctcagaattctctggactgaggctccagttctggcctttggggttcaagatcactgggaccaggccgtgatctctatgcccgagtctcaaccctcaactgtcaccccaaggcacttgggaygtcctggacagaccgagtcccgggaagccccagcactgccgctgccacactgccctgagcccaaatgggggagtgagaggccatagctgtctggcatgggcctctccaccgtgcctgacctgctgctgccrctggtgagaccagggacaaagggaaragtgggctggtgggcgaggcaccttccggctggygtgggccctctccgggagggggccgagcctctcctgcccgggcctggtcctggcgccagcctcaggcctgcaggtcctaacctcagccactgccagtgtggggttccccattcatccgccttttggagtaggggctgcgctgaggcaggggaatgggagaagtttgaaagggagagagtaaaaggaagccctggcccctgacagcggtggaagtttgtgggcggccaagggaatgtgggcaggagataggcccagggtggggcagatttggcggggaaaagaagggagtgggagtaggaagattagtgctcggggagtccagacggttctgaattctgtccctccggtcagctggctggcctggagggtgttgggccgtggggaggcgaggctgcctgtggaacttggtggagcacaccctgtagggcaggattttggcggctggtgaagtgggggagtgagttgaggagtggggatgggctggtgtggtgggtttgggatgctcatggtgggaggtatttgagaatgggctgggacactggatggggcagggcaacccagtggacagtgtccccagtgccctggccaagccccggcctctcacctggggacattctttacccttttgcctgctgctaggcaggtagccgctgtgggactgagccttcccagggagctagtcctacccccacctggtcagtgtccctgggcctgtcctccagcttcccctccccgctgcttctcacagacctaaacaacaatcccttggtttcttattctacagttcagtttggggaagttggtagaaagttgttttcgtcactggaaaatgtccctttctctggcctcagccttgtttcaatgtatccttgatcgtcctccacgtcttggtccgggaatcatcctgttcagatgtcctgggcccatctagtcaggcagattttccctgccctgcccggcctctgaaggctgcgcctacctcccctctctttagtgccttatactcttcctctcctaccattcctttcttccagcaatctccccagactctcctcagacttctcagagcctctttttttgaaatcttttctcgctaatcctccttcccctcctctctgctccgctctggtcccggccccaggtccccaggcagcacgtctctggtcagggtctcactcttcttcttctgcctcctcctgcctccttagtcccacccgctcttcccttcttcccactgtccttcccccacggtctccccaccagccagctgccctgacatcctgcttctgttttctgtttgggggcggcccctggctccctcacatacctcctgcatgaacaagagcagcttatataacctaaccttccatgccttcgtttctttatctccaaaatgggtgtcacagtcttgacctcatactgttgttttgaagattgaatagactgatacatgttaagtgttcatttgatttattaagtgtgcgctctgggctagacactgtgataggtgctgggattacagcagagaacaaaatccctgcccacagctttgacagtccatcaggggaataggttgtagcaaatagaaagcactcaataaagtttttatattgctgtgactagtagtaattactgggtggctacctgtgttgggaaaacagagggtaaaggtagcctgaacaggtaaagggaagtgcctgcgtcctggggtgcttcagcccaggtgggattatgtctcctaagggacagaagcctggcctggagctggargaaagggaaaacaaagggaatgcaacatccttctgaatttctcaccattcagtgggcaatgcagagctcacagtgtgtgtgtgtgtgtgtgtgtgtgtgtgtgtgtgagagagagagagagagagagagagaagtggggtaggggagtagggaagaatgatacaggagagactgtggcaaagcaaacaggattttgctgctctcaaagagcttacagcctagtaaccaagatggcttacagtgaaaaatgatttcagagcaatcccgaggaaaatatccacaaatgcattgtgatgtggtgtcctggagcaccagttgggaggaggaggaactggggaaggaggtgagccttagtccactgcctttccttgcttagcaggtctcagctcctgcgctcagctccagaaaattcaggagcttccccacgctgcttcagtgtccttcactgtgcaactgcagcactccctgtatagatctcagtgcctacaactgactgtctttgactcaagtgagagctcttgagagcacgagctgtgtattatccacctcagcatccctagcacccatacgggacctgtcacattaactgtgccccttaactatttgctgaaggaattaaggaacaagagatgtgtcagatgggatggcggagggaaagcctcatagaaaagtggatgtggagctgacatctgaagtcactgcctgtcagggtagctataaaggagggaagcagagttggatactgatgtgaggaagaggagaggaatggagagatgggattttgtgttgatgggcagggtggcaggaagccagacaccttggttcgggagtggaaaaaccatgttgagaaacactaagaaatgtgaatgggagaattagagggagtgggggagaggatggaggaagagtgttgaatatggttccaggtggaggaattcattcattcgtttattcagaagctgttctcctagggcacattctgtgcccagactgtgattagaagtgaggtgaggcatctcagatgggtgctgtggttcatgcctgtaattccagcacttcaggaggccgaggtgtgtggattgcttgagtccaggagttcgagaccagcctgggcaacacagcaaaaccctgtctctacaaaaaatacaaagattagcggggcatggtggggcgtgcttgtcatcccagctattcgggagactgagctcgggaggacggcttgggcccaggaggtggaggttgtagtgagccctgaccacaccactacattccgtcctggtggtgaaggttgcagtgagctatgattgtgccactgcacttcaccctgggtgacagagtgagaccctgtttcaaaaaaaaaaaaaaaaaagtagtgaggcatctgtggaagtcttcagatcatttccatgaccatggaaatgctgtttggagccaggccctggagatggagaggaaggttcacacacttgtgcgtgcaagttaaagcctgaatgaagatttaaaaagtgtgtaggacggatgggagcaggagagaggctagaagacacttgcaataacccaggtgtgaggcaacccaggaatgcggagaggacygagagatcacagggggaggcctcgcaagatgaactgacacatgggatggcggcagggatagggatggggccctggggagagagcgtggcaagttctcagcattcgtccgggaagtcgatggtgtgtcatttgtctaggtgaggagatggatgaattccgtctggggcatgttaagggtcagggaaatggtcatgtggaagggtgcgcctaccaagctggaggagaggtgctgcaacttctttctgcctttgtatcattcagacacactgtgttcactcatcagtggttctcaaaaggagaggagcacaccagactcttaagtaagggtgtgtgtgcttgtgtgtggggaggtggggggatggtctgaaaactctcccccggagataaatatattcctaccaggggtgctgtctcctcacctccctctttgggaatcactggcttctactagagtggaagacagatgtatcattagatcgatcagttgatccatatttatctgctcccagtctggaggtctggttctgggagytgagrggacaccaggggaggataagacactttctgaccaagacattttttgatctctcatcttataaggttcgtggtcactttggggagatcatatctgtcacccaacataaccatattatgataagagccaaaagtagatagggtcagttcacgtgcttcgagttcacagggactatgggtctaaggagccggggtggaggaaacagacatygtcaatggtggcttcacgggagggagatgggatctcaactgggcccttggaggagaagctgccacgacctcccccaacaccttgacattaaatgaacagacacatgaatgagggggaaaggaagactaattgggtccctgcaaggtggctggatcggggtcagaccacaaggccgatctcagcgtcgcctccccactctgcagccccagcacaggaagtcacactttaaagcctcctctggcggaaattgtgggggagttggaggggtgttgggccaccccctcaactgtctctccacaggcaccccagcttcctgcccttctgctccaggctggagtctgggcctaaagagctcacctcctgtttctcctgttttgcttcatttacgcaactgctgaggactgggcttactggggccagctggtgccagcagtggtgcccagtggtggggagtctgagggccctggctcctagggatcagagagggctgacctggagcattctgggggccaggggaagcctaggaagcagggctggttcttccatccggcatcccttcttgcctgctccctcgttcctggaagtgggtgttcagggctctggaggctttcctgtattgccagtgggcttggggagggtctgtggagactcagaactggccttgtttcctaaggattgtctggggaccccagggaggcccccaaacccagcacaactggtcagaaccagccaggctgtgggaatgcggtgaacccagggtgggagggcagccttggcttgcttcctgctgggackggggagtgttgggggatggagtgagagctcacggaatgggtttagctgttggagacttgttgaactgggaggaggagctggggcggggcctcagctaaaggccgctgaggggctaggaggagccaagtggccctcagggaagggagggcacagacctgatgggcggaagccagggtcgagggagacttcccttcgggatggaatggggagagggaggcatttcccggaacatgtgggccaagtgggacaagggtctgtggcctggctctttgcatggggaggggatggatgggggttgagtggggatgggaaggagggacttggccataggaagaagggattagatggagtcccacttgcatgcaggctggtgccttctgcctttctgctgactcatgacccttgaggagctggggaagctgctagttccctctcccctccctaggtctccctccctctggcctgagtcactggggcggagttgctgggaaaagatttccctttcccggatctgacttaacccccagagtgctggaaagagaagggaacacgtggcctgagaaagcctctctccctccctccctccagggaggctcatcccccactggccagaggtccctgaaaagctccctttaaggctgtctggggctggsgtcccccagttcttcatcatgactctgcctcaagccccctggatgggattcaaagtaccagtgaccttaggtgctccagtggcttcttcggggaaaggaaccacactttcaggactgggaagttcttcccatcaccaccccaaacccttcctgttgccctggaagccccagtcctgttctcagcagaggtggcacggtgttggctggtgcgggcaggggaaggttgttgtcctctgagcaggggcacacgcctccacctgcgggggctgctgttgtgtttctgtgtgtggcttcccctgtttgcggctgaggcttgaacttccgggcctgcacagcttacagctgcagcgtctccccgtggctgactcagggtgactggcctcctgctccgaaatgtggagttggtgaggctgggtggctgtgggctgcctgaccctccttccctgccctagggtttctgtgatctggtgagtcagttgctccccagtgtttaacagacattgaggacaccctcttatctttacacaaagtgtctcttatagtagaaaaaaaaaatgaagcccagggaaaaccagaaatgaagctggcagagatcaaagtccaagttagagctaaatattcactcctggctttgctttcctggcactgatgccggaacaggacaagccatttagctgctgtggggttggcctgagactgcaaagcacaccttccagaatgccatggtgtgcagggggctccaggactccccagcacgccctcagctctgacctgacagtcatccaagctgggtcgctagccttggccagctctatttgcctatgtcctgcacacctttgcccactcctgcccccgtctcaactttgtcccccgtctacccatgcaggatccccaacctttcccttttactctcctccccatttgtccttgccaaccccgggtgtttgtaaattttgaggtggaggggatgggccagggaatgtgagggcggaggcagattgaggtttgatacaaacatgtaaataaacttccttcttctgtccactccccaggagtggtgctcacgggaacatcactcgcccccaccgccagctgactttttcagaaagcttttcatggtgtaacatattcctgggatgtgcatagatcctcattgtttacctctgtgaatgttcgcaaagcgatcacacggtgaacccagcacccagatggagaaacaccgccccaatctttagggctgcttgttggaagaaggggccatcactgaagtaacctgccaattcccaatcaaaaacacatcctttcaacatctgccctgtgtccagcactgttagctgctgtgggggatttcacagtaaggataaaatacagggctgggctcacgcctgtaatcctagcactttgggaagccaaggtgggaggatcacttgagcccaggattttgagaccagtctgagcaacgtaacaagaccctgcctctactaaaaataaaaaaaaattagctgggcatggtggtkcacggccgtagtcccagctattcaggaggctaaggtgggaggactgcttgagcgtgggtggtgragggtgcagtgattgcatcactgcactccagcctggacaacagagcaagatcctgcctaaaaaaaaaaaaatacagcttagatctggggcctactagctttgagttgagggaacaaaaatgaacacacaggacaactagagaacaattaagcatcagattgtatggccccaactgtctaagtttcaaggaagaactctaaacttagtgagtggcgtggcctgggcggaatgtttcactgaggaaggacttgagccagggaagttttagatctgctacccctaagcttcccatccctccctctcttgatggtgtctcctctatctgattcttccccaggtgctcctggagctgttggtgggaatatacccctcaggggttattggactggtccctcacctaggggacagggagaagagagatagtgtgtgtccccaaggaaaatatatcyaccctcaaaataattcgatttkcystaccaagkrccacaaaggtaggggcaagtggaaacggtgaatgccctcaggtctggggtgctgcttctttctctgcttcttccagttgttcttccctaactttgctgtctctcctgggctgggattttctccctccctcctctcctagagacttcagggaatcggccctggctgttgtccctagcatggggctccttccttgtgttctcacccgcagcctaactctgcggccccattcacaggaacctrcttgtacaatgactgtccaggccyggggcaggatayggactkcagggagtstgagagcggctccttcaccgcttcagaaaaccacctcagacactgcctcagctgctccaaatgccgaaagggtgagtgtgcacaggcaggagagtcaggcgggtcttgagtggtgtgtgggtgcctgtctatgtgcaggctggtgggtgtgggcaggaaggtgtgtgttttggtgggacactgcatggatgtgagtgtgtattacagagacacacacttaggggtatgtcaggaaggggatgcagggacaggaggatgcaggactcataccccatcttctcccctcaccagaaatgggtcaggtggagatcycttcttgcacagtggaccrggacaccgtgtgtggctgcaggaagaaccagtaccggcattattggagtgaaaaccttwtccagtgcttcaattgcagcctctgcctcaatgggaccgtgcacctctcctgtgagcgcagctctcctgaggccaagccctctccccaccccaggggttggccccttccccatgcggtggcacttcctttccktccccctcctgtattctgtgggtctgacaaccaactcctctctggccgcccccaccctgtccctcrtcacttcctctgtcctgtggggtgggggtgcaggcgctyctcctttagctgtgccgcacttctccctacaggccaggagaaacagaacaccgtgtgcacctgccatgcaggtttctttctaagagaaaacgagtgtgtctcctgtagtaagtgagtatctctgagagctgctgggcactggatggtggcatgggttgggacgggtgactggtgggaaccattagctgggcaacagatgccaggatgccccagagtgctcagggtcctactggctgagtaggagacacttcgttaagacaccaggcagtccttccccttgctcttcaaatctgaagaagtctttgaggatggaagatcatgccccaagggctggcagcccttccaactcagatatgtagattcttggatctacgatagctcattggttctaggacatacactcttatagctctgaaatcaaacctcctataactggtgactcatcatggttgaattggcagctctgtttgcgtctgggtagtaatgtaaagaaaagtgccttttattcttgatggcgtcttaggtttgatgcaatatggtatttcctcattagtcactgtccaggcctccttactcctggctccacagaggctgttcttgtcactcacttgcaaagaataaactctgagggctctcagagtttgaaccccagcatagccacttactggctatgtgacgttgggcaagtttcttaacatctctgagcctgacttttcttttggtgttttttttttttttttttttttgagacagggtttcactctgtcacccaggctggagtgcagtggtgcaaccgtggctcagcctccacctccagggctcaagccatcctcttgccttagcctcctgagtagctgggattagaggcacacaccactacacccagctaatgttttactttttgtagagacagggtcctactatattgcccaggctggcctcggactcctgggctcaagcgatcttccgcctcagcctcccaaagtgctaggattacsggcatgagccaccacgcctggcctgggccttagatttcttatatttaaagtaagcataatgacattcatttggtgaatttgtgagaaccaaaaacaaagaaacaaacaaaacctacaacacgtctgacacaaaactatttattttccattaatcttcttttttttttttttttttttttttgacacagagtcctgctctgtcgcccaggctggaatgcagtggcgcgatctcggctcactgcaacctctgcctcccagattcaagcaattctcctgcttcagcctcccaagtagctgggattacaggcacgtgccaycatgcctggctaatttttgtatttttagtagagatggggtttcaccatcttggtcaggctggtctcaaactcctggtgatccacctgcctctgcctcccaaagtgctgggattacagccgtgagccactgcacccagccggcttcatctcttcttgaaatcacttttataccattctatgtggttctcaccatgagcttgagtggtgggctaaagtgcctctccctgctttcagcttcctgctgggaactcactctctcaagttccttccagcaccaccccatagagttcccatcactccacactgtccagtgacaactcccaacatggaagatctgctagttctacagggtgctctctggctgccccagtaacatgtgtttttaaatttttcacatgcatgtttgaccccgactccccgaagtcaggtactgtaactagcagtgtcatttaagaaaaagccctttaacctctctttgccaaaggattcttatcagcaaaacagtgatgaaacaacaatcccataacagctagctggctaccttctcaagcacttattaaatgaggcataatgattttgcttaatcctcaatcctgagaggtgggcgatccctgtggtgatgaggaaaccgaggcttgggggttaatggcttgcctagattcacactgctagccaaggaatgaactggaatttacaccctgaccctgactgcttttcacattttctacacagccttttcaagatccctgccaattctaaaattaaatgattctatgattaactgtgtttcattcttctgcatcagttcccaaaacaaattatatcaagagacagcaaaaatatttgtaaagaaaggatgtccaacaatctgtgtggttgtttttctgtgttcctccaatggtagggcctctgttcaccagtgccgtctcttcttttagctgtaagaaaagcctggagtgcacgaagttgtgcctaccccagattgagaatgttaagggcactgaggactcaggtgaggagargtgacctggtgcccatgctcacctgccctctccctcttcttgcccccacccgtccatccatcccacccatccatctatccctgcggcccccctctgcccgctcctctgaccaacacctgctttgtctgcaggcaccacagtgctgttgcccctggtcattttctttggtctttgccttttatccctcctcttcattggtttaatgtatcgctaccaacggtggaagtccaagctctactccattggtgagtgggggctttgggagggagagggagctggtgggggtgagggaggacatgggtgggtgcgatggacatgtgtggagggaggtgaggagtgtcccctcagttcataccgctggggactctgggcagaaggtggccctggatggctggggagatgtcgagctgcatcagtagctctctcgtccctggggccacataggccctgaggcatgtcaccacaagtcccyactgccagctgagtccagggtgccagggctgagagaggaagtgaaatttatgatgctttctttcttyttcctcagtttgtgggaaatcgacacctgaaaaagaggtgagatgaaatgagagagttactcccaaatgtccctgaccattccttataattgcctaatgctcagatcccctggaatcatccttcactttccgggggctcgcctcattccctctaagtcccaacccccacgtagaataaagagggccggggctggttttcgctgccgcactaatgctgcgccaccttctctctttcagggggagcttgaaggaactactactaagcccctggccccaaacccaagcttcagtcccactccaggcttcacccccaccctgggcttcagtcccgtgcccagttccaccttcacctccagctccacctatacccccggtgactgtmccaactttgcggctccccgcagagaggtggcaccaccctatcagggggctgaccccatccttgcgacagccctcgcctccgaccccatccccaacccccttcagaagtgggaggacagcgcccacaagccacagagcctagacagtgagtttctcccgcggctggagacgaggaggctgggggagggccgggggagcgcgggaggcgctcccagaggggaccacgagaggcggagggcgcgggatgcggggcggggcctggggttgccgcccgaggctcaccggcccgcgtccccgcagctgatgaccccgcgacgctgtacgccgtggtggagaacgtgcccccgttgcgctggaaggaattcgtgcggcgcctagggctgagcgaccacgagatcgatcggctggagctgcagaacgggcgctgcctgcgcgaggcgcaatacagcatgctggcgacctggaggcggcgcacgccgcggcgcgaggccacgctggagctgctgggacgcgtgctccgcgacatggacctgctgggctgcytggaggacatcgaggaggcgctttgcggccccgccgccctcccgcccgcgcccagtcttctcagatgaggctgcgcccctgcgggcagctctaaggaccgtcctgcgagatcgccttccaaccccacttttttctggaaaggaggggtcctgcaggggcaagcaggagctagcagccgcctacttggtgctaacccctcgatgtacatagcttttctcagctgcctgcgcgccgccgacagtcagcgctgtgcgcgcggagaraggtgcgccgtgggctcaagagcctgagtgggtggtttgcgaggatgagggacgctatgcctcatgcccgttttgggtgtcctcaccagcaaggctgctcgggggcccctggttcgtccctgagcctttttcacagtgcataagcagttttttttgtttttgttwtgttttgttttgtttttaaatcaatcatgttacactaatagaaacttggcactcctgtgccctctgcctggacaagcacatagcaagctgaactgtcctaaggcaggggcgagcacggaacaatggggccttcagctggagctgtggacttttgtacatacactaaaattctgaagttaaagctctgctcttggagacagtggtctgtcgggatgggaggtgggggcagaggcccagatcctgaggggtgagatgggaaaagccctgcactagggccaggtagcccatcaccatcacgccaagtgacagaggagtagcaggttcttgttctgaacaccgtcatctgttgcccaagctggagtgcgctcactgcagcctccaacccttgggctcatggggtcctcccgcctcagcctccggacacaggcacaccaccacacctgggtaatttttaaaatttttttttgtaaagacagggtttccctatattgcccaggctggtctggaactcctgggctcaagggatcctcccacctcagcctcccaaagtgctgggattacaggcagccatgcccagccagggcagtcatttttatgcacaactttctgtggggctcaggtgcacctatgatacataaatttacagttcttgatccccaaacagagcaggaggcagggtgcctgggccaggcttcctttgggaaatgtggtccttgaggtagagtcacagatgccggagggtgaccagcactactggggagagatctcctctgggagagatgcatgccaaaggtcctctgcattcctcatacctctctgaaaagacaggagggggtgttaggcgacattcagtggcaacgggtgagggtcaggtgaagagtgaggcggagagcccttcctgcctcagcccctgttcctgctttgccctctttctatactacaccccaccaccatacagacatccccgtctgccccctcccaggccagcttccctccagcacttacgatgcggacagaggggtgtccagctgaatgatgtggggcccccgcatcctctgcagctgggcccgagtcagcttccgtggcctgctgtcccggggctcctcggccccctcaatcctttggctggccagctcctcccggatctctctgagcatgtcctcagcccgcattgggcgcagggatgtgtggccagctttcaggaacagaggcccctcttcttcctcctcccctgaggactcccaggggctttccccggcagagtcagcatgggttggggaggagggaagctggccccgaagccgggccctgtggagtgtttccaccaccacattccctcgctcggaggccccatcttcttcctcagaccaggttggtgggtcttcctggggaagactgcctccttttaggattccttccggcagttcgggggcgcttcggcgttgaggagcttgggggtcgggagggtggggacgcagagggatgtcccggagttccagggtggagaaggtgaggcgagggtcccgccgaagggctctttggcgtagacggctcagtggggagcgggaccccgtgggggtgcctgggatcaaagtgccgtagccagagtctgaggtatcatctggcacaaggggagcatcttcatctgtgtcttctgtcaccaccaggtgggggataatggtcgagaactcaggagtcctacagttaatggcaaagagtcagatgcgtaggggtcaagttcaagtccagggagtttcccttgatcactacatccagaaatggcccctcctccaaacttattttggtatcatctttccatcgcactgtgattgtttttctcatctggctggctagattttaagctcctaagagagtacgggctgcctctatactgttttatccatagcatctggtccaggatcttgtatcgagtgggtagtcaggtttttgctgagtggttcctgaacttacctgatattatcctcaatgatcgattcttcttttctccttaagctgctgccaagcagtggtgctatcctagacgaacctcacactccccggggatttggcagctctaatattctgcagatccacacctaccttcactctcgagcttgctcctctcacagtgctcctgtgtgactctaggcaggctaactctgtaggctgtctgtgccctatcccccacctccaacccaacacggctggtaccaaccttccgacccaacacagctggtaccgagcttccctaccctgccctacgcctgcgttcctctatctattcccaattccaccaaaaatgtgcagtaatgccatttctcagccttatggctccctcctcctgctcggggagaccttgtagtccgtgtgagccttacctcccctctgcgctgctctgagagccctccagggaaggcgtggagggcctggtgctgggggactccctgtcctggtcccgatagagggtcaggagctccctcttctgttgaacatactcctctgccttcagcttctgtagggcggcctgggacaggacactttcgttattaagagctctcatttattgagcacttgctgtttgccaggcaccctgctaagtgcgttacatatattaccttattttattttattattattattattttttgagactgagtcttgctctgtcacccagactagagtgcagtgccacaatcttggctcactgcaacctccacctcctgggttcaagcgattctcctgcctcagcctccttagtagctgggattacaggcgcccgccaacgtgcccggctaatttttgtatttttagtagagatggggtttcaccatcttggccaggctggtctcaaactcctgaccttgtgatccaccccccttggcctcccaaagtgctggaattagacgtgtaagccaccgtgcccggcctacattaccttatttaatctttacaaaaaccccatgaaccagatatttttaccccaccttactactgagacatggagactctaaggttaagtaactgtctgagggggtacttcttaccataagaaagtggggtggtgccgggatttggtggcaccaaactctggagctagtgttgggggtgagtggggtgaacagaatggcccttttcctacctgtacaggtcttcctgcttctcatgtcccattggcagacctgttatcaggtcttccccctccttcaggaagccctccctggttggtggtgatggtagaataagtgttctgaattggtactggttgctccttcaagagcatccctctcctaccacctgggcctctgccctgaagctgggaggagcaggagggcagaacgtgggcagaggtgggctttgtcccaggctgaggactctgctgtccttcagagggaggaaagttcctagaaggctgaggagaggacgcattatattatctgccttctccctccctcagcgatttcatacaggtaccatcaaaaggaaatagcgccatctgagaaaaaattttcaaagcacttttgcacatgtggtcatttgatacacatcattgccctgtggtgtggagaacatgaatgttagcccattttacagacaagaaacctagacctagagaggtgaagtgacttgctcaaggtgccacaggtatggagaagcagagctgggacagggccttgctctttgagtcctagttcagtcactgcaacactttcaaggacagccttgaagggtaaagagttacagaaggtcggttgttggcttggggaggggtagggggagggagagggaagagaaggtggcagagctgaggttggaggcggaggcaagccttggcaaaagggaggtactggtggctgctgtgggcagcactgatatcaggacttgctggtatggccatatccttgttaaaatattgaagtcttccatgctggtaagggaatggctgctgcctgggcctcaaccacttcccccatccccatgatctagcaactaagggagataacctctggcacagcagaggacctctagtgcagcgctcctttctgattggttgatgcccatgctatactaattgttaaatatttccactatctccccagcttgaagtatatgagccagcaactcctgggcacctggactttcccaaagcctctcaagaaacccggggagcagctgggtcaggacaagagacgaaatggatgaacagggataggaaaatgacaccaggcttatagttcccattctgctttttctggctctccagtcacttattcccaaggctgacagcattctcataagatgtggtctgttggccggagcaggggagggtacctgggggtaggaaacctgccagggccgggacctggggcaggactccctctttcccaggcctcatctcccaactccatgtgaagggagggaagaagtgagaaaagagagggtggaggcgctgggccgatctgcttgtcctgctggggtgcccttttgccccacaggacccaaattcaggtttgtgtttcgggtgccaaggaagggatgttacgggaaagaagaactggaaggaagcagggtttctgtaagggacgttcaatgccatcatctctgctaaacttgccccttgcccgaccccaggaagaggctggaggaggcggcggcgggggaggggggcgagggggagccctgagtacggggtagggggtcgggggaatgggcgggatggggctcttggaggtgcctcccagcgagcccaaagcctctccagcaaccctgggagaattttctcggcttggttaagaggagagacacatgggggcagaggggacgggaaaggaaaaggaaattggcgcttaagccagaatgtgacccccctacaaaactgagaagaggaagggagggcccctagcaggattcttcttcctttgtacccatggagaggaaatgcctcctttccctgctgtctctggggtggctcctagattcacccactctcctcccagaactccccagtgccggactaaaaccgaactctgaaacgtgcccactgacttcctgagcaacagatgcggatgcgtttccccagtcagcagcaggccctacccaggccccaaagaccacccctttcttctaatgatgacaacggcaaacatttatggagtgcccatacagtgctgggccttgtgcctggccacttgcggactgtctgtcctgcgtgcactgcaactccccaagaggtgaagtaactccctgacagctgctcgggcctctccttcagaccctggctcttagcctcggctgcctccttcagtctccctgctttaatttcttggtcgccatctctgacggctctttctgttcctgtctctgttccttttcctcttctcagtccctgggcattccccaagattcagtctcttctccctggagaagcttactttctctaaaagtgtgagtcatcacagctagacccgctaggaataaatctgcaagtcaacgtttctgccagggtgagaaaacaatagtctgccccctggggattgctctatgaaagggaccaacagagtttctactgccctcttcagtgtataaagactgatggctctagagaggattccctaataatctggtgtgagacaatagcaggaaaagtcatttcaaagtttcagttttctttgttttgctaaggaaggccagggagccttggtgcatatcttggttatagatcttgacagatctttcctgttagcctggagtgagactaccaggggactgagttgttttgcatagtaaaatacccgtaattttcagtagctcttgggattctgaaagggagaaggtgagagtctggctgttgttctgtgactaaaaaccaaaaaaagaggagaaagttctgaaggtggaggtggcagttccgaaggaaaaaaggcagcctgccattcactgccagccccactggctatcctggggagttggggctctagggacaccgatgccactagcttgcgcttttgtccctgggctcccccttgagcctctagccttcaggaaaatgttttatttaactttttttttttttagacaaggtctcaccctgttgtctgggttgtagtgcagtggtgggaacatagctcaccgcaggctctatctcccgggttcaagtgatcctcccacctcagcctcccgagtagctggg

SEQ ID NO: 5762 - DNA, 53331 bp, Homo sapiens
atccccgccaccaggatgatccagccactcacctgccacacagatgtcaaagtagtcaccaaactcacttcggatgtgcttcaccaggtccactgcgtagttgaagcctccctcctcctcttcccactggtcacctattgggtctgcagggttggtggaggtcatagtcactgggtctcacccaacctccagagaccctttctgttccctctacctagccccgacacccaggactgcgagtccctggaaggcagaaacttcatattatttaggtttggttcgtctctttctagcacttggtaagacagcaggagggaaaaaagcagcccaccagttcaatattcactgcatgctgaccctgtgctggcggtggagaataggagaccaccgctgcttctcaccgtgcctggaggattggagagcccttccctacttctacctgggcacgcctgccaccctctcccatcccacggccttggggctcctgcctcctgggagaattttctactcatctcaagtgaaggggtcttgtggtagggagcacgaggccataggatcccacccatcaggctccctcttcccactcttaggtggcctgacaacagcgggcaccagaggcctgaccggctattctcactcctggatactctgttactctgtgattgggccaagtgctgggtgcagccagcaatcgatgcagtggtgtaggcaaggcagagggttatcaggccgcgactgcattcctgacggaactcctatgtcgaggtcaagaggtggaagaggtggctgcctgtgtgtggtgcccaggatgactcactacccacaatgcctactgacactactggcggggatgggatcctgcggatcctcagcgtggggcccaggaagaagtaaaggaccatttcaggaaccaagttcaggctaccaagtggcctccgggaaagccagaacccagagtgtaggggagtgctggctccacacctccccgcagcgccatgatgttcttcaggcccagctgcttagctttgtgcagatggcccgtgatctcctccaggcgctgacggcagcaggtcatgtgcaggatggtctccaggccacagtagttcacggcggtgctggcgatcatcatggaggaggtctccttgtctgagccagggtcacctgctgggtgccaggtcacgtctatgtagagggggccacctgctgccatccggtcaaacctgtagggggtttgtttctgaagagaggttccaggagaaataccatccgtcactgccttcccatggggcccgggagttagagaagcatcaatgaaggttggagacagaccaatcagcgttcatatcctggctttgctacttatagctgtgtgatcttgggtacattacttaatctctgtgagttctgtttccttatttataagacacggcagatagtagtacccacttcataataacactaggatgctgggcgtggtggctcacgcctgtaatcccagcacttcaggaggctgaagtgagtggatcacttgaggtcaggagttccagaccgcctggccaacatagtgaaacctcatctctactaaaaatacaaaaattagctgggtgtggtggtgggcacctgtaatcccagctacttgagaggctgaggcaggagaattgcttgagccaggaggcagaggttgcaatgagccaagatcacaccactgcactccagcctgggccacagaatgagactctgtctcaaaaaaaaaaagcaacaacaacaacaaaaaaccataacactaggagaatatgacggcagctggttccacagaacttagaacagtgcctggtgtacaaaccgaatactcagtatatgtgaggtgccgttataatcactattacagaggtaagacacaacaacagcgctatcattttgtgtgagagcagcacttcagacttttcacagcgcttgcctgtttattatctcaggtgagttaagacatcatgattgagagttaggggaatcctaactgtggcaagcacagcctcgctgtaggaacagttagaaagagggtcagcagactcactttctttcatgccaccccccaagccctgtgcagcagcttacagttatgcagaccaaggccaagttccgaaacgagactcaaaaaaaagcctggatgtgcacgagtacttgtgttacaagctatcaacggtgtatttaaacatccttgtgcatttaaacttcaaaaacttgggagtgacacgtgagacgtgcatacagtaaaaggcataaacttaaaaaaaaaactgcaattcatgaagtgctaatgtaattcagttggcatttctagagttcaagaagcataatccaaatttctaacttgctgaaaacaatctcactgctttgtgacttcctaaactgcactcgtgatccagcccccaagttccctcaaagaatacagtgtgagaatcaacatttttaacccattgaagagtgtgtctaaaataccttgacactgtggagggacttttacaggcaacagagaagttgcagatcagatgacccactctgccttctccttcctgccccctccggctgcttttttctgccgggttaaagggcagcccagcctcagggctgacagtttgctccccaggcaccaccactcccgcctcccaccttaaccttgcatgagtttaccttgagatgagattgacagctccctcagcagttcgaggagggaagaattccagggagaaccacttgtcaccagattccaatcgccgcctcatcttctcccggagtctctcatgccgctcggggtccaggcccggggtggaacatctcgaactatctttggagctctcactgccactgctggcactgccctccaagcaggggttgaggctgctgtttcctctggcttcgttcaccatggctgggttcctactgcacagggtggggcagggagcatcagggggcaggcagccacacccccgacacatcaagacacctgagtggcaggttcaagccggaggcgctgtatttccacacaggaagaaggccaaaaaaggtgacactgccccctcccagtggctccatgctcctcagctatggctgtccgggccgcctcactcaaagccttgccctccgctgctgccaggctccttgcatgcaaggcagcccccacccggcactgcaacatgctcctcggtgacagctacctgatggaaggtggcacagaggacctcacgctgccgacctgcgaggcccatattcctagcgaggggcagtagtgcccagctgggaggaccctggcttttcgatggtccatctctgtcagctcaggcccagagtgcgtggggagggaacagaggcaccttccccagcgggtgtgttcaactgggcggagctgcgacaaaggaagaggcttgagctccagccagcacaagggggcgggggcaaggcttccaggcgaggagggagggctgaggctctagtaaggggaggcggatggaaggagggggactcaggggcagagactgcaggggttggtggagatgaggccaacaggcgttcagggataccagatcaccctccagagaaggaacagctcactctggctggctctgcctggaacatctgttacttgaaacagttcgtgcacaggatggaaggggtgagggcttgactatgcagccagatttctcctgaattcatgctactccaaaaagaccgtgttgtgggttagaacttgatgctggccatgttccaaaaatagccagacccaagttcagtaagggcacgaatttctcagaacaaaagctgccccatctgtgcttgccttgcaggctgctcttcttacacatcacagaattcaattcaaatcatcacagtgacccagctactgggaaggctgaggcagaaggattgcctgagcccaggagttcaaggccagcctgggcaacatagcgagactccatctcttaaaaaaacaaaaaacacacctgtaatcccagcactttgggaggccgaggtgggtggatcacctgaggccaggagtttgagaccagcctggccaacatggtgaaatcccgactctactaaaaatataaaaattagccaggtttggtggcgggcgcctgtaatcccagctactctggaggctgaggcaggagaatcgcttgaacccggaaggcagaggttgcagtgaaccaagattgtgccatagcactccagcctgggcgacaaaagcaaaactccatctcaaaaaaaaaaaacaaaaacaaaaaacagaaacaagtaatcagagccaccagggcacagacaggccaacagagggcatagggtcatctggcagtctggttaagaaaataagacaaacacttaaaaacaaacaaaacacttgcacagcaatgggcaaacacacagtagtgaatgggtgtgtggtgacatggcacaacagaggaaagcccaggtgaggttcatttctttcagactgtccaccactaaccctgtgtacctaaccatttggggtcttagactcttttgacaatctgattaaatgcactgctcccttcccctgaaatacacacacaggtgcacagactacacggggatacatccaaagacaaggagttgattccagactaagaaccctgggccaaagctttctccctctagggctgctctctttcattctgacctcaaactccagattctcagtggggatggctgtggggagtgaggaacgggggcgggggggaggagtaacagcaagagcagccagttggctttcctccagcgtttaagggcgcacctcgttaattgcttgctggaacagaacctagagtaggaggaagctgaaccacctgtaaaccctctgattttcaaagacttattgcattcctagtatatgccacgcatgtgccatatttgtaagccaactcccacgatttatccgttatcagctggactcccatagcaccctgggttgtaactgtgggtgaaaaggcctgtctcctttctctttccccagttccctgagacaggaccggtgtcctgcctggggtatccccagagtttggcacacggtgatagccaacattcactgagcgccaaagggccaggtgctgccactctctcaaaataagcctctgccacttactgaacaactagtctgcgccaagcactgggatactaagcctacgactcccagaaaggtcccggcggacccccgtgcgcagcgggacgcagtgggcgccagggaccgcagtgccccgggcccagcgctcttctccaggtgatcgccggggaggcaggtttaaaaggcaggagccggaagccgtctcggcgcccaggtggccgagaatccagtcaccaggtcactgagtcaccgatgggggcgaggacacgggcctgggccggtcagaggggcgggatcgtcacccctggctcaggggcccctccgtccaggcagggagccaaagtcagtcttcgcttgagggttggcggtcgctggaagtggtagccattgggagttacactaatcccgcgaagggtgcgcaagggaggcggcagccccccccaagaagagaggcaggccggcctccagcgctccccgcccacaagcacgtccttgcccccgggaggttgtttgccggctccaggatctccctcccggcgaccccggcctcgccgtcactcaccctccagtcccgggtgactcagaacgctcggccgccggccgcaccactgtggccgctgcaggggcggggaacgcagtgaaggggcgcggcgcaggtgtcaggttgctggagaggcgggcctacagggcggaaaccaccggcgcgggtgaccggaagccccgcccccaacatggccgtgcccacaggtctcgttggaggccgtgcctttatcgtcatgtgacgcgagtcctcgccccacccgtctgcagccactcctggtctcagtcccagagctcgagagggccacgtgaccgtcccggggccagtcacgtgaggcgcagatcctggctgggagggggttggtagaggggtccagagtggcagtaaaggaggaagatggcggggtgcagggggtctctgtgctgctgctgcaggtggtgctgctgctgcggtgagcgtgagacccgcacccccgaggagctggtaagaagccggcggagtcggcctggggagggggcggttgctaarggactgagagaggcgttgccgggggtggggccgggccaatctgggcccgcaggtggcagcgggtggggcctggggaccgcagccagggctctcgaagcgtctaccctgcttcacgtgcctaagtctggggtcttttctcataacccctcctggaatctgagggagaatccaggccagctccagtaaatcccacccatgtttccttttatttccatctgaaaagagtttggaatgaaacaagcgttttcagaatgagcttcctcacaggactttgtgcttatcatgctgctgttttagcttctccagtcctttctcactctatccctcaccctttctgggtcactgacagtccagcttccccctgcaaagcatcctgggaaaacttgagttgtgttcccagagttgacaagtcctttctgatttcagatacgtcacactgtcaaatggaacctgcatttttaccccccttttcagctggcgttggacatctttgaggtgtcctgaagaggagggtggttatttggagactatcagtggaaatgaagagctcagctgatggctgtagatcctcacccacatggtccctcaccccygaaaggttttttttgagggctggttcctatttgataatggctccagatgatttagaagctagccactgatttcagtaaatacttctgcctccttccactcctaaccactaaaaaaggctccctctgcggatctgtktttctagaccatccttggagaaacacaggaggaggaggatgagattcttccaaggaaagactatgaggtgagctcctttgatactgcttgggcaactaaagtagtgagtggcctggtcacttcaggccgaagcattatgattccaaccagagatgctctttgaccttctgtcccagggagtgagtgggtaagagaacttccttctaggaaagagactgtttagcaagcccttttctcaccttaaccccaaaacaaggtctggtgtttttacacgtttataaatctgtggcaccttaacctggatagagtatgtatttgccattaaactgtttgcttttacagcttacagagagacttagagtgaaaggcactggcaggcagtatgtgcccctaacaggtgtgtgcttataaactgttaaggaggccttgcttctcttctaggagagcttgcttttcagatattttcttgctcaagcagcttctctctgacatgttcttgattaagttccacctttcatgtatgggattcttagagtatgtgtttttagtaaagccaacactgctggggtgaaacaacatgcgtgactttttatcattaaattcttaaacgtaataaagaaggtagagaaaagcctataactccattcattaaaagatgactgttaacaccttactaagtatctttctacatccttacccatgcttttatatacatgatacatgctttttttaagtaacaaaaatgagattccactaaatcatctattttaacctgtcccactcaccccctttattatactttttgtatcattaggtaattttccacaaccttttcttttttttgacagagtctcactcttccataaattcttcatgctgtagaatttagtgtcagcgttaggatttgtagcacttttttgtttaacttttattatgaaggatttcaactatatgcaaaaacagaataatctgttgaaaccccttgtcctcatcacacagcttccacagtgatttagctcaagcccagtcttcttttgtctgtgctttcgttatccacttctcctttctcatattattattttttattgtatgtgtgtgtgtgtttgtgtgtgtgtgtgtgtgtgtgtgtgtgtgtgtgtgtgtgtgttttaaagtaaagacagtctccctatgttgcccaggctgttctcgaactccttgacaccagcgatcctcccatgtcagcctcccaaagttctgggattacagtcatgatctaccatacctggccgcccttcccatgttattttgaaagaaattctgtacatcatattatttcacccataattctatatgcatctctaatggataaggacttttaaaaagcataacccaatactattaccacatctaaaaaattaggaatttcttgatatcaaatatctactgtccagattttccagttttcttgtaaatgtcatatgtattttaactttatttgaattaggttccaaaagtccttttttatttgtttgataaatctgttaaatctcttttaatctgtagcttcttccttcatcttttttttttttttgtaagttatttgacaacataattaggacctgggattttctactgtctagattttgccatttggagccgtttgtatagtttaatatgctactctgatgggactgctttgaatgaaccaaaaagcactgtatccactgctgtgttttgttctatttctttttttttcttttttttaaatttgagatggagtctcactcttagtgcccaggttggagtgcaatggctcgatctcagctcactgcaacctccaccccaccctaggttcaagcggttcttctgccccagcctcccgagtagatgggattacaggcgcccaccaccatgcccggctaatttttgtatttttagtagagatagggtttcaccatgttggccaggctggtctcgaactcctgacctcaggtgatactgcttcggtctcccagagtgctgggattacaggtatgagccactatacctggccattttcttctgtttygtaagtatttgttttcttgtacatagttgagaagtttgcaggaattagtataagatactccatattgttctgtcaccttgcactccctcactgaaccctgttacatcatcctgactgtatcaccaggactgagactgtctcacagccttcatcctacttctaggagctcaccaaggcttccccattgacacccaggctccctcaccccttctactaaattgtacttacatttgtaatgtgcttgccttcagctgatatgcatattcatgtaaatttttgttgttsttgtcattgtttgagacagagtctcactctgtcgcccaggctggaatgcagtggtacggtctyggatcactgcgacctccacccccgcctctgagttcaagctgttctcctacctcagcctcccaagtagctgggactacatgcatacaccaccatgcctggctaagttttgtatttttagtagagatggggtttcaccatgttggtcaggctggtcttgaactcctgacctcaggtgatccacccacctcagcctcccaaagtactgggattacaagcgtgagccaccacgcgtggccatattcatgtacatttcatgggttaatgttcttttgatattggtcattgatatttctcaaccatcttcaagaatgagcttcttgagagcacttgctttgtgtaagaacaaattcaggcacttaaacagaaaagtctggattttatttattcaataaataaatcaacttgacacaaaaagtataataaagaggggagtgagtgggacaggttaaaatagttgatttagtggaatctcatttttgttatttaaaacacgtgttaaaagcatgtgtataaaaacgtgggtaaggatgtagaaggatatttagtaaggtattaatagtcatattttaatgaatggagttatagggttttctctaccttgatagtcagtcaactagaaaacccttctgttgaatatctttctaaaaagtgccccttcttcctgtctcaggaagagttcattgcacatatttgactctttrtttgataaatttagggtcttacaaaatgttagaatcccattttgacatccattctcattataggtggtttgaaaaatggtaactttctgtgagatgtgccattgcaaacaggaatgttttcatgcaggtcacacagtctatttatattgtacctttgaattagaaagaggcacactcagaacgtaagacttagaattaaaggcctcccccactggccatagcagcacccctagctcacaaccagttgaaggtggttttggtgtgaacactaagatgccccttcctggttgaattggggctggttcagcccccacctccctcccggccaggtgccattttgctcgtaaccccctgtaacagccctgcaagacacagataacattttatttttttaaaaagttgttagtcccctaaaccaaagagcaacatatactgcagaaataaaaagttartcatagcaaaggagaagtaacagtatctggttttaataatagctcatatattccattggtacatatttacaaagggccaaactcaactaatttatttaaaaaaaaaagaagcgtggcacagtggctcacgcctatatgctcagcactttgggaggccaaggcaggaggatcgcttaaagccaggagttcaagaccatcctgggcaataaagtgagactttgttcctacaaaaaaatttgttcaaaattagcagggggccgggtgcagtggcccacacctgttacccccacactttaggaggctgaggcaggtggatcacttgagcccaggacttcataccagcctgggcaacatggcgagactccatctcaacaacaaatacgaaaaaattaacgaggtgtggtggctaacctgtggtcccccctactcaggagatcgaagcaggtgaattgcttgagcccaggagacggaggttgcagagagctgtgatcacgccactgcactccagcctgggtgacagagcgagaccctgacaaaaaaaaaagggattctggtgttctagcgttgcggttgtttctaaatgcccttcttagcagttttattgcactataattggcatactattcagttcacccatgtagagtgtacaattcaatggggttttaaaaattagtatattcacagagttgtacaaccattcctacagtcaatttttttttttttttgagacggagtttcgctcttgttgcccaggcaagagtgcaatgttgtgatctcagctcactgcaacctctgcctcccgggttcaagtgattctcctgcctcagcctcccaagtagctgggattacaggcgtctgccaccacacccggctaattttgtatttttagtagagacgaggcttctccatgttggtcaggctggtcttgaactcctggcctcgggtgatccgcccgccttggcctcccaaagtgctgrgattacagacgtgagccactgcgcccagctaattcctacagtcaattttagaatattttcatcacctgagaggaaaccctgcactcattagcagccactgcctgttctccttgcccctgactccaggcaaccagtgatctcctttctgtctatttgcctattctagatatctaaaaaccttctaaatgtttacggaaccatatcattattagatggaaccatcaatgaagtacttgaccagtaatttccatacatattttggatgaaggcaagggtattgtttctcctctgctctcaggcaccactcgcggaacactgctaacaccgatatgtggaggttgtttccccactactcaggaggctgaggtgggaggatggcttaagcccaggagttggaggttgcagtgaaccgagattatgccactgcactccatgctgggtgacagagaaagaccccatctcaaaaaaaaaaagtagtaggttgtcacctgcatttctcagcagctggcagtgaattgaaggttcacaggactccctccttgagtttggttaacttgctagagcgggtcagaaaacacagaaatgctacttacatttgctagtttattaataaaggatatcataaaggatacagaagaacagccagatggagagattcaaggaacgtgggagggggcacggagctttcatgccctctccaggcacgctaccctccaggaacctccaaacggttcagctgtctggaagctctctgaaccttgtcattttggagttttatggaagcttttttatgcagtcatgattgattacatcaccagcccttggtgatcagcttaaccttcagcttcggtctcctccctggagggatgggtgtcccaccccgctaatcctgccttggtctttctggtgaccagccccttttctgaagccatctaagggcccccagccgccactcatctcattagcaaacaaaagataccacggctcaaaaaaaaaaaaagacaaagtatgtttgtgtgtgtgtgtgtgtgtgtgtgtgtgtgtgtgtgtgtgtgtgtgtgtattgttggggctcagaaaatgatacctggaaatatggtgctttgatatgctgaactctccaccctcacactttgtctctcccaaagcacaggatgaggctcttctctgccgttcccttatctacctagaaactggacctaccagagaggaacacagttgtctttgatccctttcctgaaatgtcattaaccagggaacattaaaactcatcttacagaggagactgaagaccaaacaacatacctagagcctggacaaactgtcccaaccgttgtttgttcactgtcccatacaatttccaaagagaatcattcacaagatgatatctgcttcccagatccattcattccccactaagaattatttcctcccacatccctatctccccttcccctgtgaagaagagtatagaagcgtctgtacctcgctggcattattgggtaatcattctgcagttcccctgtgcaatgcatgttaaataagtggatgcctttgctcccattaatctgccttttgtcggttcactttcagcagacctttagagagtgaaaggggaagcttttcctcttggccgctacaatacatatgtaggtgcatatatgtttaatcacttatggatgagtctagtttctaaaagtacttttttcatcactgtgtttcttttctgatcagtaaaaaagattttttttttttttttgagaccgagtctcactctgtcgcctaggctggagtgcagtagcacaatctcggctcactgcagcctctgcctcctgggttcaagcgattctcctgcctcagccaccctagtagctgggattacaagtgtgtgccaccacacccacctaatttgtgtatttttggtagagacggggtttcgccatgttggccgggctggtctcaaactcttggcctcaagtgatccacctatctcggcctcccaaactgctggaattacagacgtgagccatcacgcccagccgatcattttttaaaatataaaaaagcacaccatttgtgctatgagaatttcagacaacacccagaaacaaatatctccttaagcactacctcacggatgttttyccattatgaatgctgacktacaaataatcctaattttgtttaatcaaaaagggatattatacttttaattctccatcctgctttatttttattttttaattgcatcttgctcttttgctgaataatttttggagattttccatatctttctatatagacttaactataatcattttattggtgtatagtttactatatttggatgtataattgatttactcagtcacttgttggtactccaggactcataaaaaaagaatttggactaactctaggtagtcatatagatagaataaattgtcactcatcacatgtgtttggctgacttgaaactattgtctgggagtgtggctgccacccagccaatgtccagctgatgtgggtaggaacaggttgtgggaaggagagctgatggccgaccattatttttctttgttgccaaactgctgcgtcttttttttttttttttttgagagtgtctcactttgttgcccaggctggagtgcagtggcatgatcttggctggctcactgcaacctccgcctcctaggttcaagcagctctcctgccctagcctcccgagtagctgggattacaggcgtgctccaccactcccagctaacttgtatttttagtagagatggggtttcaccatcttgcctaggctggtctcgaacttctggcctcaagtgatcctcctgcctcagcctcccaaagtgctgggattacaggtgtgagccactgcacccagcccagactgctgcttctctaacaagacaactaaaatgatttcctttgaattgtttctctaaatgtctgtggcatacctgcaagttgcttgcaggatttctgtgttttgtgatgcatgttgtaaaggatgctgcttcagatgtagaagttttaggagccgagagccaagctgaatctgtgcctcttcctaacataaagtggaagttggccaggcgcagtggctcatgcctgtaatcccagcactttgggaggctgaggagggcggatcacgaggtcaggagatcgagaccatcctggctaacacggtgaaatcccgtctctactaaaaatacaaaaaaattagccgggcgtgttggcaggcgcctgtagtcccagctactcaggaggctgaggcaggagaatggtgtgaacccgggaggcggagcttgcagtgagctgagattgcgccactgcactccagcctgggcgacagagcgagactccgtctcaaaaaaaaaaaaaaaaagtggaagttgcttttaaaaatactttccatgttagtttgtcttgtgactaacctcatttccatagacactaactacaaaagataattataactaattgacattctaaattaatttggttctggctaactgaaacttttgttcatatctaatggagtaagtttcataaggctgatgatagctgaaggtctttaaatattttgccaaaacaggaagtttaaaaataggtaatttaaaacttctcctaaagcatgaagtatgaacctaaagcaacaccactcaaattttaatgtgcatctgagtcatctggggctgcagggctgcaggagtctaagattctgcattttgtttttgtgtttgtttttgaaacggagtctcgctgtgtcacccaggctggagtgcagtggtgcgatctcggctcaccacaacctccacctcccaggttccagtgattctcctgcctcagcctccaaagtagctgggactacaggtgcgcgccaccatgccyggctaattttgtatttttagtagagacagggtttcaccatgttggctagactggtcttgaactcctgacctcaggtgatccacctgccttgacctcccaaagtgctgggattataggcatgagccaccgcacccagccagattctgcattttgaaccagctcctcctgggtgctgcaggtaccactgctctgcccatccacacgttgagtagcaggaacccagaggtttgtccctttgcaggtcttctcacctgacatgaccttttgactcaactttgcctcttttcagagtttggattatgatcgctgtatcaatgacccttacctggaagttttggagaccatggataataaggtgggtcttacaattcttcatctctggggatcaaatcagtcttaacatggcattttttttctcttctaaaggccccagtaaacatctttacaccttgttttttgaaccttttcatgcgatacaggcagacctcactttatgcgctttgctttatttcacctcgcaggtactgcaggttttacaaactggaggttggtggcaaccctgtgttgagcaaggtgccatttttccaatagcatgcattttgtttgcattttttagccataaagtattttttaattaaggtaggtacatttttgtaggcataatgctattacacactttatagacctcagtatagtgtaaacatcacttttatatgcactgggtaaccaaaacactcgtgtgactcactttattgtgatatttgctttattgtggtggtctagaaccaaacccatgctatctgyaaggtaggcctatgttggcatttattccctaggcctttatcctgccaaccagagttccccctgtcagtgcaccttgcccagcctcttaagagtccatcatttttgcactgtaaagcacctgaaatcccaacatcatctttactgtgcctgctctccacgtggaatttagcttaaaactggttggccaagatgtatttcttcccctctgccaccataaccctgtaaactgaatcattcttttcctrtgtgaacagaaaggtcgaagatatgaggcrgtgaagtggatggtggtgtttgccattggagtctgcactggcctggtgaggaggcagggcctggagggatggtgggccatagggctggaggggcttacagggaaagccctggcctggtgaataacattgtcatttgtcattataacatttataacattataatgcaataacacttgtcattataatcaagagtgccttttcttttttcccttttttttttttaaatgaataatcctggcacagtttttcacacttcccctgcttttgctttgtgaaatgaaagcgagacacatgacaatggtgctcttgaagcgctcaaaggtttgggcaggactttatcttttatgatatgattatggatcataatctctaatctacctagtaaactagatgtctccctaatgggtagataatgcattgggtagagtaaataatggaagttaaagttacttttttttttcttttaatttaaatagagacagggtctcgctttgtcaccctggctggagcacagtggcgtaatcacagttcactgcagcctcgaccttctgggcttgggtgatcctcctacctcagcctcccgagtggttaggactctaggcaggcatgagatcgctctttagggaaaaagcgaagtcgtgggtacggaactgtgaacatcgtgcccttcatttagcacagcgtgccagtgaacagggtggcacaccatagctattgatctcatgcagggagtttatggtgctatcctgggctcctccccgtacgtcgttaatgttatctagaagatagagccagcagctgtgagtgaagggatatgcccgtatgaacagagttggtggaggcagcaacttcacaggtgaatcaaagacaaggcaagattggaaacatggccaaagatgaggatagcaaaaagtctggaaccaaaactgccgacttcacattgttaaatatgaggaagagaagctggaaaaatcagcatcagtcaaaaagatccatgtcaaatctgattccggtcagtacagtgttgggatagggtatctgtcctcagtaacagcctgttgaccacctttatcttgaactggccacaagcctcctacttaatttgacatgatatgcctagaaaatgtacacatgtgttcggtataatatagccacaggggccaaccacaatttttattttcatggcatgcatcaaatttttactatagtaaatccacaagtaaaggaacatcttactaggtaagactgatggcattcagaagccctcttcagtgatattctgatggataccattttggggaaacttgggttgatttattgttttatttaaatctcagggtgttgggccagggacggtggctcacacctgtaatcccagcattttgagaggccgagacaggaggactgcttgagcccaggagtttgagaccagcctgggcaacgtagggagaccctgtctccttaaaaataaaaaaaaaattaaaaaaaagaaatctcagggtatttattttgctatatatgtttctggttgcagatttctctataataagcatagtccttaggcctctagttgttagtgtttgtgctacttttatatcaaactctttggagctgccacttgtcagtactacaggttgagtgttccttatcagaaaatccaaaatgctccaaaatccaaaactttttgaatgctgacacgattctcaggaaatactcattggcgcattcagattttggatttcaaatttttggatttgggatgtttaatcagtataatgtagatattcgaaaaaaaaatctgaaatccaaaacacttctggtcccaagcatttcagataagtgttactcaagctgaagcaactttacctcctacctttgtattttaggaaggcacacctgcctttatgacatagcactcccaactctygtccattgatgtgtggccactttatggcttcagtatcaaaaagcctccaggcattggcttgagggaaggccagagttaaaggcaagaagctttgatcctgaatccataaaattagaagtctttctagttctcctttaagccctgagcactttggagagtggaatactggaatttggttgttttctctacccagagtaactatggactataagatggttataagtcaagcctggcacagtggggtgtgcctgtaatcccagctacctgggaggctgaggcaggaggatctcttaaaccctggagttcaaggccagcctaggcaatatagcaagaccccatctcaaaaaaagatgatttcaagtcaaaataatgacttacaaaatagaacctgctaataaggaacatgcaaaaagcacatacacctaaatgaatgttgtgttttaaagcaagcttgtccaacccatggcccaacacagattcatataccttttaaaaacatttatgagatttttctgagtttttcttttcttagctcatcagctrtcattagtgtattttatgtgtggccaaagacaattcttcttccagtgtggtccagggaagccaaaagagtagacacccctgtgtcagtagtctttcttggtctcrcatctttttctgcacctgcttccctctttgttttccgttgcttcactcaacttagctgtactctctgcctttgttctttggaggggcagtggractgggctggagaagggatctcctccttctgcgcttttctgctgtgcattcacgtactgctggctggtgagcagcctccgtatgtgcagtgggggaggagatgccttyaagaggagcacacctgtactatacttgtgctacacttggaaataaggctgtgtgacagatctcttgctcttcacaggtgggtctctttgtggacttttttgtgcgactcttcacccaactcaagttcrgagtggtacagacatgtatccttttcacggttcctggtgttcgtggacttcagtggtcaccaagattctttcttacatagaaatgggtytaacagtaagcatrgtattagaagggccgcttattagctattcagctttaatatttctaatgatcactgaaggacacaaaagaaggactttaataagcaaagacatatacctatgtttgtggttgataagattacagatgccgcaaagatgcctgtactccctaatctgtaaatttaatgtagttccaatcaaaattccaatagaatttgttgtggaactcagaaattctttgtaaatttgtgtagaagagtaaagggccaaaagcagtcagtatagttctaaatgacaagaaggtggacttgaccctgtcagatatcaagtcttataaaattaacaagtttggggagttagggaaaaaaaagtcataaaatttaagatacagtcattgaaattggtcatattggtgcaggaatacctagacagtggaaaatgatagagaagcagaagctggtcctcacatacatggaactttggtgaatgacagttaatattacaaatcagtgagggagtgatgaatgatttaataaaagacgctgtgttatttaataaataaaagatacacatctctgtagtcccagctacttaggaggtgagcccaggagtttgaggctgtaatgcaccatgactgtgcctgggcagcatagcaagaccctgtcttaaaaaaaatgatgctgggacatgggtgatccatatggaaaaatagttatattcctatttcatactataaataagataaattccagatgaagatgtaaatatgcagaacaaaacttcgggagactatatgttgtcaagagtggggaataatttcttaaaactccagaaggcacagactataagaaaaaacatcaatggggccggacacagtggctcacgcctgtaatcccagcattttgggaggcagaggcaggcggatcacaaggtcaggagattgagaccatcctggctaacacggtgaaaccccgtctctactaaaaatacaaaaaaattagctgggcgtggcggtgtgcgcctgtagtcccagatgctggggaggctgaggcaggagaatggcatgaacctgggaggcggagcttgcagtaagccaagatcacgccactgcactccagcctgggtgacagagcaagactccrtctcaaaaacaaacaaacaaaaacatcaatggctgggtgcagtggctcatgcctgtaatctcaggactttgggaggccgaggcaggcagatcacctgaggtcaggagttcaaggccagcctggctaacatgacaaaaccccatctctactaaaagtacaaaaaattagctgggcatggtggcgggtgcctgtaatcccagctacttggaaggctgaggtgggagaatcgcttgaacccgggagacagaggctgcagtgagccgagatcgcgccattgcactccagcctgggcaatgagagcaaaactgtctcaaaaaamaacaacaaaaaaaaaaaacaaacaaaatcaataaatttgaccacatcaaagtacatattgtatttataaagacaaaaactccaaataacaacaataaaacaccataaataaagtgaaaacaagtccacagcctgagagaggttatttactatgcatttaagaggcagataattagtatccasaatacaggaagaggctgggcgcggtggctgacgcctgtaatcccagcactttgggaggccgaggcaggcggatcacttgaggtcaggagttcaagaccagcctggccaacatggtgaaaccctgtctctactaaaaatacaaattgagctgagtgtggtggtgtgcacctttagtccagatacttgggaggcagaggcaggagaatcacttgaacccaggaggcggaggttgcagtgagccgagattgcaacactgtactccagcctgggtgacagaatgagactctgattcagaacaaataatacaggaagaactcctgcaactcaatcagaaaaacaacagatggtccaatggaaggaaaacgagcaaaggatgtgaactggaattctcaaaagagaaaaactggccagtaaacctctagaaaaaggaaggtgcacattcctgtgactcatacattcctcttagaaatttgaaccgtagacatgtacaaaggtggtaattatagctttatgatagcaaaaagctggagtcaccaaatgggagaatggaaaaattatggtacattcatatggtatcattttagacatcatgtcatttctgtagattgtaaaataaaaattttagacaagtgaaagtgaacgaaccacagagttgtgtgtatcaacatggctaattctcaaagacttaatgttgagaaaaaaagagcaagttacagaatatacaagtgccgtgtacaacagtgtggacacttttgaaatacacacaataatttcaggttagtggtttctcccaggggagagaggaaggaaaactgtttttttttttgttttgttttgtttcttaaaatggtactgaatgttttcttttttaaaaatacctggagcatatatggcatgttgttgagatttgttaaagctacagttgtgagggtatgggtattcgttactttttgtaatgtttgaagtatttcctaatgtcaaaggcatctcaaacaattttttcttttttttaagagatgaggcctcacactgttgcctaggctggaatgcagtggtgcaatgacagctcactgcagcctcagcctcccaggctcaagcgatcctcccacctcagcttcttgagtagctgggaccataggcatataccttttgtactttttgtagcracatggtctcactacattgcccaggctggcctccaactcttaggctcaagtgatcctcctgcctcagcctcccaaagtgttgggattacaggcatgagccattgcacccagtcatctcaggcagtttttaaaaaatttttatatakagagaaaaagtgcactcagcagccagcatgatccaaaggagaagcagctgcaccctctcaagtgatgacggggacacccctcggctgatgaacaagtttccttaacccagtttccgcagcggtggaggagtgcagccagaaaggctgcctcgctctgtctctccttgaactcctgggttttaacctcacctttgtcttcctggcaagcctccttgttctcattgaggtgaggtggtttggattcacctgctcgcttaggaggttttagagtcccgcaytccttttccccacctccttccagaatgtcaggaaactgagaatgcagattcctgcagaaagtggcctcttgttcactaaaggtaaaggtttcacctctggtgagattaaagaagaaaggcctcccaggtgatgctcattcacagggaacttgtacagattctggggggaggaaaaaagggggaaagggctgaaaacaaaactgttgggtgccatgcgcactacctgggtgacaggatcattcatgtcccaaacctcagcatcatgcaatataccctcgtaacatacctgtacatgcaatccctgaacctaaaataaaagtggaaattatttttctttaaaaagtgcaagtctggccactttgggaggccaaggcgggcagatcacctaagatcgggagtttgagaccattctgaccagtgtrgagaaacccygtctctagtaaaaatacaaaattagccggtaaaaatacaaaattagccgggcgtggtggcgcatgcctgtaatcccagctactcgggcgactgaggcaggggaattgctggaacccagaaggcggaggttgcaatgagtggagattgtgccattgcactccagcctgggcaacaagagtgaaactctayctcaaaaaaaaaaaagaaaaaaaagtgcaagtcctcccattgcccctcagacctcctgagtcagatcctctggagtggggcccagcagctgtggttcwgcaagccctccaggtgacgctcacgctgctaatgaaggtggccagctctccctcttccgccgcccagattgttgagggtaagccagagaaccaatggatttcgagttatgggtgtgcctgctctcctccatcagccggtggcagcaggttccgggatacccgaggtcaaatgctatctgaatggcgtaaaggtgccaggaatcgtccgtctccggaccctgctctgcaaggtccttggagtgctgttcagtgtggctggaggtaagaagggtccaacttgtatccttcaaatactcaaagggcagagacgacaagaagcatgatgtatttcagttattagatttggactgcagggcccagcctcaaacagctgatgtctgcactttttgttgatgggctgtttttaaatgcagacactgttcgtatgttaccattcagatacctgacaaacacactcttcagttttgggatttggaatttagcttgtggaattagcttttgtcaaaattagcaagctytttgtgtcaacagccagatagtaaatatttaaggctttgtgggccaagaatcagaatggaagctcttatgtagatgtttatgtaactatttacatgtgtgcatttaagaacgtaaaagccagtcttagttctcaggccgtgtaaaaccaggagggagctggtggtctgggctcacaggctctcatttgctgacacacaatttagaatgtagagtgttttctcttctagcaagacttgaaatggagcttatttggtgggaatttggctctttctcttataaagtcttaggatcatctctgttcagttgtcacgaggaaggtttttgtagccaaggtctcctgacccaggggcgtttctgcactgactgttggtctttcctttttcaccctgcccagggctcttcgtggrgaaggaaggccccatgatccacagtggttcggtggtgggagctggcctccctcaggtaagatgrgctgagagrgtgtgggcctctgggcaggcctagtgggaggtctggttacactgggccaaatccattgggacaccctgacatcacattggaacctggtgccattctggcttcacgtgtaaaccatgtgtctatctctcaggaaagggcataacttatacttggaagttttaatgatgccctaccgagccctaggagcaaaaatgagacatagagaaaaactgtgacgtggcggatgaaagtcactgggtgcttccatagccatcaccaggcgcctctatatagggtggctgggtggatcatctcagtgctgccagatccaagaggctcgaagcatcgactgacatggttttaggcacagttccgtgctgattctagttggcgtggtacagtcataataactgctgctaattatggtctgtgtgccagacgccatgtatactaactgctttctccttatagccaccttcaatgattcgttgttattattacccccatcctcagatggggaaactgaggcttagagaggttgaggtactagctcgagacctcaaagctcccattcttgggggctactccagatccctggctgctgttggagaagtctcagttccctgtgaactgtcactcttagtcatttccctctccagtcctgagaagagggagttattgtggttgggagtctctgaggtgaaggagggaagattctttcgtccagagctcgtcttttggtctctctcctgctactgccttgagcaccagatctggcagaagtgagccaaggggtggaaggccaggcgtggagtgggcatcagtgtgcacctttgtggggcagacagaggacaggctctgggcccttctcttcctggcgctgctgagcagagcagactcggtcttctgcaacagcttccgcgtccccttccctcagctcagccatttgcctttattctttcagacttgttgactctgcacaaaatgggatttcagaaggtcctagaaacacgagggcaggaaaaataagctcctcccaagggtggggggtaatctccttttttcccaagtttttttattttcattttttgagacggagtctcactctgttgcccaggctggagtgcgatggtgccatctctgctcactacagcctccgcctcctgggttcaagcgattctcctggctcagcctcctgagtagctgggattacaggcatatgtcaccacgcctggctaaattttgtatttttagtagagacagggttttgccacgttggccaggttggtctccaactcctgaccttaggtaatcagccgtccgcctcggcctcccaaagtggtgggattacaggcgtgagccatgagctaccacgcccagcctccttttttcccaagttgctgttctggactttccttcctgcagcacacttacccaggtgtgctcaagcagaggggcctcccctgatgccgtggattcccatagtttcagtcctaggctgcccctgacctgtgttcttttttttttttccataattactggggtacaggtagtatttggttatatgagtaggctctttagtggctctcttttctcttgctttagtttcagagcatctccttacggaagatccagtttaacttcccctatttccgaagcgacaggtatggaaaggttagaaattggtttcttttttggaaacaacatgttcatgcgctgcgggtcagactcgacacttgctctagcctggcagtatcccctgcggggaaacccgactgggagaagggggcgggctttgaacttttcttctggaaataagaagccaaagcaccaggctggcatcgtgacttttattttgtcatgccgtaaggcctagaagcatctcaggcaaatgaagatggtcccagattaaaaacccaaccaagaaaggccacagacaggcatattcttaggaaggcgttttgtattccccagtgattcacttggtcagccaccctcctgggtcagaaggtactcttagtagacttcttagccctgtatcagatgtgtgtgttactgacctgccggcctcgtaaggctctttcaatcagagactcagtttagagtcacggaccaccttctttttgtattcctgcaagttcggcacatacccagaaggcaccttgatgtttttactgatgccggggttttctggaaggaagatccrgtgggaacatggtgcagcagtgatcgtgccgatctttgatctgccccctgagctgggggctgagattctgagatcacagaaaacacagaggtcaggggctcctgttcccaggcagagtagccgccatgctgaaagggactctggtgctaaggtgtgtggctctcgggtggacacactcgcggcaaaggctgcctcaccagtgacctgcccttccaggatccctgcctattcattcacaggtgtgagaaaatgttcatgataaggaagtcagaaaccaccttttgggggctgggggctctttattggataacycgtctctctcctctcctcagagacaagagagactttgtatcagcaggagcggctgctggagttgctgcagctttcggggcgccaatcgggggtaccttgttcagtctagaggagggttcgtccttctggaaccaagggctcacgtggaaagtggtgaggaggaccttcagtgaaagcrttaaccacacccmccgaattacactgggtgtcccttactcggtacatggaatggtagttttgatgagactgrgggggtcractggatcagaaacagctttcctcttgtgcccataacctccacactggactttctgtacttctcatatcaataccctccctaaccccaaatcaaaccgctgttactttttttttttttttttttttttgagatggagtcttgctctgttgcccaggctggagggcagtgacgcgatctcggcttactgcagcctctgcctcctggattcaagcgattctcctgcctcagccttatgagtagctgggattataggcacgtgccaccgcatccagctaatttttgtatttttagtagagatggggcttctgacatcaggtgatccacccgccttggcttcccaaagtgttgggattacaggcgtgagccaccacgcctggccttgttatcctttcttgatgaaccacctgacatgaaaatgtgaaactggctgttgtcataaagcaggaagtgatggggcttggactggagccggtcttctccctcagagcaggctgtccttccctttgcattgatccttccttttggtgcaaggtctggtctgtaaaggctgtaaataggctctcatagtagagtaggctgctggaacggaaacttcttaaagcccaatctagagttggtcatacctggggtgtatctactgtaagggtgactagatctctgtacccggatgtagattcyggaggtctctgygtagagcagtgggtaccaggaggaagggttgggagagagtaggacatgccactcctgaaccttcttgtcttttgtcacctctcccctagctcttttgttccatgtctgccaccttcaccctcaacttcttccgttctgggattcagtttggaagctggggttccttccagctccctggattgctgaactttggcgagtttaaggtatgttttgtcctttccccaaggatttttaatttgacccatgaaaatttcctctcaagtgaaggaccagagagaaatgagcagagggctaggtacaacttccagggrcacatctcacccattagcctctgccgtgcgggaaagcagccccactcttgcttctgtcttctcttctgtctcttccggttctcatggctgctatggtttttctctccctctccctttccccttctctcagtgctctgactctgataaaaaatgtcatctctggacagctatggatttgggtttcttcgtcgtgatgggggtcattgggggcctcctgggagccacattcaactgtctgaacaagaggcttgcaaagtaccgtatgcgaaacgtgcacccgaaacctaagctcgtcaggtatctgcacagtcgcctcccccccgagcctgctgcggctccctgagcttggtgtgggccgcgccatctctcccgaggagcggaccctgcctccacggctttgatttctcatctaagactgagaatctaaacacggccatgcatcttccctacttgacaggccaaagggctgagccagcttaattgatgtcagagttgctggttgactccctgcctgtcctgacttggccactcggacacatgacaaggttagaagggtcaccgtggccctgccgagcagcttgctctcaggaggcttctcgccccaggacttattataatggaaagccattcattccttggagagagatgatgtggacgtagcagcccactttaactgtccactttttacaaacaaattgctggaatacagcaaatcacggatcaattctgcacacatgttgactgaccaggggctgctgtgaatgctgttyggagaaatcggggctgggggtaggcagggttatgttttgaatttctgagaccagagctkctttctgtggcrttgtaacagctgtgctttgcctcctagagtcttagagagcctccttgtgtctctggtaaccaccgtggtggtgtttgtggcctcgatggtgttaggagaatgccgacagatgtcctcttcgagtcaaatcggtaatgactcattccagctccaggtaaccccagtgcacctgctacctttatcccataccacgaggaagaatccagaaatgtatgaccttcctctgttgagaactaatagatrtgttgggttcatccttccacacccattacctgagcgttgagagatatgggaatctgtagtcgtctttttacctcagagaaagtgcacaccacatgccctgtgtctttgccacttctgtgaacaaccctggcgtcacagaggggaacctgggaacaaccctggcgtcacagaggggaacctgggaacaaccctggcgtcacagaggggaacctgggaacaaccctggcgtcacagaggggaacctgggaacaaccctggcgtcacagaggggaacctgggaacaaccctggcatcacagaggggaacctgggaacgaccctggcgtcacagaggggaacctgggaacgacactggcgtcacagaggggaacctgggaacaaccctggcatcacagagggcaactcctctctgttgaacaacactcatgggaaacagacacttggaaagctgacagcaaggtgctttctgagccccagttactcttccacctccccttgcctgaaggggccacagcccagaggctcagcacccacctcatggcctctgtgactatgacagtcactcttgagaggaagaaatatctgtgtcagggcaaggaggcttctctcttcccagcatcctctgcctcttcccggcgttgggtcctttgtgggtgcgccaccctcctgcactcctccttttcccttcttggggggcgcgatattttccagaggctttccctgaggagtggtcccatgaggtagtccgtggagcctactccacgctgtgttctttcggtccaacccggaggctctgagagctacacctgtggttcagtgagtcagccagatgtgtgattccagcccttggctgcagacaggtgagcattctctaagtgcggtcggccatccacatttgtgggtcctgcatccatggaattacgtagggtcaaccaactgtggagcaaatatattcaggatgcaaaacataaaaaagaacaagacaacagtaaaaaataatgcaaataaaaaacagtacagtgtaacaattatttacatagcatttacattgtattagggtattataaataatctagagatgatttaaaagtatataggaggacctacataggttatatgcaaatatacaccattttatatctgggacttgagcatccctggattttggtatccatcgggatcctggaccctatccctggtgaatackgaggaacaactgtactctttycttgttgcttctctgtaaccacttgaatctctcagatccccaytggggcccttgtcttggaggacagcctcttcagtgtccccagttatatgtatatattatwtatatatatatatatatatatatacacacacacactatatatayacacayacacacacacacacacacacacaaacacacattatatatttctgtttgttttgtttttttaagacggagtcttactctgttacccaggccggagtgcagtggcgcgatcttggcccactgcaacttccgcctcccaagttcaagtgattctcctgcctcagcctcccgagtaactgggattacaggcacccaccaccatgcccagctaattttgtatttttagtagagatggtgtttcaccatgttggccaggctggtctcgaactcctgacctcaagtgatccacccatctcggcctcccaaattgctaggattacaggtgtgtcaccacgcccagcctggtttatatatatatgtttttgtttttgtttttgytttttttttggcaaagtctcactctgttgcccaagctggagtggagtggcaagatctcggctcactgcaaactccacctcctgggttcaagcgattctcctgcctcagcctcccaagtagctgggacttcaggcacgcaccaccattcccagataatttttgtatttctagtagagacggagtttcactattttggctgggcttgttttgaactcctgaccttgtgatccgcccacctcggcctcccaaagtgctaggattgcaggcgtgagccaccgtgtccagctggtttatatatttttaaagggttgagagaaaaaaaagaatatgccgcagagactgtacatcactggcaacttctaaaatatttactgtctggctctttatgaaaaagtttgccgacccctgttactagttattcccaagcctagctcattaccagacagataccttgatgcgtgtgatttaaagcatacaaaaaacgattctgtggtcaaatgggctaggaattaaatatgcttctttatctttttagagacaggatctcactctgtcacccaggctggagtacggtggtgtgatcatagcttattgtaacctcaaactcctgggctcaagcgatcctcccatctcagcctcccaagtagctgggactacaggtgcatgccaccacatccagcttatttttatagagacaggatctcactatgttgcccaggctggtctcgaacttctggcctaaaatgatctcctgttttaggagtgctaggattatagacacaagccatagcacccaacctaaatacgttcctttagtacagaacttctagggccttattcccataagtgttataaatgtttggtgtctttattgtgtaccagatattccactgagtactttatatgatttcatttaatccttatcagcactgtgcttgctggccagtagctgtgcccccattttacagctaaggaagctgaggcacagtatggtcttgaccaaaaaccttcagctagtcatatatagtgagagggtaggtgttgttaccattttataggtgaggaaactcacaaaatgaaatatccttctcaacgtcactagagagtggcagagtttagagacaaagccatctgattttggagcctgtgctcagcttttagcagacacactgatttccaagaattgctaggatgtttctcagtgcagttgaccacaggactctctggaaagccttcaggactgaacttcctccagacagtttgggaaacactgcatgtgtctattatgaagccatcagctgagctcatcccccgtgcactccacaacgctgaggctctgcacatggctcaccagtgccaggtgctgccagtcagcagtgccgtgctgtttscacagcagcctgcatacgtctatattgcccagccygtttcacctggcggggtcacacaaaccaccccctggtattgttagcacgtccacataatggcatctccacagctgtgtcatccagaagaaacccatagccttgattaacctttgtaataagactccctatttgcatgcacagtgataggtgtgaagtacaaccttgtaccgttgtacactgtcaactagaaaataaaacagcacacttgaaacacccttgccttctagcaaagatcccatcttcccacacagaatgatggcaagaaaatgaggtctaaaatgtgtagaagtagtagaagaaataatctctttttctgtttgggttttgttccccagatggggtctagaaggagaggcagcctggaggactgggtctgctctccaggcattatggaggtgggttttcttttgcagcaaattcaggtgctttttttttttttgtagcaaattgcagcaaaatcaaaggctttttctatttggaaccagagttggggctttcggtcaagtggtgccctggattttcctccccagatacctgtcaactcccagtcacttgctctcacctgcctcatattcccccagtcctagggctctcaggccaggcttctagcagcatcacttagaaagttagcaccgggagaggaagcagaaccaaattcacggtgaatcacggccatagtgacattttcatcatgagtgtggatgaacaaaaggccctcatcccgattctttcatctgtgcattcagaatgtgaagaatacacttgcccgtgtggctgccgttggtagaggtcagtttttggcctgtttgattgatggggaaagctgtgcagccacctgttttggacccggctggagacatcccacttgaagactcaaagtcaggtgtccttgtactgattttctgattccttcttctcaggtcacagaagatgtgaattcaagtatcaagacatttttttgtcccaatgatacctacaatgacatggccacactcttcttcaacccgcaggagtctgccatcctccagctcttccaccaggatggtgagtgtctgcactgcagcccaatcrtgggtgattggtgtcatctcggacacagccaggcttgcccttcattccaagcaagaccaggacttctttgtaacgcccacccagacaaaagattggtttctgcctccwgtgttggaaggggaactggtatggggtgtggtcgggccyggtaggtctactgggccttggcaggcatccggtagtgggactcaggttggctcttcccttgcaggtactttcagccccgtcactctggccttgttcttcgttctctatttcttgcttgcatgttggacttacggcatttctgttccaagtggcctttttgtgccttctctgctgtgtggagctgcttttggacgtttagttgccaatgtcctaaaaaggtactctgtgtgtgtgcgtgtgtgtgcgcatgtgcatgtgtgtgcrcgtgtgcrtgtgtatgcatgtgtgtgcgtgtgcgtgcgttgatgtgtctgtgcccatgcatgcacatatgtgcataggcacaagagtatgagctgtaggtcctccccacagcctatcartgtggttcaaagccatgttctcggtgttttccttcactagctacattggattgggccacatctattcggggacctttgccctgattggtgcagcggctttcttgggcggggtggtccgcatgaccatcagcctcacggtcatcctgatcgagtccaccaatgagatcacctacgggctccccatcatggtcacactgatggtgagcacactccctccaggcccctgtcaggctcagggccacgtccgccccacaggacctatttttaggtctttgctttgtgtttcaggtggccaaatggacaggggactttttcaataagggcatttatgatatccacgtgggcctgcgaggcgtgccgcttctggaatgggagacagaggtggaaatggacaagtaaggccatgattttgctcatgtcctagtttcagaatgtataagctctgaggcctaaggaatgttgttattagggtaggaaacagtaactyacttttcttgggctgaaagaagcaacacacccattcctgagcatgtgtgagaatgtggagcagcccatgggctgggggctgcgggggcagggcaggggacacgggcactgtgggactgcagtgggcagggcctcttcgtggtggtttgactcccatggcattctggttagatatgaggtgaggtctctggatcaagttcgtgatgtgattgaatgtttaagggtatgccaagccccaggagtgagaatagcctgtttcacatgtgcccaccagaatgccctactgccagccgggattgttctgggcataatcacctcataacccacctgctaatccacaggtacctgggcttcctgtgtctagatagcaggcaaggcccttacgggctaacacgggggccagcaagccgtttctgtggagggccagacaggagtttattttcaactttccgggctgtatggtctctgtcacgactactcgactctgtcattgcagcaggaaagcagtaagcgtgacggacttgatcagtgggctacagtttgctgtgccctgatctaaagggggacccaagtgctgtgtttattttattattattgtttttcttttttgggacaggatctcactctgtcgcctaggctggagtagggtggcatgattatagctcactgcaacctatgcctcccaggctcaagcgatcctccacctcagcctcctgagtagctgggatcacaggcgcgtgccaccacacctggctaatttttaacattttttttatagaaatggggttttgctgtgttgcccaggctggttttgaactcctgggctcaagcaatctgctggcctcggcctcccaaagtgctgggattacatgcgtgagccgctgcacccagcccacccatttacccagttgtggtaaatgctgtagcagaattagcagttcaggggtagtatgtggagcgtgctgcagggcaccgaggagggcgtggccagcccctggaccagcagccagggcttcctggtgaggggatgttgctgttgagctgagggatgagcccgagcccatcagcctggtacagcagggtacgacattccaggtgcgggaacagcatgtgtcgggggatagaagtacaaaggaatgcatcgggtttgagggagagctggggcagttcagaagagccccccaccccgcccgtggtctgagcagrgctggagagccagcacagcttsctcccaggggcctgcgggcactgtcatgaggctggatgayttgccctcctcccccaggctgagagccagcgacatcatggagcccaacctgacctacgtctacccgcacacccgcatccagtctctggtgagcatcctgcgcaccacggtccaccatgccttcccggtggtcacrgagaaccgcggtaacgagaaggagttcatgaagggcaaccagctcatcagcaacaacatcaagttcaaggtaaagaaaacggcatgagaggaaaggcaggtgagagacaagcggtcccgtctcacacggcttagtgctttgcccacccctggctggggtggacttaccggctctcaggggaagttggcactgttctcatcacaygcgacagggagagtagatttgacagcaggggcagctttatcaggccgtgaagatgtgtgtgcgttcttgccgcaatgagcatgtggacagatctgtttttcaagtcagcagctttcatggtttgtttaccatgtgagagtatcagggagagttctagagatgccagcaacagaaatggacttcgacctccttaagaaagagaaagaaatccacaggaaagctcaggacagctgggaaagctgaaggaccagaaccaygtgctgtggggagcagtgcagggtctagcagacatcccttgggtaccaggargaaggagcactggccctgggttcctcctgattccgattcagaatccagggagagggggtatcctgttgcctcacttgggtcatgtgccactccttggctttgggggcaggcacgttgattgaaaattctatcaagacaggatgtaggagatggcttgttcccctctggagaawcaagctgctcttcccagattaaaggaaaccacagaagctgcagccaggtcctagggttcaggctcatttgaaccaccagcctgagccactcttttgaacctcagccccattaagttcctgcgtccggatgtgcttctgaccctccctgtcacccaaatccttaagctccatcagtactgctgtgttcgtttgcccatgcgcagtagcctgtggcctccccacccacagaaatccagcatcctcacccgggctggygagcagcgcaaacggagccagtccatgaagtcctacccatccagcgagctacggaacatgtgtgatgagcacatcgcctctgaggagccagccgagaaggaggacctcctgcagcagatgctggaaaggaggtgagarcctggcggggcccccactgcccgcagggctacacagcggtggggtgagccyttggctcagatgttktgaggtggctcctgagtttcctgggaaagttggatggggagcgggctgggaacatggatcagaagcgctcccgctgagggtatcccaggcagcatctggtttttgtgtaacagatacactccctaccccaacctataccctgaccagtccccaagtgaagactggaccatggaggagcggttccgccctctgaccttccacggcctgatccttcggtcgcagcttgtcaccctgcttgtccgaggagtttgttactctgaaagccagtcggtaagtctctccgaggcagaaatcagccaggccagrcctgacgaagctcgaggggttgggcgctgccggcgggccgtgaacagtgccatagggaaagctgaatgcaaggcgagaagtgcagagtggacttaggggaggagtcgccacagccgggtggtgagaagcaacagcggtttattccttcatagttcaaggccagaartacaaaatccgggtgtcaccagggcagcgctccctggctctggtgctgtccttgccccttcctagctcatgggagttgcctgcagaccttggtgctcctgactgtgaacacagcccccatcctcgccactgtcatcacacggcgttctcctgtgtatcttctctcctttccctaaggacgcttgtcaccggatttggggcccrccctaatccagcatgggttcatctgaactcggtcacatctgtagagaccttgtttccagaaaggtcgcattcataggtactagggcttaggacttggccatatcttttggtggggggacacattcaccccccagccactttacttagtgctttctcacttaaacttccwaataagccatttgcatctcatgaatcaggaagaaagggagtgcagacagatcaggggacttgcccagggtgccacagctaggacttggccaaggactyggtttgactrgagagctctcactctggagcgcttgctgctgctgcaccacctgcctcagcagcctggagctgggcatattcaggcatcaaggggaggggctctaaggtgaccctgctggccactgctgcctgagcacggacagtgtctgggttggaattgcagagcgccagccagccgcgcctctcctatgccgagatggccgaggactacccgcggtaccccgacatccacgacctggacctgacgctgctcaacccgcgcatgatcgtggtgagaagggctgccccggcctgtcccatgcggagctgcctcttcatgccgttggcgtctcaggcagtcagtgacacgtggtctctttgcaggatgtcaccccatacatgaacccttcgcctttyaccgtctcgcccaacacccacgtctcccaagtcttcaacctgttcagaacgatgggcctgcgccacctgcccgtggtgaacgctgtgggagaggtgagcgaggccccggccctgcccccacctttgagagaggatcccctagccaggtgctgtttgtgcacccakgcttctcaccagaaacgtaggcatcccaccaggaggggagagtgtggcccaacactagckttgaaccctgctcggcttccgtgcactcgggaccctttcccctgcctgccagcagatggcaccagcgtcccactggccgtcctttccagccagagccgcgcctctaccaggctgtgtcttcctcctgaaatgttgctcttcactccgtaccactggtgttccttggttctccacctgcgtaggkatttgcgcattagatgagagaatttcaagcaaaatactttgagttttacaaagatataaaacacctagtaattattgctgcagactttccttttttcttctttttagaacttcattattttcttattacacaaatattttcttattacacaaatatgatttcattgtaggaaaatacaaaaacacatatgagcaaaaaacaagcaaaaaccaaaccctcgtccctaccctgtcgcggtagccctggtaacttttcaaggccaccctctcagtcttttgttgttgttgctgttgttgttgttttgagacagggtctcactctgtcacccaggctggagtgcagtggcaagatctcggctcactgcagcctcgaccttccaggctcaagcagtcctcccacctcagcctcctgagtagctgggaccacaggcatgcgccactatgcccagctagtttttgtatttatggtagagacacggtttcgccatgttgcccaggctggtcttgaactcctgaactcaagtgattcacctgcctcggcctcccaaagtgctgggattacatgcgtcagccactgcacccggcctcagtcttttcttctayrcggcacaaccctggcatgcatagtgcgtacttacacaggttttgttgcagtaggttaacttatgtcccttgaaatgtaattgccaactacactgacagagtcctaacatagtttatgacgtggctttggagttcccaacaacagtgacacgtgggaaccactgtaacgacctgtaacaaatgactcccataggtcactttgcaaggtggtgagtatgaggcatggcaggggtcataatctcaggagacttcaagggccccaccgcttgcacatctgtgaagcaggctggtcatgatgggagctgagcgctgagcatgtgccctgtggaaggacattttagttcagatgccagctggcccaagccctttttggagctaaccttgtccccttggcctccartgtgtgagccctcgttagctgtttatcccaatcaagctgtgtctggctgtgcactatccaggcctccacattctgtgacaaactaacagggccggctcctgtcactyctgttctcgccagcgggttttaccctkaaggtgactcaggccttctctttgccctagatcgtggggatcatcacacggcacaacctcacctatgaatttctgcaggcccggctgaggcagcactaccagaccatctgacagcccagcccaccctctcctggtgctgcctggggaggcaaatcatgctcactccggcgggcacagctggctggggctgttccggggcatggaagattcccagtyacccactcactcagaaagccgggagtcatcggacaccttgctggtcagaggycctgggggtggttttgaaccatcagagcttggacttttctgacttccccagcaaggatcttcccacttcctgctccctgtgttcccaccctccagtgttggcacaggcccacccctggctccaccagagccagaagcagaggtagaatcaggcgggccccgggctgcactccgagcagtgttcctggccatctttgctactttcctagagaacccggctgttgccttaaatgtgtgagagggacttggccaaggcaaaagctggggagatgccagtgacaacatacagttcatgactaggtttaggaattgggcactgagaaaattctcaatatttcagagagtccttcccttatttgggactcytaacacggtatcctcgctagttkgttttaagggaaacactctgctcctgggtgtgagcagaggctctggtcttgccctgtggtttgactctccttagaaccaccgcccaccagaaacataaaggattaaaatcacactaataacccctggatggtcaatctgataataggatcagatttacgtctaccctaattcttaacattgcagctttctctccatctgcagattattcccagtctcccagtaacacgtttctacccagatcctttttcatttccttaagttttgatctccgtcttcctgatgaagcaggcagagctcagaggatcttggcatcacccaccaaagttagctgaaagcagggcactcctggataaagcagcttcactcaactctggggaatgctaccattttttttccaaagtagaaaggaagcacttctgagccagtgaccactgaaaggtatgtgctatgataaagcagatggcctatttgaggaagagggtgtctgcccttcacaaacacctctctctcccctgcactagctgtcccaagcttacatacagaggcccttcaggagggcctcctgtgccgcagggagggtgcgtggggaagatgcttcctgccagcacgtgcctgaaggtttcacatgaagcatgggaagcgcaccctgtcgttcagtgacgtcattcttctccaggctggcccgccccctctgactaggcacccaaagtgagcatctgggcattgggcattcatgcttatcttcccccaccttctacatggtatyagtcccagcaggcatccctggggcagacgtgctttggctcaagatggccttcatttacgtttagttttttttaaaaccgtggaggttgcccacgggcctcggcacctggccctggcagcacagctctcaggcccagccctgggcgacctccttggccaagtctgcctttcaccctggggtgagcatcagtcctggctctgctggtccagatcttgcgctcagcacactctagggaataattccactccagagatggggctgcttcaaggtcttttctagctgattgtggcccctccattttccccattttcttatctccctgaccaaaattgctttgacttctaaatgtttctgcttcccagaatgcacctgacttatgaaatggggataatactcccaggaaatagcgcaggacatcacaaggaccaaaaaggcaattcttatttaaatgttactatttggccagctgctgctgtgttttatggcagtgttcagagcttgatcacgttatttcttccttttattaagaaggaagccaattgtccaagtcaggagaatggtgtgatcacctgtcacagacactttgtcccctctccccgccccttcctggagctggcagagctaacgccctgcaggaggaccccggcctctcgagggctggatcagcagccgcctgccctgaggctgccccggtgaatgttattggaattcatccctcgtgcacatcctgttgtgtttaagtcaccagatattttgttcccatcagtttagcccagagatagacagtagaatgcaaatacctccctcccctaaactgactggacggctgccaaggaggccccaaacccaggccccatgcaaaggcacgtggtttccttttctcctctctctgcatctgcgctttccagataagcccaaagacagcaacttctccactcatgacaaatcaactgtgaccctcgctccttccatttctgtccattagaaaccagccttttcagcatctcacccattagcagccccatcacccagtgatcagtcgcctcagtaaagcagatctgtggatggggagcctacgggtggtaagaagtggtgttttgtgtttcatctccagcttggtgttccatggcccctaggcgaggtgatcagggagtggggccaatgggcccccggccctggctttgggaccttgtgctgagggatgatttgctcctgaccttgattaacttaacagttcccagctggaagggacactttcaggacccagtccactgtatggcatttgtgatgcagaattatgcactgacatgaccctgggtgacaggaaagcctttcgagaggcccaaggtggcctcgccagccctgcagtattgatgtgcagtattgcaccacagctctgcggaccttggccattgccrcagtcgcagcttccttttttctgtttgcactgtttgtttgtatgatgttagctaattccactgtgtatataaattgtattttttttaatttgtaaaatgctatttttatttgaacctttggaacttgggagttctcattgtaaccctaacatgtgagaataaaatgtcttctgtctcctctgtctcctttagccttttgtctccatgctgctttctttctttctttctttytttgagacagagtctcgctgtcacccaggctggagtgcagtggtgccatctcagctcactgcaagctccgcctcccaggttcacgccattctcctgcctcagcctcccgagtggctgggactacaggcgcccaccaccatgcctggctaattttttgtatttttggtagagatggggtttcaccatgttagccaggatggtctcaatctcctgacctggtgatcctacccgcctcggcctcccaaagtgctgggattacaggcgtgagccaccacgcccggccctgctgctctttctttcaagggatacttgctttttattttactccccctctttctgatgtgtggaaattacactaggacgtagttttagagtctcagagctctccctatgcagctgggcagtggggctcttcattcttgcgggtccacttctctgtattagacagtgaccttaataagaacagatttcatcctgtggatcttagcagaggtcaccgttgtctgtttctcccttcagatgaacactcttcctgatcctctcctctagaattcatctcctcctgctagcagccgcgtcctggaggagcagcggatggggaatccattctgtttcttcctggtgtttaggaagttgccccacamacagattgccccgatgtccaaccagaagaagtgaaactgctgctgggtctggagaggtgaagacccgtggccagcttctgttgttgccatcggccattgctttttgttcgcttgcttttggttttgcaagaagagcggcctctgtctctgatctgcttcaaatcatcattccatcagtgacagaagtggcygttccatcagtggtcgcagccagttcagctcctgcatccatccccaagtgttctgtaagtcccaggggcattttctgccttgtgtttttgtcatttttcaatcagttycattcaatgagaactccctgtgttacctgtgttacggtgacaccttgagaatgggctacttcccctcctagcaacccgcaacaccatcccagacctcaggagccaggtttgggccagtgctgtctcctgtcgctcttactttcatccttgtcattctctaccccctggttttcctggtatttaaagtccaggtagagaagattttgactggaggtggttaggtgaggctctccccccacctcaaccccctgccattagttcactgggagcctccccctttcctccgcaaggagcaagttactacttcatttcctcttttcccaatttctggacaagaccaaggcaatttgaccaacatttatggggcatcaactctgagagtgcygaaggggcatttgccctcaaagagcttgcagtctagggacgtagacacaagcaattgcacataggcaactcgtgttgtgtgctattataacagttacatgtgcaacactgcctacgaagggactcattgttactaggcatgaggtaccaggaaagaagtagtgttcatatgagccttaagaaatcagtacaatgtcctcgggaggaccagaggaaggacaccccaggtggaaggaacagcagaaataaaggcacagtggcatgtgtgggtgtggggtgttggagtgtcatagaatctgatgaggttgggatccatgggggtaacaggtgggaaaacagtttactctgtttaaggtgaacttattgcctggtgttttgtgctcagagcaaataccctcttcaggagcagatacaaaaagccggcatcttctccagcagctcttagtaaaatacaagcccaggcccttcagacccggattaggcaaagactatgtctgttttccaaatacttgttagtacacaaaaggcacatgaacttgtagtttgtctgcatggcaaacctttcttcactttgctcagtttttatttttttgagacaagtctcattctgtcacccaggctggaatgcagtggcacaataccagctcactgcagcctccacctcccaggctcaagccatcctcccacttcggcctcctgaatagctggaactacaggtgcacatcatcatgcctggctaatttttaaattttttgtagagatggggtctcactctattgctcaggctggtcttgaactcctgggctcaagtgatttgcccaccttggcctcccaaaatgctgggattacaggagtgagccaccacacccggcctgctcagcttttaaattcaacactctgcctactcttttcaaaactaaaagtaccattaccttagctgtagaacctaactctctcgaaatgtaccagagaaaatctaattaatactctcattttctgaatgttcccccctaaaaacaacaaaaaccccactaggagtggaatttgaggcctccccaaccaccyaccaaaaaaggagggtgaaatgaaaggaagaagaaaaactcagcattctttcctctgacaaagagtaaaacgacaaggaatatcggcctgaattctcttcccaagaagaaagaaagcacaccaacgcaggcatttgtcttctgtccatggkgctgaagtttattcactttcaaaccactttcagtaacaggtgaggttctaccttaaaatttaatgcatggggtgggagaggcgaggaagtcaccatcaaaccactttatctacagttagcataagatgtgagaagtgttgacaggaagctgcagcttaratgggatgatcacaactccatggcaacaagrtgacacraatgcagcagagamcccaggggacaggagcctcttgcagtctgtccctaggcccagccctgcttgtcctccctggctgttatcttcrgtactgcaaagagaacacagacatatctggcttggtgacctggctgtcctggaaaagtcagcttcatgtatgagtgtgcccatcctctgaacttgattactgaccacctgcttcccaccggcccccaccccagcctgatgaccctctgagcttcatgaattgataagcaagttactcatcagagtaaatttcacttaagcccttcaggatcttgcaattctggggaggaatatgaactgctaatcagccatgcaaagataacttggctctatgaatattttaatttcccagtgctagtggcagttgcttttttttttttttttttttgagacggagtcttgctctgtcgcccaggctggagtgcagtggygccatctctgctcactgcaagctccgcctcccgggttcacgccattctcctgcctcagcctccggagtagctaggacttacaggcgcctgccaccacgcctggctaattttttgtatttttagtagagacggggtttcaccgtgttagccaggatggtctccatctcctgacctcgtgatccacccgccttggcctcccaaagygctgggattacaggcgtgagccaccgygcctggcctttttttttttttttttttttttttgagacagtctcgctctatcacctaggctggactgcagtggcgygatctctgctcactgcaacctctgcctcctgggttcaagtgattctcctgcctcagcctcccaagtagctgagagtacaggtgccygccaccacacccagctaatttttgtatttttagtagagctggggtttcaccatgttggccaggatagtcttgatctcttgacctcatgatcsgcctgcctcggcctcccaaagtgctgggattacaggcgtgagccacygtgcccagcccccccccttytttttttaagcattttctcagcagactagctaaggacaatagatggcatgtcctgacacccatggggcactctgggtgttggggcagaaacttgagagggaatgagcttctgcattggtccctttcctgctgaaggtgtctcccagtagtgtccatcccatcccatttccatccccagttcctcttacccggaagctgttacagcccagtccgctctgggctccaatcctgtccatcctgcccccgaagcagctggatctcygcaggctccgaggggcagtgagcagcgccctcagcttgctttttaggagggcagatcgatcagaggagtcccaggggccccgcccgagggcacctccatctctctgggctgggctgacttccccggtccagggaggcacctcagggarggggctgagagcagcccccgcttcttcattcggctcactgagcacttgtgggggcacgacctcatcttctaaaggcatcttttcttccaaatggtccagcaaattctttagaaaaggaaaatacagggaaagggataaacctcactgacttggaggaaatcaagaggagtgagcacagcatcagaaagccccctggccccagactgcacccgctttcctggccctaccttgaaatccatcaggtctgcgttggacacggcattgtacatgggattagctctggtctgacctaggagctggaatgccagtaaaaggaggaagctcacggtggtggtggagaaggagctcatgctggcgtcgtcaaggagcaatccactgcttgctgctctgtctctcccctctggttcctctctggttcccctctcttggcctacgtctgtccctgtctcccagctgcccagtgccgcctctttttatagccccccagctctccaagcacgcaggagagacagaaccctccccattctgtcacttgcagtgataaagctgccaagtgagaagccagcaggagatgcccttttaaagttatcatcccgcagggcttgtcacagcccctctctgccttgggcagccccaacagccccccagaccctcagctgcaagagccgcattcttactgatttgactcaagaggctcccacttcaaaggtgtgagaagagtaaaaaagagtccttggttatctcaccgccgtgcctcaggattctttctcctcgacgctggtacccgtgcggggaaacagagggtgacgcttggctggtgcccagctcccctggtttgtttgtggctcagctgtcagggcctccaaataagggtggagaggaggaaatggcaggcagccagcagcccgagacaaatggatccagatgctcaagctggcctcacacctgcctcatccgccacgtgggcagacctctggcctcagacagggctgccttcacccctggcagtccctctccatggtcaggcgaaaggaagttattttttagtatataaagtcagctgagaaccaaatgtgatgaagctcccaggaatccaacccccaaatagaaatagcaagaaaaggcgggggagcacaagcatcctctctccaaagctcctcctcttccatgtcccccgcgaccctcctccagcatgctgcggggacaggcttagaggacgcagccaatttcatttcttccgttgctgtttatagatgctcagactcttcgtgtctgaagtttgttaacatccccctgcccttcctgggcttgtgcccgtggcaacttgaccgatggaggaagggaggtgggggtgaaggaggtatagtcagtttccctcaatgccttctacatccttccctgaggacgtggcaagtggcaagtgaccgagccaccaaggtcacaatttccctggcccccaaaagggaaataacaggcagcaagtctgtctatgtttaatgaatggcctgtttgctaagcactgaactcagtgttagccattaccattcaatgcaacgtatactgggggaaaactctaaatttgaagggctgagagaccagtactgtagcccaaaacaaaccagttgcatacctcttcgcagccttactttccttgtgtgtaaaatgagaaagaatgttaaaaaccggccgggtgcagtggctcacacgtataatcccagcactttgggaggctaaggtgggtggatcacctgaggccaggagtttgagaccagccctaccaacatggcaaaactctgtctctactaaaaatataaaaattagctgggtgtggtggcatgtgcctgtaatccccgctactagggaggctgaggtaaaagaattgcttgaccttgggaggcggaggttgtagtgaaccaagatcgcaccactgcactctagcctgggcaacagagtgggactcggtctcaaaaaataaataaataaatgaatgaataaagtagaaatcttccctgcctaccttgcaggattgttgtggagcccaagtgagctgagaacgtgtcaacacataacaagtgtgcagtgctgagtccctgcaagatggccatcatagttgtctttattggttgcttgtagcatgcctagcactgtgctgagaactttatggaaatgattttattttgatcaccatccccaggtggtagatagcattgtccttgcttacaagggaacagaactgagcccgagaggctatgccacttgcccaaggccactaggtgcctaagtggcggaaccaggactggatccccaggtctgacgctgatgtctgtatcctagcctatttcacgtagagagctgccaccttacctcttagctgcattccccaattaaacccccattccccatctttcagatgccccaagggagctccttcaccttccccatgcccctggggctgtagcttttttgtgcacttaccaagtctgtgtgtgttggctgctctcctgatctatttctacaccgaatgtgttttaatccactccttagaagctcagaaaatgtgtgttgagtgaccagctctgtcctggctggccagatctgtccccaggtgtgctgacctcatgactgaccaggtgaacaggacgttgtgcagccataaggttggaaatcagggcagcaagtgactagaggtcacaagaggtatccagggtgatattattctaagataagataaaagggaccctctttggcaagccttggggtttgtctgtaggtggggatctaatatttcatggggtggttagaagcagcctgtaggagtgagagagaagaaaagtaacaggcacagaaagccaggcccacctccatccccacctcttccacggctgaaaaatcaaaagccttttatttccttatcactggaaagaagtcatcttagtcatacaacgggtggagcactgcaaacgggtgggagaatccagaatccgggtgttgccagattccagcccagagtttggcttcacgattctctgggggtatgccttgggctgctgcagggagccccagagtgtgcagtgtcacccgcgtgcagagctggcacgaaatccccaacacattcgtggcatgattctgcgggacccagatggtctaaagcagaagccccagttgggaaaaattggttcatacttagggatgatcgttgctgactttgaaaatgatgttttgtttctttggtttaatatggaggtcactaagggctgaagactggggacagtttccctagaaaacaaagcccaaggcaaaaggtcactcgctaaagttttgtgggggttcctattcaaaggaagcaagagtgaggcggagtgagaggctgttttagttaactactgccgggtaacaagtcaccccagactgggcgtggtgactcacgcctgtcattccaacactttgggaggatcatttgaacccaggagttcaagaccaccctgggcaacatggcaaaaacccatttgtactaaaaatacaaaaaattagctgggtgcagtggtgcgtgcctgtcatcccagctaccctggacactgaggtgggagaatcaccacagcccaagaagttgaggctgccgtgagccatgaccaagccactgcactccagcctgggtgacagagtgagaacctgtctcaaaaagaacaaaagccaggcatggtggctcacgcctgtaatactagccctttgggaggctgaggcaggaagatctcttgagctcaggagttccagacaagactgagcaacataaggaaccctgtttttaataaataaacaaacaaaaaacaaaacaaaaaccaagtcaccccaaaccttagcaacttcacacaatgcacatctattatctcatcacctctgtgctctgtggatcagggatctggccctgcttggcctggggcccctgggcaatgaaggcgttggctgcggctgcagtcatctcaaggcttggctgggggaggataggctttcaggctcactcctgcagctgttggcagaagccacaggttctcgctggctggtggctggtggaaacatcagtttcttgccacgtgggtctctccatggagacgcaactgtcttctattaggtcaggcgagaaagagaagttacggaagaagccacagtctctttgttacctaatctcagaagtgacatcccattcttcatgttgtactgttctgtgtcccttagaagtgagtctctgggtctcactcacactctaagggagggggttacagagggtatgaagaccaggaggttggggatctctgggggccttctgaaagcactgcccacacaaatagagaaggaaggaaagcaaatgtaaggtgacattggctgagtgcagtggctcatgcctgtaatcccagcactttgggaggctgaggtgggtggatcacttgaggtcaggagctcgagaccagcctgaccaacatggtgaaaccccgtctctactaaaaatacaaaaattagccaggcatggtggtgtgcacctgtagtcccagctactcgggaggctgaggcaggagaatcatgaagggcagggctctgcaggaaggttgacttatttgggagtgtcttagtttaagttctcttgaaccggagacagatattccagtattagtggctgatcttggagacaaacccaggaaatgtcagtggagagtggggaagtgatacagaaaaagtagaagtcagtgaccacctctggcagtaggtgcttaatcctcctcccacagagaactccaaacaggttctctgtttggagaacagagacacatgccacctatgactcaagggagctgggtgtttgttttattttattttattttattttatttttgaaacagagtcttgctctgtcacccaggctggagtgaagtggtaatttcagccttgacttcccggctcagtgatcctcccatttcagcctcccgagtagctggactacagatgttcaccaccatacccggctaattttttttcttttatttttagtagagacgaggtctctctttgttgcccaggccggtctcgaacatctgaactcaatttatcctcccacctcagcctcccaaagtgctgggattacaagtgtaagctgctgcaccaggcgtgagctgggtctttaaatgccaactcctggccaggtgcagtggctcacacctgtaatcccagcactttgggaggctaaggtaggaggattgcttgaggccgtgagttcaaaatcagccttgcaaacatagtgagactctccatctctacagaaaaaaaaaattattttaattagccagacatggcagcatactcctgtaatcccagctacttgggaggctgacgtgggaggatcgcttgagcccaagagtttgaggttatagtgagctatgatcatgccactgcactccagccttggtgacagagcaagactctgtctctatttaaaaaaaaaaaaaaaaaaaaaaagccagctcctgtcagatgttggttgagcactgctcaggtcaatgtcaattccccagcacttcctgccggccccaaggagctgagtgggctgcggctgccagagaaagttcttaggcagaaaagtgcagtgctgctggatgaaaggattgatgtgtgctgaagatcaggggctacgggcctctgccgtgcccgaaacgggacagctagaggcaggagagtgggagccagtgtccaagggcagatactgagtttggttctagaaacgcttaaggcagctgtatggggcaggctccagaccccaagggaaaaatggatcacttggtggaataagactgattatttaagctaaggcagtggatgaaaaatcctagagagaggctgagatctacaacatgaacaaagacaaatggccaagttcatgtcatggtttagacccagctctgcaggaagagaaatgcattttttttccttgccacaaatcattctcagaaaggccaaagcaggtggggcacggtggctcatgcctgtaatcccagcactttgggaggccgaggagggcggatcacgaggtcaggagatggagaccattctggctaacacactgaaaccccgtctctactaaaaatacaaaaaaattagccgggcgtggtggcgcacacctgtagtctcagctact

SEQ ID NO: 5763 - DNA, 28553 bp, Homo sapiens
gaggtggaggttgctgtgagccgagattgcgccacctcactctagcctgggcaacagagtgagactccatctcaaaaaaaaaaaaaaaaaatcttcatcccttttcaggctctaatcaatcgtggggttaacctggatcccctgggcaagtggtcaaagactggactagtggtgtatgattcttctgtgcccattggtaagtctcccccacccaagagcccttctacctctgtccctgtccctaccgcatgtcacagggtggtccttctccacaggtgctacccccgagtacctggctgggcactacatgctgcagggagcctccagcatgttgcccgtcatggccttggcaccccaggaacatgagcggatcctggacatgtgttgtgcccctggaggaaagaccagctacatgggtatgagaggggcaggcaggtgggattcatcgggctgtcttgcttttgaaagtagatggggttgctggggttgctgactcactagtgctcatggaacacaatgtgcaggtagctagcagggtggtgaggaccagtttctggagtcggcctgggttccagtgtgccacttactacccatctgactatggattctcttttgtcatccataaaatgggatggtaattgtgcttgggttggcccttgtattacgcttggattgtgagggttaaaatgatgcgtttagaagtccttggcagtgttcagcacatagtcagcagccataacttttattaagctgctgtcacttaaaagaagtaatttagtatgtaggaccacataggtgtttggtaaaaatgggaaaaccacatcggtagacttgccgatcaccaggggctagtgcagagtggatcagcctatacagtaggcaggcttgttgggagcgaagttgccttgaggtgatgacacttctcatgtggattcctggacaggagggtgggagcaagtgtggagacagtggaactggctgatcagcactgttactgccctctctttagcccagctgatgaagaacacgggtgtgatccttgccaatgacgccaatgctgagcggctcaagagtgttgtgggcaacttgcatcggctgggagtcaccaacaccattatcagccactatgatgggcgccagttccccaaggtgagactcgagctgtgtgtcttctgaggcttcttccggttgaccttctcccttcctgacctcaatgtttagactcgaccctagtaaatattgccctgctggttgcagaagagacatatgattcatctgtatcttttctccaggtggtggggggctttgaccgagtactgctggatgctccctgcagtggcactggggtcatctccaaggatccagccgtgaagactaacaaggtgaggagtcaggtggtgggcccctgagaggccttggctgggtctcgtagagctggaaactgagatggggacaccctctgggctcccctctcctcctgaggctgcctttgggtctctttttgggacaggatgagaaggacatcctgcgctgtgctcacctccagaaggagttgctcctgagtgctattgactctgtcaatgcgacctccaagacaggaggctacctggtttactgcacctgttctatcacagtgagacctctgccatggcagagcaggggaggctgggctggggggctctttgccccttagagctcccttcagctccagctctgctttttcctccgttctttgtcttccccccacatccaggtagaagagaatgagtgggtggtagactatgctctgaaaaagaggaatgtgcgactggtgcccacgggcctagactttggccaggaaggttttacccgctttcgagaaaggcgcttccaccccagtctgcgttctacccgacgcttctaccctcatacccacaatatggatgggttcttcattgccaagttcaagaaattttccaattctatccctcagtcccagacaggtaagtaatctttttcttcccttcgtcaccacctttgctctttccacctttcaggaggctttatggtgtgacaagaggaagggaaaggaaagattcatgcatcccttactccagcctttgcatgcttggctgagagaaccctctcattccagctagaattgcttttgagtgctggaccccatgtgaacaggctaaagtgttcatatggatggaggcctgttcctttattctgccaagtggctgcagttgttcagcactaaatgcattccaaatgcaggttgtggtttcttttccttcttggcacagggtggacttactggtactggacctctgctggtccagcaatctcagcactgggttggaacagagctccacagagctttgtcagcagttctctgagcccttcacactcattgcagattgttttctcagccatcttgaggagtctggcctggatctcaagggaagggtggggttttctgaaacagccttgagagcactgcttactgggatataaccctgggtttagttggaagagggagagaagtgctactttagaaatagtagaatttgtctgggcgtggtggctcatgcctgtaatcccagcactcacctgaggtcaggaattcgacacggtgaaaccctgtctctactaaaaatataagaattagctgggtgtggccaggcacggtggctcacgcctgtaatcccagcactttgggaggccaagacgggtggatcacgaggtcaggagatcgagaccatcctggctaacacagtgaaacccccatctctactaaaaatataaaaaattagctgagcttggtggtgggcgcctgtagtcccagctactcgggaggctgaggcaggagaatggcatgaacccgggaggcggagcttgcagtgagctgagattgtgccactgcactccagcctgggcgacagagtgagactccgtctccaaaaaaaaaaattagctaggtgtggtggtacgtgcctgtagtcccaactactcaggaggctgaggcaggagaatcacttgaacctgggaggtggaggttgcagtaagccgagatcacgctattgcatttcagcctgggcaacgagcaaaactccatctcaaaaaaaaggaatagtaaaatttgctataacttaaaaagtacatattttaattatcccgcacttcatcacaattcacatggaaagaaacttctctgatttaaaaaataaataggccaggtgtggtgatggctcatgcctataaatcccagtactttgggaggctgaggtgggaagattgcttaagaccacgagtttgagacctgtctgggcaacaaagggagacagtagttccagctactctggaggctgaggtaggaggatcccttgagccccaggagtttgaggttgcagtgagctatgatggcaccactgtactccagcctgggcaacacagtgagactctacctcaaaaaaaaaaaaaaaaagataaataaagcctagtgcttcaaattcatttagaagaccctgcgaggccgggcgtggtggctcgcgcctgtaaccccagcactttgggtggctgaggcaggtggatcacctgaggtcaggagttcaagaccagctggtcaacatggtgaaacctcatctctactaaaaatacaaaaattagccggacatggtggcgcacggttgtgattgtccggaggctgaggcaggagaattgcttgaacccaggaggcagaggttgcagtgagccgagatcacaccactgcactccagcctgggtgacagagtgagattccatctcaaaaaaagaaaaaaaaaaccccaaaaccctgagaatcacctcttccttacagcatcttgttacttcctgtcctcaagagggcgcagcttcctgtagaaaccttttggcccaaggataggcagtgatttttttttttttttttttttttttgagacggtgtcttgctttgtcgctcaggctggactgcagtggtgcaatctcagctcattgcaacctccaccttccaggttcaagcgattcttgtgcctcagactcccaagtagctaggattacaggtgtgtaccaccatccctggctaatttttgtatttttagtagagatggtttcaccatgtgggctaggctggtcttgaactcctggcctcaagcaatccacttgccttggcctcccaaagtgctggaattacaggtgtgagccaccacgcctggcctataggcagtgatcttttaatacaaggttcaactaggacttgagtaaaggccaagttatattaagtaatgggaatttaggtaatctgctcttaggcactgacctaattgtgtggagctcctgcccaggaaatggcaattctcatattttaatatgagaatattaaaatatggtgataaggcccattttctgacaccatctgtttaattttaaccccaggaaattctgaaacagccacacctacaaatgtagacttgcctcaggtcatccccaagtctgagaacagcagccagccagccaagaaagccaagggggctgcaaagacaaagcagcagctgcagaaacagcaacatcccaagaaggcctccttccagaagctgaatggcatctccaaaggggcagactcagaattgtccactgtaccttctgtcacaaagacccaagcttcctccagcttccaggatagcagtcagccagctggaaaagccgaagggatcagggagccaaaggtgactgggaagctaaagcaacgatcacctaaattacagtcctccaagaaagttgctttcctcaggcagaatgcccctcccaagggcacagacacacaaacaccggctgtgttatccccatccaagactcaggccaccctgaaacctaaggaccatcatcagccccttggaagggccaagggggttgagaagcagcagttgccagagcagccttttgagaaagctgccttccagaaacagaatgatacccccaaggggcctcagcctcccactgtgtctcccatccgttccagccgccccccaccagcaaagaggaagaaatctcagtccaggggcaacagccagctgctgctatcttagatggttgaaaactagacgggtggctcactgccattgtcaccaggttggaactcttgcctctgtgaggatgccttctctactgtgcatacccatgaaatttaatacacattttaaaacctctggccactgagtatttttgagggaactgggtgctgcctttgccgctttaagggtaaagatgggaggtgggactgggatcttctgaggagagggaatggttgggtgctactgagaaataaggtcagttttaggctcctgcatccttgggttttcccaggaagggaaagccctggagtcagagctaggggtgattgaactccggggagaggagggcaatagaagtgtaggggaaggcggggcacactagctcatgcctgtaatcccagcactttctgggaggccaaggcgggtggatcacctgaggtcaggtgttcgagaccagcctggctaacatggcgaaacctcgtctctactaaaaatacaaaaaatcagccgggtgtggtggcgggtgcctgtaatcccagctactcgggagactgaagcaggagaatcgcttgaacctgggaggctgaggttgcagtgagccaagatcgcgccactgcactccagcccgggcgacagtgagactcggtctcaaaaaaaaaaaaagtcgtgtaggggagatgggcttgccaccagaacccatggggtactggaggtcctgggctttacgccaccccggctggagtccaggcggtggctcccctcatcacagggctcggcctcagacccggaaaggtccagggtccggcctccaattggagcctgtcattggcttcccctcggcccgccccctgacctctgccccgctgccgagccgcctgattggtcggctctgtcccgccggcgccgcattggctcttctggctcgccttccatccctgctcctgcaccggtctgcatctcccagcagaaggcgcagccatgaatccgttattcggccccaacctcttcctcctgcagcaggagcagcagggcctggccgggccactgggggactcactgggaggcgaccacttcgccgggggaggagacttgcccccggcgcctctctcgccggccggccctgctgcctactcgccgcccgggccgggcccggccccgcctgccgccatggccctccgcaatgacctgggctccaacatcaacgtgctcaagaccctgaacctccggttccgctgcttcctggccaaggtgcatgagctggagcgccggaaccggctgttggagaagcaactgcagcaagcgctggaggagggtaagcagggccggcggggcctgggtcgtcgcgaccaggcagtgcagaccggcttcgtcagccccatccggcccctggggctgcagctgggcgcccggccggccgctgtctgcagcccttcggcgcgcgtgctgggctcgcccgcgcgctccccggccggccccctcgcgccctccgcggccagcctctcgtcgtcctccacctccacctccaccacctattcctcgtcggcccgcttcatgcccggcaccatctggtcgttctcgcacgcccgccggctcgggccgggactggagcccactctggtgcaagggcctggcttgtcgtgggtgcacccggatggggtgggcgtccagatcgacaccatcacgcccgagatccgcgctctctacaacgtgctggccaaagtgaagcgggagcgggacgagtacaagcggaggtagggattgggaaagggggacaggtctctctgtgtcataccactcacaacgggccgcgagttggtgtgggttccgaagaatcaggggtgaaaagaatgagagtaaagtttgtgctgtgtaatgaggagcttggaagcaattggatgcagggagactagaatccgcagagaatgcagaagccctgctcgtgacaggaagaaggacgctgggagcggaacacggggggattcctacttttccggcttgtctctgccatccaggcttaactgcgggttttgtgcggtgtgaaagggactggggctctgccctaccggtctcagccctggggcaggttagggatataaacttcaaaagtaggaggcaaggatatagcgtaaatttgggagactaaattgagtgaaactggaaggggctggtgagggaggggctgtaccttgcaacgagtgattctttcacaccccaaggtttcccaaagaatattgatggaaaccaggtacctgctgtggtttcataggaaaagctccgggacctcaagccattgcttgagtaggtcaacaaactgggaaaagaaagagtgaagggaattcactagggtgagggtggagagcagggctgacaggggaatcttggcagtataaagcgccagtggggagggagagtggagagccagcaggggactgagcagggagaagctgggatatgggccctccctaggaccgcgaggccgcggggcgggcccggtgcattctgtggatgaagatttggctgtctgagaggagcccggccccaaggggcaagggaaagggatgtgatgccaggagtgctggctgtataccaagtggattcctyagatggctgataaccaagccgataggacaggagtgagagcagaggtagtgtcttgcagactccaacccaagccttgaggagggagcgggtgactgacaggctttggtttggcggcctcccctctcatctcagctattatgaccccttgtgggcgggcctgggaactacctatgcagcccagtgtggcggagattcagcactgggtgaggattggccgaatgttctaggaaatgaccgctgggtctaggggcgaccttcagggatctccaccctgctggagtttaccagatcacagatcagcaggctttctttttttttttttcccataaatgataatattttattatagaaaaagcatcccaaatacaggatttcgtaaacactggtaggtgaacaagtgcaattttagaagtaaatgcaaagtaaagaggcaaaacctacaagcattttgccttcagaagaagatgtagtgttctcctgcactagtgatcccacccagaacacaaatgtggctctgtctcccgtgaaagcatcagatttgctttctgagctcagtatgcccatttcaataattgcaaagtgatggcaagaagtggcgttgaacacatgactacagacccttgacttaaaatattgagacagggacttgctctgtcatccgggctggagtgcagtagcgtcatcacagctcactgcagcctcatcctcctgggctcaagcaatcatcctgcctcagcctcttgagtagctgggactacaggtgtgcactaccatgtccatgcctggctattttttttttttctttttgcgttgtccaggccagtctcaaactcctgacctgatcagcaggctttctgagcttgagtcctgtcctcgtgctggcttccttagttgtggtccatgttatgtgtccttgggagtttcagttgtcctgaaatcatcgttctgccacccagaaccagcctgctctgcccctgcaggagttaactacgcgctcagcagtggcacaggcacagttctggaatacatccataaccacaggaacaactgctgttctcaggagcattttttttttaaactgaaggagcgtttgtccttggtccagctgtccaggacaggaaggagttattccttggggactgattagctcatcgctctgcagcacgctgctgtgtagagagccttagctggattcggatggtgcgtgatactggcagtgactcttcttcctccctagattccctgccctcattctggtctctttatagcaacactgtaactcctgtcttctgcctggaaggcctgggatggcttgagcgctacactgggaggtagctaaaggcctcctgcgttctattttcagctcccctgccttgtgcgtgacctttttttgagcccccattttcccaacataggaatggtccctgctttctctcttcaacccagggatacagttttttggaagagagatatttggtccatgcagaacacatggatatcgctctcaaattctgcccatgttaagggaaccttataagtgagaccagatggaaatggaggtgaaaatgaacctgtctgtgtgaagtctggccaaagaacaaatagaactgtagtgggcttccagatgattcatttgtagattttttttaccctgtaagatttccttaggcttaacctttagctataactgccttacttaagtttcttccaggctctgttgagctcactgtcagatagcccctcctgccctctttcacacatcttgtccagggttagcgtgcccttgacaggcttactgtctccctccagggactcgtgggctcccggcgcatgagggcaccacagttcatgccttcacatcatagatgaagaaaccaagacccagaaaagataagggtcttagctaagaaaacataatctgatgcgactggttcccttagtggcctgactgtatgcatgagaatgccagggaggaggggagaagcacctacgggacacacagggaagggggctgggagccaggaaggctgggagctgggctgtgtggggagccagcagggtggtggctgggctggctgcctcctcctgctctgcccagcagggaggggcagtcgaggtgatgtggaggagttattattaggaatactgcagtgcggctgtgaatgaggagatgggacccagaggctgacacaggaaggaagatggagggaaggggaagaaagggcttcacccaaggcttcagaagctgcccactcagattttaattttcttgctgtcttcttggccccttcctaaccacctttcttgtgttgaagtttctctcttggtgcagttcccctcccttctcgggttgacagaagtgatgagctcacaggaacaggatttgagatgtgctgctacgccagctagactgcagggccctggaatgccgggcgggtcctaagcagcacgttgccctggcttccatctctgtgatggaatagaatatgcactgcctgccatggctgatgagacatgacaaagctggctctgggaagcatgccctacctaggaccctgccctgtggcccagggtgtcgtccggcccacttgcagtcttaatctctgaattctgggccctggaacaggctgtgtctagttctcatttgccgtactcaccgggcccctttacatactctactttctctttccctctgggtttgagtgctagtaaccccaggctcgtgtgtccactgctgtcatgctgctgtgggacttccggcctctgagccagtctggtcacctctctgtgactcccttagaggaggctctgggtgggtagtttctggagctagtggggaaggactttgagtgtctcctaccaggctcttgacccactctgttgatacactatgtgtcctgcagatgcttttacagggttaaatgataccacaagaggcagggcagcgggctcgacgagctctgttctgrtgcgggcaggaggcgggagcccggatctgtgcgactgaaggtgggagactgggccgggtggacctggtggtctggtgtgggcaggaggtgggcaatgaggccagccggacagctggctgagctggggcctgagcagggatgggcatcacggaggaccggagcctcagcacttgcccaaacagagctcctggtgcacagcccggaggttccgggaaggcagctggcgagctcgacgcccatcaggaagcacagagccgcgtgacagctgcagttggtcaccagctggctggccaggcattcctgtgccctgctcctccccatccagggaaccagaactggggtctgaggcctgagccagagaggtggggacagggagccatgggggcagggaaggactctgtacctaagctctctccgcccttcccatgtctgtcaggtgggaagaggagtacacggtgcggatccagctgcaagaccgtgtaaatgagctccaggaggtgagggtggcgccccacttgctgctggtgcttccctgggtacccctgtctgcccatgaccctgctgccgtctccctgtccctccttggcatctttatcttcctcccacctcggcagtgccaccaacatcagggtttctcccaactgcaggaagcccaggaggctgatgcctgccaggaggagctggcactgaaggtggaacagttgaaggctgagctggtggtcttcaaggggctcatgagtaacgtgagtgcagccccaggcttcccgagggtcgaagtgaggcttctgaggccagaagagtaggcccttctagtgttggcctgttggcctcccgtccacggctcctccccttctctttgctttccttccctttttcccctagccacccctaactccagagaaagacaagsaacaaaagtctcggtgttgcgtcacagaggtggcgcagcttctgagggcctggggttgcagagcagttagtgagcagcttctggggtggaggctctgcagctggcgccggggcgctgggccgattcctcagcctctgaggcctcacctttggcgtggggaaataaacgcgtgcgctctgcaggagtattgtgagggtggtcatgtactcgggacagtgcccagcatgcagtgttagctggaagagtgttagctgttgcgattattatagtcctttctccactcttataattcccaggagtctctttctctctgggaatgtaagttctaggaggatgaggaccgctagtcgttccagtgagccccctgcatgtcccaggcactggccatgccctccagggcttccgtttggccagggagcagtggcccgagccgccccatgcccagcatattcacacagtgctgtggggaggccaccgctacccaggaagaggggtgcagtcagctcagggagactccacagaagaggcaccggtgcaatgtggtgggaaggatgaggaccttgccaggcctaattcgtccttgtctggagaactgggcgcctcctcactgttccctgggctccctggacagaacctgtcggagctggacaccaagatccaggagaaagccatgaaggtggatatggacatctgccgccgcatcgacatcaccgccaagctctgcgatgtggctcagcagcgcaactgcgaggacatgatccagatgttccaggtgaggacggagctgccctctgctctcaggggtgggtggggcaggtggatgcttccgtggcrgctggcctggaacgcaggccctgcctcctgcttggggagccttacctggcaactggggccctcacggggctagactggggggtaaggagcagcatcaggaggggcatcgtggaagctgtctctaacgccgtctctcccttccccctctctctcctctgtctgcttcctctcctctcttcctctcatcttctctcttgcttcctccacagaagaagctggttagtttgatctcacgcaagcttattaatgtcccagtcccagtttctaagctgcctaggcctcctggccctcagtttgggcccgctgggctcttgagcacggatttttttctgccctttcccttttccttgctcttccccctttttctctctatctcttgttctcttgactgcatttctttctctcccttctcccccggctttccagatctggatgtgattcaggttctcttttgtacacattgcacactcatcctccttgcgtcctaaagcttttttttttttagttgagtcatttaatcaaaaagactttttttagaaaaaaatttcctcttgagccatcatgcacatctgactgcagccccagcgagcccttccttccttgtctgactgctcttcttctcgatttcttcttgttctgccttctcggtttgcagccctgacccccgctgtgtgtctggcccttggtgactgtccgtgtttctgttcctgtcattgtaactgtgacttttctctctgtctgcccccccttcctactggttcatgcttctcccccattcccaccctctctgcccggcctcccgctcccgccctttctcctcatgcacccggcctcgtctctgtagtctctgcacttgtctcccattaaggtcccatccatgggggggcggaagcgggagcgcaaggctgccgtcgaggaggacacctccctgtcggagagtgaggggccccgccagcccgatggggatgaggaggagagcacagccctcagcatcaacgaggagatgcagcgcatgctcaaccagctgtgagtccgcaggccgtgctcccgcagcaccgacgccacagcagcccaggaggccggagctccccagtcccccgccaggacgaggccccgcccgccctgacacccgggttccctgtctctaggagggagtatgattttgaggacgactgtgacagcctgacttgggaggagactgaggagaccctgctgctttgggaggatttctcaggctatgccatggcagctgcagaggcccagggagaggtaacctctgctcccggcctcagggccctctggctctgcctctccagcctgamgcccactcccccgctcctctccttgctctgtccccccatgtggctgtcatcctctacctgcgtctcccctcttcctttatccttttgcttttctttctccagtttctttaaccagacttcctctctctctctctccctgacttggccctttggaatgcgtcccatcccatccctccttggctggcctcccccgcttccctttctactccagcagcaggaagatagcctggagaaggtgattaaagatacggagtccctgttcaaaacccgggagaaggagtatcaggagaccattgaccagatagaggtaagggcaggagcggaagccaggggcgtggtgtcccagagggttttgagtggggctgcaggcgcagtggcctcatccctgctgcaggaccctagagaccaaggtcttgggaggaggagtgatctctcagctatagtcctcctggtgggctctgaagacctcaggctctggaaacagacagatatcggttcaaatctcagctctgttacttacaaccaccctgaacttgtaataagttacttgttccctctgagcccctcctttcctttcctttcctttcctttctttccttccttccttccttcctttctctctctctctctcttcccctccccctctatccctccctccctctctcccttgtctttctgtcctttcttttttgagacaaggtctcactctgtttcactctgttgcctaggctggagtgatcctcccaccccagccttctgagtagctgggcccacaggtgtgtgccaccatacccagctaatttttatttgtatttttttgtagagatggkgtctccctgtgtttcccaggcaggtcttaaactcttgggcttaagtgatcctcctgcctcggcctcccaaagtactagaattagagacatgagccatgtgtccagccctacacctgtttctttttctttctttctttctttctttctttttttgagacagggtcttgctctgtcactccaggcccactgcagccgtgatcttctggatccaagcaatcctcctacctcagcctcccaagtagctgggaccacaggcgtgtgctaccacgcccggctaattttttgattttttttacagagaacagggtgtcactatgttttccaggctgccctcaaacttctggattcaagcagtcctcctaactcggccccacaaagtgttgggattacaggcatgagccactgtgccgggcctttttatttgtaaaatgaggaatttaataatacctcacctatagggttgtttagaagatcagatgaaataatgcatatatagagcttagggcagtgtctggctcatagcgagtgtagcatagtggggactgttttattattattaacactatcagtgccatggcactcagagatggactgggactttcctgtttcttccactcagcctttgagataacagagaaatctccatgctttttcccaagccttgaagtaccttctagaggtacctagaggcaagtggagctggtgctttagctcaaactctaggctttaggagctgcaagaaggatttgtggaggccgggcgcggtggctcacgcctgtaatcccagcactttgggaggccgaggcgggaagatcacgaggtcaggagatcgagaccatcctggctaacacggtgaaaccccgtctctacgaaaaatacaaaaaaaaaaaattagctggccgtggtggcaggcacctgtagtcccagctactcgggaggctgaggcaggagaatggcgtgaacccgggaggcggagcttgcagtgagccgagatcgcaccactgcactccagcctgggcgacagagcaagactccgtctcaaaaatacaaacaaaggaagaaggatttgtggaaccacagaatggaggttgctgttgctgtgggaggagggatggacgggacccccgtgagctctcctggcctggtgaggtggtcctttcccgacgctctgactttgggagaggcatggagccttctctgcgtctcagcctctcttcaggcccacatgggagattcatacgtagtccccccttatcttcagggcatgtgttccaagacccacagtggatgcctgaaaccaaagatagcactgacctcctgatagcttgggtccagttgctgtcaactggaacgtgtttctgttcatgtctcccacccacacattcaatgccttttctatcttaactaagcacttagcgtgcgctgtggcggtaccttttgcagttcgaggtgtgacagcaaaactggcacaaatttctttttccttctttacaatttcacggatagaagattcattcttactgtagagcttaccaacctcagcatcggattctttttcttattaagttgaaaacttttaccttttcacttaaagggagcatattttggcttctctttcacatatccaaattgccagcatcactactcttgtgctttggggccattatgaagtaaaaataagggttccttgaacacgggcactgccataccacgacagtcaatctcatcactgagatggctcctaagtaactaatgggcaggcagtatagacagtgtggatccttgggacagagggagggttcatgtcctggtctggatagagtgaggtttttttttttttttccgagacggagtctcgctgtgtcacccaggctggagtgcagtggcttgaactcggctcactgcaagctccacctcctgggttcacgccattctcctgcctcagcctcctgagtagctgggactacaggcgcccgccatcacgcccggctaatttcttttgtattttttagtagagatggggtttcaccgtgttagccaggatgatctcgatctcctgacctcatgatccgcccacctcggcctcccaaagtgctgggattataggcgtgagccaccgcgcccggcagagagagtgagattttatcaggccactcagaacagcgtgcaatttaaaacttaggaattgtttatttctggaatatttcatttaatattttcagatcaaggttcaccttgggtacctgaagccgtggaaagtgaaaccagtggataaggagagagtgactttattcttttcatttatttatttatttatttatttttttgagacgtagtctcgctgtgtcgcccaggctggagtgcagtggcgcgatctcagctcactgcaagctccacctcccaggttcacgccattctcctgcctcagcctccagagtagctgggactacaggcgcctgccactacgcccggctaattttttgtattttttagtagagacggggtttcaccatgttagccaggatggtctcgatctcctgacctcgtgatccacccgcctcggccttccaaagtgctgggattacaggcgtgagccaccgcgcccggccttgactttattcttattgctgtcacattggaggtgtttgagaaggaagtcgagaaattattttcctatatactcattctcccaacacacatcaaactgtcctgctcctgcatcaaacctggttttcttggccaggtagatgaggtttcctggatttgtgctgctagctaaagacatggcaagggaaaccagtactccccaccctcccgtctaccgcggctcactgtttcctcctcctgcctgacctgattcttgtctccctcttttggatggtggatttaaggtttgtgttttcactgtgccttcaaccaactaggggcctttgtgcggccatcttcgtgagaagagatctcgggctgccatctctccctagtcttccctggacctcaagtgcccagtgtaaaacatgatctgaaagaacgaaaataatatcttaaatggaatcatgccttttaagctatttttggctgggcgtggtggctctcgcctgtaatcccagcactttgggaggccaacgcgggcagatcacttgaggtcaggagtgtgagaccagcctggccaccaacatgtgaaaccccgtctctactaaaaatacaaaaagtagccaggcattgtggtgggcacctgtaatcccagctacttgggaggctgaggcaggagaattgctggaatctgggaggtggaggctgcagtgagctgagattgtgccactgcaccacagcctgggtgacagagcaagattccatctcaggaaaaaaaaaaaaaaaagtattttcaaatcatctgactcctcctctctcccagtgcaatgactttaggcagcagtccccaacctttttggtaccagggactggtttgtggaagacagtttttccactgacccgggggaaatgattttgagatgattcaaacattacatttattgtgtactttattactatttttaaaaattattattattatttttagagacagagttttgctcttgttgcccaggctggagtgcaatggcgcaatcttggctcactgcagcctccgcctcccgggctcaagcaattctcctgcctcagcctcccaagtagctgggattacgggcatgtgccaccacgcctggctaattttgtatttttagtagagatggggtttctccatgttggtcaagctggtctcgaactcccgacctcaggtgatccaccacctcggcctcccaaagtgctgggattacaggcatgagccaccgcacccggcctgtgcactttatttctattattattacattataatatataatgaaataattwtacatctcaccataatgtagaatcagtgggagccatgaacttgttttccgcaactagacggtcccatctgggggtgatgggagatagtgacagatcatcaggcattagattctcataaggagcacacagcctagatccctcgcatgcacagttcacgtaaggtagggttcaggatcctgtgagaatctaatgccgccgcggatctgacaggaggtggagctcaggctgtaatgccagtgatggggagcagctgtaaatacagatgaagcttcactcacttgcccactgctcacctcctgctatttggcctggttcctaacaggccacagacaggtactggtccgtggcctggggtttggggacttctgcattaggggaaccgttaggaggacttgctgacctcaggagtacccaaggtgcctttatctttgtgacctttgatctctcagggtcactaagatggagcaaggtaaagccaaggcccagagtggtgggcgggaggcagttcttccccaccgctcctcacctctctctgtctcctcccgtcccacccccaagtctgttcacacagygagcctgcagttttcaaggtggcttgtcaaggacatctcctgacatgcacgttcacctcctgaccttgttcctgctgtaaatttgtgaattaagtggggacatagacatatgcagagactactggtggcagtactagccttgtatttcagtagaatatatttggttcatttccttcttcccagtctccctgagtgatggttccagaacccagctccctgcactccggttcttccaaggtggagaaattggggtgtaggcagctgatctgaacaagggctggtggcactgtattttccccctgggttgaacagtcaccgtgtcctgctcctcccactactgtggggccccagctgtggatccaagcctgccagggaagctgtccccactagggcttctcacccagccagccgccatctcaccccaaatgtcactgtcctgaccatctctgctgtctggccctgtaacctgtttccttctttctctaagttcccaccctctctgtccaatccacattatggcagctggtatcctccccgttctcttcwctcaggcagtcacgaacgtcatctccaggaagtttcattttgcttccccttgcggcccctgccctttgtacccaaaacaaagagaggcagtcgactgtccctggcactgagtttgtgctgcctgggccctgcctctccgcctgcctcagagtgtgggctgcagaatgggcccggggagggagaccggatttctttgattctgagccccgtgttttccacgtgtgacatttctgaaatcaggacaggtctcagaatcaatggcacctccaatatgggagtcttccytttagtgtctgaaaatggcttttaggtgagaaaataaagtgataaggagagaatggtaagaggattgggcccctttcagcagttagccaggcttgtatgccacgggtcacagagagagttaattcccttcgaggtctgggtctgccaggatgaggaaaacctgtcgctaacccttacgggagctcacagtgcagtgaggggacagcccaggaccagcgcagtacaggggatgaggggtgagccgggccccataggaacctgtgtggccctgggagcctgtggatctgctccatcccgcccacactgactttcctcaccactcttatcagtcttaaaagaacacagcctgcagcagtacctttgcattcctccataggcaaagatttccaggaaaagcagaggaaacaatggtgtattcgctgccttctgccttggtctggtttattttaaaatctgagccttcagtaatggctgcctgggcccccggcccagccactgctcttggcgtgttggcctcctggcgggggcaacagaggcgctgtgaacgccacctgttaaccccgatggccctgcctgccccaccacagctggagttggccacggccaagaacgacatgaaccggcacctgcacgagtacatggagatgtgcagcatgaagcgcggcctggacgtgcagatggagacctgccgccggctcatcacccagtctggagaccggtaggcgcctcccctgggcatggggccttccagggggacacagcggggagaaaggttggaacacagccccagagaccctcaggcaatgactgggtcacatcttgctgtggggctgccctttgggagttacctggtggggctggcccagacccacagctctctcccttggcagttggatgagctatgtccattcatgacgggagggctgaaacctcccaaggccaccagctctggtggttcccctggttagaggcagtttaaaaactggcaaggaacagaagggttgtgggggcagatttttatctaaagtcagggccatgatttgtgcatttgaccctgtgtaagttacacygcaacaagaaagtgaatttttaaaaatcacaaaaatactgcagatagacataaagccaaggccctagagtcagggtgctggaggctcagcagcttctctcctactgtgacttcagctatttctttttttttttttttttggctcactacaacctccgcctcccaggttcaagtgattatcttgcctcagcctccaaggcgcccgccaccacacctggctaatttttgcatttttagtagagatggggtttcaccatgttggccaggcttgccttgaactcctgacgtcgtgatccacccgcctctgcctcccaaagtgctggaattacaggcgtgagccatcatgcctgacctcagcctctgagttcccaagacacaggcggggcccatttccctgtcagggtgggtttggagagagttcagtccctgccgctccctcgccatcccgcggccccgccctcgcttccggtacttctcacgggctgccagagggtgaggcagcaggaggaggagtgccgtccgtcttcaggattcctgcctgccccaaggttgacaactggtgtttttttctagaaagtctcctgctttcactgcggtcccgcttagcgacccgccgccgccgccaagcgaggctgaggactccgatcgcgatgtctcatctgacagctccatgagatagagacctgcctcccccttgcacccgaggccctcgcagcagggagctcagcgaggcagagggtggggctgcacagaggggaacatcagctgcagctctgcaccaggccggyccctggggactggggcgctcctccctcaggctttctccctcagtcttggcttctccagggctctggggtgtctggagctaggcttggccctaccattctggggccatttccaccacagttggggctctcctgccttcacgcgtgggtgtctgctacttccccatctttaaaatgctgccagagcgattgcggcccctcaccttgtccacgtatcaggaatgtgaatgtgggacctttcctccatccctgttgtccggagccagctcactgtcttccacactggtgctaactggcccaggcactggagtggaatagaatgcagctggaggctacgcatggcctctgcagcacacgcagctggagagggcttctgtccctgtcagcggcagagggcgttggggctggccggggcaccttgtccctgctatggtccacrtgctmacgctgtccacctgccaggtggagtgtatgtggctgtggccctccctcgtggaggtgccgtgctttaaagaggccttagtgcccgggatgggcacagtgttttgaagggaggtgggagctcttgctctcctggtcactgcagaatgacagagaaggtgaagctccatgcatgtgtgcgcgggtgtatgtgcgctcagggtctctgtttaagtatcagctaaagatgtgcttcctccgtgtctgtcatacactgagaccaacaggctacagtgtccctgattcttggaaaagcctggagaagctggggagatgcggttcmcaatgcctcggtataggaggctgtgttgagctgacattcaaatggattctttaataataatgaaactggcgagtatttattgtgcactttggtgtcactgtctcaagcacttcctaatattcactagtttgaactctgaggtaggtactttttttttttttgagatggagtctcatactctgttgcctaggctggagtgcagtggtgtggtctcagctcactgcagcctctgcctccggggtgcaagcgattctcctgcttcagcatgcctgtagctgggactataggcatgtgccatgaagcctggctgatttttgtaattttagtagagacggagtttcaccatgttggccaggctggtctcaaactcctgacctcaggtgatacacccaccttggcctcccaaagtgctggggttacaggcgtgcgcgctctaccgaggtatgtacttttgtctccactaggtaagcacacgtgcaaagtgaggcccgggagtaactgcccaaagcaactgagccgttcagtggcagagccaggggtctggacctaggtcccagctacacgccttgcccctacccaagttcccctaaggacgatgatggaaataagtcaccctgacacatctcagttcatcttcctcaaaactatgcgaggtgggcatttttaccgatttttaaacattatatagtccttaccgccttgggcatggttttaggtacttggtttacctagatgaatcctgcttgaagaccttaggggctggccacgatgtcctcagataagacacgagggcacagaaagcaatagagcacgtgctcaagacctcacagctgcggaggccaagctggaattgcccgctgcagctcagctccaggctgagctccactaaccagtcagcgtcagagcccagtgcgagccctgacttcctccacctgtcagcctccctggggctgcccacagaatagcttcttccatgtttggccaacagcagatagcctaggactggagcgaggagaggaaaaggccttgttctctgaagtagtggtgccagcttcctgtagcactcaagacgtctgagcgggaagcaaatggttctcgaagcaagcaaggctgtttggaggccctaccctcagtctgaggagaacataccaggtccctccccagcaagaatgtctcaccttgacacaagcccagcttccctcccctctgccccagaccctagaataagacaggacaagtaactggttgagcacagggtactttattgatggtacatgacaaggtgcggctccctaggcccctcccctcttcaaggggtctacatggcaactgtgaggaggggagattcagtgtggtgggggactgagtgtggcagggactccccagcagtgagggtctctctcttcctcttgtgctcttgctggggctggtggtccaggggtcttactccttggaggccatgtgggccatgaggtccaccaccctgttgctgtagccaaattcgttgtcatacctagaagatgaaaagagttgtcagggccctttttctgagccagccaccagagggcgccagaccctgcactttttaagagccagtctctggccccagccacataccaggaaatgagcttgacaaagtggtcgttgagggcaatgccagccccagcgtcaaaggtggaggagtgggtgtcgctgttgaagtcagaggagaccacctggtgctcagtgtagcccaggatgcccttgagggggccctccgacgcctgcttcaccaccttcttgatgtcatcatatttggcaggtttttctagacggcaggtcaggtccaccactgacacgttggcagtggggacacggaaggccatgccagtgagcttcccgttcagctcagggatgaccttgcccacagccttggcagcgccagtagaggcagggatgatgttctggagagccccgcggccatcacgccacagtttcccggaggggccatccacagtcttctgggtggcagtgatggcatggactgtggtctgcaaaaggagtgaggccctgcagcgtactccccacatcacccctctacctccctccccaccttgaaaggaaattatgggaaagccagtccccagaacccccaaccccagggttgcacgcagccccggcagggaggagccagtcttggatgagaaaggtgggagcctcagtcccattccccagctctcataccatgagtccttccacgataccaaagttgtcatggatgaccttggccaggggtgctaagcagttggtggtgcaggaggcattgctgcaaagaaagagggagcggggcgcaagtcaggggagcgtgtccatagggtgccaggctggccgcttctccacgggccctgccttcctcacctgatgatcttgaggctgttgtcatacttctcatggttcacacccatgacgaacatgggggcatcagcagagggggcagagatgatgacccttttggctcccccctgcaaatgagcctacagcagagaagcagacagttatgaacccgggtcctgcctttgcagggctgagtcagcttcccctcccgcgggccctcctgcactcaccccagccttctccatggtggtgaagacgccagtggactccacgacgtactcagcgccagcatcgccccacttgattttggagggatctcgcctatgggggtgggggggagatggggacaggaccatattgagggacacaaggttaccatatacccaagggagccacaccatcctagttgcctccccaaagcacatttcttccattctgtcttccactcactcctggaagatggtgatgggatttccattgatgacaagcttcccgttctcagccttgacggtgccatggaatttgccatgggtggaatcatattggaacatgtaaacctgggggaatacgtgagggtatgaaggggctgcccatcagccaggtggctcctcccacaccagctttggggctcaccatgtagcactcaccatgtagttgaggtcaatgaaggggtcattgatggcaacaatatccactttaccagagttaaaagcagccctggtgaccaggcgcccaatacgaccaaatctaagagacaagaggcaagaaggcatgaggaggggaggctcctccagaatatgtgagcagccctaggccacctccccattaagagggcgaatgcagcatctccttacccccaggagggcccaagaggttgaattttatctcccttgagcttccctgccaggctggcctggcttaaggcatggctgcaactgaaggctccagggctgcccaacacccccagtcatacgaagcccttccaggagaagcggccatgtggggcactgccacccacagtctgggcacaagctttgtacatggtattcaccaccccactatgccaccccaggaatgcttgctgctgcctagctcagctgcaccctttagggagaaaacgcttgtacactcagcatcatcaaactcaaagggcaggagtaaaggtcagaaattaactggacagggcaagcccaccccttctctaagtccctcctacaaaagggacagagactggggcgggtgggaagaggggaagctgtattttaaccccctagtcccagggctttgatttgccaagttgcctgtccttcctagctcttttccagaaatcaggagtgggagcacaggtaagtgcatgtgtgtggggagaagggatgggagagagccccagcccaggcccccagctacagaaaggtcagcagctatatttaacctcagaccagggtgcggtgggagatctggtttccggaagacggaatggggagaagggcaggttccccgaggcgcccagacacccaatcctcccggtgacatttacagcctggcctttggggtcgggtcaacgctaggctggcaggggaagggcggggccgtgaggtgagccggcgctgcaggaaggggccaccaccagaggggccattttgcggtggaaatgtccttttccaactacccatgactcagcttctcccggcttggcaccatgccacagccaccacacctctgcggggaggggacacaagaggacctccataaacccacttctttgatttaccagagaataatctaggaaaagcatcacccggaggagaaatcgggccagctagcctcgctccacctgacttccccgccacacgcgactccacccatcgaggcaggagcgcagggttagtcaccggcaggctttcctaacggctgcccattcatttccttcccggttgcaacatggcggccgctctaccgcaggcgcagcatccggacagggatgcacccgctgcgcactagcatcccggggcctgcggtgccggaggccgtgggggaggggctcctctgcgacacgtgaccccgcagagcgcgaaaggaaagaaagcgtcccccacctaggggtccgggtcgggatctcgggcgggagtagggacctcctgtttctggggactaggggaaggaggctccgggcagatggcgccgcaagggcggagctgcacagggcgccacagcctgggtgcggggctccgccaggtccgagcgctgaccttgagctctccttgcggggaacagctaccctgcccccatacgactgcaaagacccggagcccgcaaggctcgtagacgcggttcgggggcggtcgcagcccagggccccccagccacccgcgaactcacccgttgactccgaccttcaccttccccatggtgtctgagcgatgtggctcggctgcgcggagggagagaacagtgagcgcctagtggccccggccgacacacacgcctcccctcccctcccccaccaggcctccatgcccagcccgcgccgcatcacgtcctccgcccgcccctgcaatgcggaggccgcccgggcccaccccgcagcggcgcgaacacatccggcctgcgcccgcccctgccgccttcaggccgtccctagcctcccgggtttctctccgcccgtcttcacctggcgacgcaaaagaagatgcggctgactgtcgaacaggaggagcagagagcgaagcgggaggctgcgggctcaatttatagaaaccgggggcgcggcggcaggcggtgactcggaccccgcctcccgccaggctcagccagtcccagcccaaggtcttgaggcctgagctacgtgcgcccgtaaaaccgctagtagccgggccctactttctccccgcttttttttttccgcagccgcctggttcaactgggcacgcaccgagcgtgtgggccccgacgtaggggggaagggactgagattggcccgatgggaggtgatcggtgctggttcccaggactggactgtgggcagcaggacactagggagtcaaggacggggacccttacacgcttggatgaaacaggaggactttgggaacgactgagatggggaattggagccggagcccagcaccgctcgcggctgcacgcggcctgccccctcccctttctttctttcaaaggctgagaggcgggaaagttggggaacttctcctcgaggctctgcggtagtgacaccggactgctcaggcaaaggcctaggaggggcccatgggcctcgggcgggggcccgtggttccttcccagcccccacttccccctccccatctcctggctcctggcatctctgggaccgaggcctgggctgggcactgggcactgggcactgggggcctggagaggaaggaggctcgggaggcggcttgagggggagggggaggtttctgcacggaaggtcacgatgtcctgcagccctgtagcctggacctgataattagggcagacaatcccggccctgtgtgcaccagcggctctctccgggctggggccccaggcggaggacaggatggctggtgggggcccagaggcctcccacaaaggcactcctggaaacctgtgggctgtgctgcctagggagagagacagtgtgcctttcattccatccagcctggggcgaagagcgggacgtgagggcggaagtccctccccgccctgggacg

SEQ ID NO: 5764 - DNA, 30697 bp, Homo sapiens
ctttgtgaaattgtcactgctctttaaatcctcataatatggtattgctgaaggatcaggtactaccaaacactggaaatataagaacttttataatttatgtaattaaaatatgtgatgctttccacttggggttagccagtttgaaaagttaaattggaatgtgtcatgatggacaaactccttgaaagaatcatctgcacttctggtctccatgcccccgaccccacccagcctaatctggcttcagctccctcctctcgcctaaaactgtgcccaccttgatcaccagtcgttttcttgagtacttttcaggtctgtatttcttaacttttcagaagcattcagcaatgtgggtgacttttttttaactctggttatgcccacctctttggccaccccagcaggtaccgcctaaatttctcttcctctgctcatcacttaaatttggggcttggccaggcatagcagttcatgcctgcaatctcagcactttgggatgctgaggtgggaggattgcttgagccggggttcgaggctgcagtgagctatgattgcaccactgctctccagcctgggagatggaacgagactctgtctctacattagttcattttggtgtgattcattcttccccaaggtaccagtgaccacgtgtatactgagggaaatcaaatatgtctttacatggagcaggtcactcgcttctcatccttgggtactaccaaatcattatccaaaatgcacccctcgaactccccacagccatacccactcctccttctctccttgggaatggtggctccaacagttactcaaggacacaagccagagagctgggagtcatccctgtcttctccttgcccctcacctatagtcaacaagaagccctgcccacccttcttccaaaatagacctagaatccaacccctcttctccacctgcactgcttccagccttgtcttgggcctcactgcttatcacctgcacccctgcgaagtgtcctaatgcatttccctgcatctgcccttgccctctgcggttcgtcctcaccatggaagcagccagaccaatcttaactccactacatgccactcccctaaatttgccactgccctcaggacaaaaagcagattcacctggcactcatttaacccagtggatcatttccatttcttcttcttcttcttctccttttttttttttttttttttgagacagggtctcactctgtcacccaggctggagtgcagtagcatgatcatggctcactgcagccgcgacctccctggactgaggtgatcctcctacctcagcctcctgagtagctgggactatgggcactcaccatcatacctggctaatttttgtatttttttgtagagatggggttttgccatgttgcccaggctgatcttgaattcctgggctcaagcgatcctcccatcttgactttcaaagtgctgggatttcaggtgtgagccaccatgcccatcccatttcctctttcttaaaacaatatcttcacttggccttcaaaccatcactcctgatttctcttccacctcactagctacttcttttccttcttctttgctggactcgtgcaactccctaaactccgaataatattaagtgctctggggctcagtcctgggtctttttctcttcctgctgtgtcatcactcccttggtgatctcattcagtgtcatggctttaaacatccctatgccggtgacccccacattttatctcaagtccagacctcctccctgtaatacagactcgcatatccaactccccaccacatatctccacctgggtctctgacagacaccccaaacttcagttccaaaactgagttccttcctcatctccatgcccagcctatcccacctcagttaagggcagttcaacctttctgttgctaaggccaaaagccccggacttagaccttgactctgatctttctctctcatcatactctacccattagcaagacctgtcagccttggagtcaaaatatatccagcggaatgacatgatgtccagattcacttccaaataacacagtagggaatctagggatgggggtagaattgaaaccagactgtctataagttgatcattgttgaaactggtgatggtacatggaggttcattgtattattccactttgtttgaaatgttccaaaatcagaaaaattaaaacatactatttcactgctaccactctgatccaagtcaactgacctcttgcctggactgttgcagtagcctcctaaccatacttctgcctccactttcacctccactccaccctctgcttctaatttaatttcctcccagcagccaatgtgattaattccattaaaatgaaagaccgtgtcactcctccactcaaaactctccaatgtatggtgtcagactcctacagaacaacaaaaaatgctccccagtggttccccatttcattcagagtaaagccaactcctaacagtcgtcttcaagatcctatccactcctgctccttgtttatggaataaatctttttaaaaagatcttatatcctggctgggtgcggtggctcacgcctgtaatcccagcactttgggaggccgaggcgggtggatcgcctgaggtcaggagttagagaccagcctggccaacatggtgaaacaccgtctctactaaaagtacaaaaatcagctaggtgtggcggtgggcaccttgaatcccagctgctcaggaggctgaggcaggagaatcgcttgaacctgggaggtggaggttgcagtgagccgagattgtgccattgcactctagcctgggcaacaattgtgaaactccatctcaaaaaaaaaaaaaaaaaggatcctgtatctatttgccttgccaccctttactacttaaaccgcattcccttccactctctgctcttgatcactccgttccaggcacactgatgttccttatacttgccaccgggcagtaccaccacagggtcctcgtactttccactccttctgccatgaagaatcttcttccttctgttacacacgtggctcactctaccttcttttttttttttttttttgagacggagtctcgctggagttcagtggtgcaatcttggctcactgcaagctttgcctcctgggttcacgccattctcctgcctcagcgtcccgaatagctgggactacaggtgcctgccaccacgcccggctaattttttgtacttttagtagagatggggtttcaccgtattaaccaggatggtctcgatctcctgaccttgtgatccacccgtcttggcctcccaaactcttcaccttcttatgtctttgctcagatgtctccttttcagggaggccttccctaatcaccttatgtaagactgaaacctaaatacatgcccccaacacacacacacacacacacacacacacacacacacacacacacaacctcttaatcccttctcttgctttgtttttctgcttagcacttatcaccatcttctttactataattttacctatttatcctatttgttgtttgtctccactaccagaaagaaaactatctgcaggtagggatttttcactactgtttgttcactgttgtatccacagcacctgcctggcacagagtaggtgcccagtaagtatctgttgaatgagtgaacgaatgagtgaatagcactccaagattcaatcctgcccacctgtccaggtacatttctaacctctcccctgctcaccctttcatcccaaggcacacagcacacttgagtccctggcatatcctagcattatttatacttctcagcctctatgctgtaccctcatcctcctggctggagtgccagtcttttttattttttatttggagacagagtctcatgctgtcacccaggctggagtgcagtggcaccatgatagttcactgcagcctgaaactcctagactcaagtggtcctcccacctcagcctcccaagtagctggggctacaggtggacaccaccacacctagctattttttaaaaaactttttgtttttaaaacaaaaactggagttttaaactccaggccaccactgcctctcacctgcaccactgtgcagtgtcctgaccatctccctacatctgttcttgcccttgcaatcatcctcaccacagaagcagagaagttacaagtgtggcaaagggcagaccggaattcaaagccaatgtggagtggggagttggatacatgagtctggatttcagggaagaggtatggatttaagatacaaatgtgggagtcactgggtatggtggctcacgcctgtaatcccagcactttgggaggccgaggagggcagatcaggagttcaagaccagcctgggcaacatggtgaaacactgtctctactaaaaatacaaaaagttagccaggcgcggtggcgggctcctgtaatcccagctccttgggaggctgaggcacaagaatcgcctgaacccgggaggcagaggttgcagtgagccgagattgtgtcactgaactccagcctgggcgagacagtgagactccatctcaaaaataaacaaataaataaaaataaaattaaaatgtggaagttgccagagtaaaaacatttaaacgctggctgaaatcaccaagggagtaagtctagaacaagaagagaaaaggacccaggactaagccctggagcacttaatattattcagagtttgggaagttgcaggcgtccagctatgttgcccaggctggtcttgaactcctggcctcaagtgatcctctcaccttggcctcccaaagtgctgggactacaagcatgagccaccatgcccagcccggatccccggtctttaagattcctctcaagcaggtgtctgctaacaccaaatgaaactcatctgccggcttcatgttttcatgcttttttcctacttaactcatcgcactggacttttgcagtctcttttttctgtgtctcctccaccgttctgggagtccccttggaacaggaacctcatcttattttgtcttcttggctcaatgcatgaacttcttggttcagtgcgtgaatcataatacctgttaaacccactctatgggccgggcgcggtggctcacgctgtaatcctagcactgtgggaggccaaggtgggcggatcatttgaggtcaggagtttgagaccagcctgaccaaaatggtgagacccccgtctctactaaaaatacaaaaaaaaaattagccgggcgtggtggcacatgtctgtagtcccagctactagggaggctgaggcaggagaatcgcttgaacccgtgaggcagaggttgtagtgagctgagattgcaccactgcactccagcctgggcaacagagcaagacccggccaaaaaaaaaaaaaaacaaaaaaacaaaaaaacccactctatgaatagtgagggtcaaagaggttagagtctggcacaggtagactagaattcccagtctgttctcttgggctccagattctcactccaccacctgaacactagtgagtcccttccgttcccaagcctcaatttccttagacagatgtaagcagttgaattgactaacaactatccaaccccaacctactgggcaagttgcctcctttggggtcaaacactatccaacttcagtttcccaacgtcataaaggagaactctaaaagttgagaatcgaaactgatgacagattgactagacggccagcctgttaaggtggccccagatattccagcctcagcccagagtcctcctgtgcccctactgcagcaagggtgtctccaagaagggggacctggagtcagcccgtcacacctggtttcctctctgctagggtccctcctcccacagagcactggagggcagctgaggaggagctaccttaaaaaaggaggtgtgtgccagggagctgggtaggagcctggctatatatctgcccagcagcggtactctcgggacagagatggcactgatgcaggaastgtatagcacaccagcctccaggctggactccttcgtggctcagtggctgcagccccaccgggagtggaaggaagaggtgctagacgctgtgcggaccgtggaggagtttctgaggcaggagcatttccaggggaagcgtgggctggaccaggatgtgcgggtgctgaaggtagtcaaggtaagactgggctcctccagcccccacgcaagacaaaaccyagtatcagagtccacgtccctggggatgctggggacccctgtcctccttatccctagcccatgctgatgacatctcagaataccccatcccacctagctgtctacaccccacygcaccactgccttgagtagaatgagtctagtaataatagctcacatttgggggctcactggactaacctcttaacatacactatctctaattcttgcactctgtgagataggtactattctttgcccagtttacagattagcaaatggaggctcagaaccaatacaatgcgaggtccttggttggatcctagtgtgaatgaaccatctgtaaaatacagtttggggacaactggcctagatatcagatagtacatatatctgatataggaaatcattgttgattttgttaggtgtaacagtagttttgtggttatcagaaggttgtcttttgtttggacacgaacactgaagtattttagggacaaagttccttggtgcctataatttactttaacgtggcttagattaagcacatgtagccaggaatttagacttgttgaatcaactagttgggtatatgagtgttagttgtatcatctatttttctatgtgttttaactttttgataataaaatgactttttttttttttagagacagggtctcgctctgtcacccaggctggagtgcagtggcacaatcaccactcactgtagcctcaatctccctgagctcaggtgatcctcagcctcctaaatagcttgggattacaggcatgcaccaccatgctcagctaatttttgtattttttgtagagatagggtttcaccaatgttgcccatgctggtctcgaactcctgggatcaagaatatgcccaccttggcctcccaaagtgctgggattacaggtgtgagccaccatgtctggccggccaataaaatgatttttgtttttgttttttttttttgagacagagtcttgctctgtcaccaggctggagtgcagtggcacgatctcagctcactgcaacctctgcctcccaggttcaagcaattcccctgcctcagcctcccaagtagctgggacgacagcgcccaccaccacgcccggctaattttttgtattttagtagagacagggtttcaccgtgttggctaggatggtctcgatctcctgacctcatgatctgccctcctcggcctcccaaagtgctgggattacagtgagccactgcactcggcctaaaatgattttttaatggaggctcagagaggtgaggtgacttgcccaaggtcacacagtgttgaagctgggatttgaacttgactcaagggacccaagcccccctcactgagattttcccccaagcccttcctccagctgtttcatgccaccgcctgtgctagctaagatcaaaattcaagagggtcggagctagaaagactttggagaatcagacagtctcaccaatgactcacttaaaaaattaagtaaaccgaggcacagagagggtgagagataccccaaggtcacacagcgagttggtggcaaaggcaagactagaattaggacccctgactcccagcccagtgctcaagttctctctctaggggcaaccaactcacagagggatctagaagccctgggcccctatccgttctttgcacctatccccagcatatgaagcctgaggccatacaatttataagtgagaaaccacaaattttgatattagacagactcttcgcttcttcctttaccagctgtgtggttttgaccttcccactcttctttctcaaacccacattcttttcatctgtgattggggcatcatcatcatctctccctcaccaagccagtggtgcaatgcaggctgaatgattcatgcacgataaatgctcagaaacagaagcatcattataattcttgccaagctttcttctgggcctgggactcaagtctgactctggcagaccctcctagaccaccccctccccaacaaacttgagaataaagtggagggaataaggaatgtctggtaagaggaggatgctacaagaataagtttattgtgtgtgtgtgtgttccaccacgcctggctaatctttgcatttttagtagagacggggttccatcatgttggccaggctggtctcgaactcctgacctcaagtgatccacccacctcggcctccccaaatgctgggattacaggtgtgaaccaccacgcccggccaagaatgagtttttacggcaggaaatgctatttacctaagcctcaaatacttcctgcacatcatagccacttttcctcttgaaaccactaaatggtagcaatccccagtgagccatgactaatgaggaataatatatcttatttagagtctaaaccctcccgttccccaccctctgaaaatctagtgagcggagctggtccacataagggaatgctcgtcttcaaatgaattgtgcttaaataggtttaaaactgaagcaaatcaggaagcctgttctggatgtgttcttttctctctgcctggatcttaccagtgggaaaggcagaaagggaagtctacgccaggcacagtggctcacgcctgtaatcccagcactttgggaggccaaggtgggaggattgcttgagcccaggaattcgagaccagcctgggcaaaatggtgagacccccgactctacaaaaatatatataaaaaattagctgggcatggcggtgcatgcctgtagttccagctactccggaggctgaggtgggaggattgcttaagcccaggaggtcgaggcttcagtgagtgaagatcgtgccattgcactccagcctgggcaacagagcaagaccctgtctcaaaaagaaagggaagtctagactggccttcggggggaatgtgtccttcattcacacacagggtgccatctccaaccctctcccagggggtggaggtgctgggtctgaatgcccatggtcccttggaagcagggcctggctcacagccttgggtcacgaggaagaaagaggcggaagaaccatcccctacttgagttctggctctttctctgactctgctgccttctggctgggagaccatggcaagctcctcactgcctcagtcttctcatctgtacattggagataattctcctagtacccacctcaatacaggaagtgaaggcgtttttttttgttgtttkgttttgttttgttttgtttagatggagtctcgctgtgtcgcccaggctggagtgtagtggcgagatctcagctcaccacaacctctgcctcctgggttcaagcgattctcctgccttagcttccccagtagctcggattacaggtgcacacaaccacacctggctaatttttgtatttttagtagagatgtgctttcaccatgttggccaggctgatctcgaactcctgacctcatgatccgcccaccttggcctcccaaagtgctgagattacaggcatgagccatcatgcctggctgggaagtaaagattaaaaggaataatatgtatacagggctctyatgggtgccagacacagggcgtgctcatgtcatccagcatccgtgctcatgtcacacagggcatgttatatcatccggcaacagctggaatctgattcttgtgcagtgactccaaccaccaagaaaagtagccctctgggggtctgatgcctccctagcaattccacctcccaacacagaatgagaaggagaggaggccagagagttgtggcgctttgcataccagaggcaccagggcctggagagctcatctagaatctcaaaacatcgaaaaatcccttctcgacctccttccattactaacaggaaaactgaccccccggcagcagaagagattgtctaagtcagctggataatgagaagaaagagaaatgtattgctgacttcctgtgtgccaggcaccccaccaaacgcttggcatacattatttcatctgatcctcccagtagcccagtgactcttgttccaacattactttcattttacagatgagggtctcaggagtcagaatgtttacccagctaagaaacagggaagagtcaagatctttttcaggctgctccatttcacagcctatggctcttaaatccaccaggcaaacttgctccttgctttataatgtcatgaaattattcagccccaccaccacccccagaatcctcaaacaaccctatggagtagatgctaccattcctctggagtaggccttactctgtgggtaagaagactgggtctcagaagcaatgcagtgtagtagataagaagctgggcatttggggaggccaagggggcaaatcgcttgagtccaggagttcgagaccagcctgggcgacatgccaaaacccagtcactacaaaaaatacaaaaattagccaggcatggtggcgcaggcctgtagtcctagctacttgggagactgaggtgggaggattgcttgagccaagatcatgccactgcagcccagcctgggcaacgggagtgaaaccctgtgtaaaaaaaaaaaaaagagtctgggctctgagggctgcaaactgcgagacctgagacaaatgactaatgaggagaaagacaaatgtgttgctgacttcctgtgtgccaggcaccccaccaaacccttggcatacattatttcatctgatcctcccagtagcccagtgactcatattctgccattgctttcattttagagatgaaggtcttaggagtcagaacatttacctagctaagaaacagggaagtgtcaagatctttttcaggctgccccatttctccatcccatgtctcgagatcctccagacatctcagttttctcacctgtaaagtgtgggtattagtactacccacaacccatccctcagcgggtggtgagcattcagtgagacagtgcatgtgaagtgccgcaggggttgcctggctcatggcagtgggcctcagggtgacggggctctgtgttctgcaggtgggctccttcgggaatggcacggttctcaggagcaccagagaggtggagctggtggcgtttctgagctgtttccacagcttccaggaggcagccaagcatcacaaagatgttctgaggctgatatggaaaaccatgtggcaaagccaggacctgctggacctcgggctcgaggacctgaggatggagcagagagtccccgatgctctygtcttcaccatycagaccagggggactgcggagcccatcacggtcaccattgtrcctgcctacagagccctgggtaaggggaggggaagctcacccgactcacacacttgcccaccccagsagacttcccagtgtctcacctttactcatggccacgtgcacacacccacatttattcatttcatctgtgtcctatgcttggggctgggttattgcagtgcacaggattaactcaactctggctatcatattgctcaacttggaatacagaaattgaccaaagaattgcagagataaatacatgattgcagcctgggcgcggtggctcacgcctgtaatcccagcactttgggaggccaaggcaggtggatcatgaggtcaggagttgaagaccagcctggccaagatggtgaaataccatctctactaaaaatacaaaaaattagctgggtgtggtggtgggcgcctgtaatcccagctactcaggagggtgaggcagagaatcacttgaacccaggaggcggaggttgcagtgagtcaagatcgcgccattgcactccagcctgggcaacagagcaagactccgtctcaaaaaaacaaaaaacaaaaaaacaaacaaaaaaacatgattgcaaatggtgtaaatgctcagagaaaaagaatggggtggcctgggtaaccacagaaagggtgctcaggaagtgactttctggggaaacaacattcaggaggctctgacacccagtgaggggaaggagctaaaagtgggagtgggggtctgtcactgcattttatagaagcagatcctaagacatggatgtgaggatacgcagtttatttgggtattcctcccaggaaacaccggtagggaagtatggaactgagatgggaaaggcaagaattcaatacaacgtgcgtccatgggcaagtcaccaccctgagcttcatgtcctgggagaactcacagtcccattatggagcgaacctcttcgggatcccaagtgggacgctggcgtgcttactcaccagcttcccagccgtcactggttgggggctgctttgggagcactaactcactggyccctgttgtttgtcctcgggcagagtcctaggtgtttgaagtaaaacctacatgctgcaagcccagatcctagaggtttcatctcatgtgctaactcctatcagctgtagtggctggctgcgtggagttgctctttggagaaggtataagagacaggatctgattttagcaaggaagagagtgctgggatgtctcagtgatgtgtaccatggaactggttcctggttctccctatragtttatatatatatatattttttgagacggagtctcgctctgtcgcccaggctggagtgcagtgccgtgatctcggctcactgcaacctccacctccagggttcaagtgattctccagcctcagcctcccgagtagctgggattacagcccgccaccatgccatgcctggctaatttttctatttttagtagagataggatttcaccatgttggccaggctgatttcaaactcctaacctcaggtgatccgcccacctcggcctcccaaagtgctgggattacaggcttaagccaccacacccggcctccctatgagtattgaaagagatacaaaacagatattaaagaaaatgagggacattgargacatccagggaggggtctgatgcatggmaagcccaatgttggttctccagagtaagaatttcacaaaaaggacaattagacaaggcaaacctttggtttctgaagatatgaggtctcaagtgtccctggagggatacttccaatgtaaaggcaggctctccccaaaatactacttaccaccctctggcttcctcaatccccaatctcttcctttgctccttcactcctcagggccttctcttcccaactcccagccaccccctgaggtctrtgtgagcctgatcaaggcctgcggtggtcctggaaatttctgcccatccttcagcgagctgcagagaaatttcgtgaaacatcggccaactaagctgaagagcctcctgcgcctggtgaaacactggtaccagcaggtgagggggctgccaggatggcaggggcaaggagagggaagagggtgaggaggaaaggcagggcctgattttcatctcaggaagctgcagccaggggaaatggaagcaggtagagagggagagaatgctagtcttttgaaatgtaaagtgaaaccgtcagtgaagaaggtggaaaaggaggagaggaggaggaagaggagaaagaaacagagaaggaaggagaaaaataggtgctctacagtatttcagtaaactagttatttttattttattttattatttttttttgagacaggatcttgctttgttgcccaggctgtagtgcggtggtgcaatcaccactcactgtagcctccacctccctggatcaagacctccctgkctcaagtgatcctcccaccttagcctcctaagtaactgggactacaggcatgcacaaccatgcccagctaattttttttatttttcttttgtagagacagggtctcactatgttgaccagcctggtttcgaagtggtctcaagcgatcctcccaccttggcctcccaaagtgctgggattacaggcaygagccaccacacccaccccacatgttcttgttacccttcaattacagtctaggcctggcagatgtcagcttcgccgggtactgtggccattcgtcacagcaggttaaggactaacaaggggaaggatttctttaattccaccccaggagtcgaaaagagggcatgtgtgagtgtaaacagccctcagggacatttctcaggcagcagctcagtcagttttggaaacaaaatcttcctccgagataacggaaactccaactgcaaaacagaactcagagacaaaaatcatttattatatagaacttgcagagaagttacaagggaatcagacagcagaaggaaagatttgatccaataaaaataaaataggctgggcatgatggctcacgcctgtaatcccagcattttgggaggccgaggtgggcagatcatgagatcaggagatcgagaccatcctggctaacacagtgaaaccccatctctactaaaaatacaaaaaaatagccaggcgtggtggcgggygcctgtagtcccagctactcgggaggctgaggcaggagaatggtgtgaacccaggaggcggagcttgcagtgagccgagatcgcgccactgyactccagcctgggcaagagagcaagactctgtctcaaaaaataaaataaaatataacagggatttaaagaaaaaacaattaccggccaaatgtggtagctcacgcctgtaatttcagcactttaggaggctgaggtaggaggatcacttgagcccaagggttcaagaccagcctgagcaacatagtgaaaccccgtctctacaaaaaatacaaaaatacaaaaattagctgggggtggtgatgggttcctgtagtctcagctgctcaggaggctgaggaggaaggatcacttgagccccggaggtgaagtaagttgagctgggtattttttttatctattcactaaggcttacatcttacagattacaggcatcctacattttatatatcatctaagttttaagaatgtaayatttcactaatattgaagaaaataagttatattaccatgagtttaaatttctaacaaaattataatgttattagttatggtttacaaaattgagtgttaaggatgaatttgcaaaaagttacaaaacaaattaattaacttataatttttttttttttgagacagagtcttgctctgtcgcccaggctggaatgcagtggcgcaatctcagctcactgcaagctccgcctcccgggttcatgccattctcctgcctcaacctcccgagtagctgggactacaggtgcccgccaccatgcacagctaattttttatatttttagtagagacggggtttcaccgtgttagccaggatggtctcgatctcctgaccttgtgatccacctgccttggcctcccaaagtgctgggattacaggcgtgagccactgagcccagccttataaatacattttaattcaaaattgaatttctaaggtcaaggataaagtttttttgttagtaagtcagtgacctataggaaaggcccaaggtttcatttatttgggagatgagaattatacaagatgattctgtgtttgtttcaaggccaaagtgttatagcttttttttttctcctctgactttgggatgggagctaatattcatatatgatggccataggaaaatatgtcagttttacttccacaaatcaaactactgaatatttgaccaaaatttttcactttctggctaaatatcaatgtatcagtgaaattctttttttttttttttttttttctgagacaagttctcactcttgcccaggctggagtgcagtggcatgatcttggttcactgcaacctcctcctcctgggttcaagcgattctcccgcctcagcctcccaagtagctgggattacaggcacctgccaccacacctggctaatttttgtatttttagtagagacggggtttcaccatgttggccaagctggtctcgaactcctggcctcaagtgatccacccgcctcggcctcccaaggtgctgggattacgggcgggaggcactgcgcccggcctcagtgagattcttaacacaggaagtgaccactgtcagttaagatgcttccttttgcaagtaagagaaaaacacaaaaaccaactcaaactggcttaaacaataaagggaattatcagcttatgtaggaaaacccctaaacagtagggggggcgggcggggggggcgggtttcaggcactggtgagggcactggctctgtttctctggaattctctcagcttctcattcctctatatgtcagcttggtcctttggcttgtttccctcttggtggcaaaatggccacaactattcctgccctcatattcacacatgggaggacttctcttctttcaaccactgaacaaaagaactaggctttactctagttgagccaacttagatcgcatgccttctcttgaagcaatcacttgcaagggggaaaggtttatgctgataggactgtgccagtcagggcccatcctggagctgcgggtgggggtcaaccccttccaaacatcatggctactatgcaatggggaaggaaagaatgtctgctagagaggcaaccccaatcttcactacagaatctcacctattaccattttttccctctatctaaggaaacctttcctttcttttaagaaacatttctcagcagctcaatacattaaaatagatttaaatgggactgcttaggctagaatgtttgtgaccgagcgcaatctgctcatacctgttcataagttcattccaggagttacatctgttgagcatatattgaagcccaatggactaactcagccctttaattctaaaatggtgaaacctatgtctagagatggaatgtgacatggccaaggtcacacagccagtaggcagcagagccaggactagaacttggatttctcagcttctggtccaacgccatccttacacagaatcttagggtctctctctctctgtcttcccatctctttcaacagtatgtgaaagccaggtcccccagagccaatctgccccctctctatgctcttgaacttctaaccatctatgcctgggaaatgggtactgaagaagacgagaatttcatgttggacgaaggcttcaccactgtgatggacctgctcctggagtatgaagtcatctgtatctactggaccaagtactacacactccacaatgcaatcattgaggattgtgtcagaaaacagctcaaaaaagagaggtactggaccactgtttgcccaccaaatcttacagaaaaaaagagagacgggctagtgtaacgtggcatagagttttatggattggctgtattaagcagtaaggctgccaccatagttgagcatcgacctcccacaccaacacagctggcatctcaagttggtggcttatcaaagtcactggggggccatggggcgggtagaagcctgttccttgtttcctaagccaccctccaccttagcttggccttcttgctctctgaagaccattcagtgctttgtaggagctagcatgggaaaatggaaagaatcttggagactcaagtttaaatcccagctcagccattttcctactgctatgagcctcaatcccttatccataagacaggagtaaactggaacctacgayataggattgatgtaagggttggagaaaatctgtgttaaggatccacaatatctagcatctggcagatgctgagtaaatgcttatattggagcatgtgctgtcagcgtcccattcatatcctctcggcctttaccgttctagggaaggttggttccacttccagctgtcagcacctgcatccctttgccagcagacccactctgagaagagccctccaccagatctggtgggagttggtggataaataccacagctccctcacccaaaagatggaaggaatctgggtctcattgcgtaactttttttttttttttttaagacagagttttgctctgtcacccagggtggagtgcagtggcgcaatctccactcattgcaacctctgcctcctgggttcgagtgattcccctccctcaggcttctgagtagctgagattacaggcgcctacaacccacacccagctgatttttgtatttttgtagagacagtgctttgccatgttggccaggctggtctcaaactcctgacctcaggtgatgcgcctgccttggcctcccaaagtactgggcttacaggcgtgagccaccgcactgggccccattccatactctttcctaaagatcgcctccagtggaccacagtagtaattacttcaatacccactctttgttgtctgccttcccttatctgtctcactgtctcactcccttatttgtgcttcctgggatcactttccaaataagccaaatccttatctggggatctgcttcaggggaagcccaacccagacaactctctgtgttagaagctctgggcctgtgtaagcaacatcacagtatttagtgttctgttatgtagtattgggtctcttttgtaaggaagaaaagccaggtctgctcatgaaaagaggatttattataaccatggccagaaaaatcgagaaagcatcaggacctgagactccctctctctctctgtcactctctctcatgaactacagcacttttcccctcagcctctgcttctctctccacacctgtccggctcccctctgcctcccaggtataagggatctccatcatccccatgtccaaaccccagagagaaccagtctgattcctggtcacgggacacagaccccatgtgttgggtcacctgccagccaacagaatgagccactttagatcagtgaccccaccccataggacagcctggcactttcaggcaggactgttttagggagcagtcagggttgggaggagccagcctggagcccaaagtccagttcattccagtagcctgtgtcacattcgattacacagatgaagtcgcagctccctcccaagccctggagtacaaagggctgggttttttttgtttgtttttgggttttgtttttttttttttaatggagtcttgctctgtcacctaggctggagttcagtggcacgatcttggctcactgcaaccaccacctcctgggttcaagctatcctcccacctcagccacccaagtaactgggactacaggcgcctgccgccatgccctaatttttgtatttttagtagagacacggtttcaccatgttggccagcctggtcttgaactcctgacctcaagtgatctgcccacctcggccccacaaaatgctgggattataggcgtgagccactgcgccccrctcaaagagctggtgttaatcatggacttgcagtcaccccaagttaataagcaagcccaagatccccttcaagccaatattctttaaaatatttattcaatatttatagaaaggagagacttttgggggcagcccaacctctgctctgttgaggaggtagatgggtaagagcccccatctactggctgtaagaacttagggcaatctaggccgggcaccggtggctcatgcctgtaatcccagcactttgggaggccaaggcaggtggatcacgaggtcaggagttcaagaccagcctggccaagatggtgaaaccccatctctactaaaaatacaaaaattagctgggcgtggtggcgggtacctgtaatcccagctactcaggaggccgaggcagagaattggctgaacccgggaggtggaagttgcagtgagccgagattgcaccactgcccttcagcctgggcgacagagcgagactctgtctcaaaaaaaaaaaaaaaaaaaaaaaaggaacttagggaggtctgtaaaaaggggacaaccacaacaataaacaataaaaataacagtccctaccttatagaattgctgtaagattaaaataggttaatctgcataggatttggccttgtgcttcaataaatgtcagtagttggtggcagtggtgtttctactatccaaagtaattcagcagctctaaccttaaacttaaacttgcaaaacctgctccgaaggtacagggccccccctgcctgaaagggcatctgttattactccagcatgcctcttggggcctcattctccccctaaattccttgcaaacacttaaggcactatcccaaagaagaagaatttttttttttttgagacagtctcactcggtcacccaggctggagggtggtggcatgatcttggctcactgcaacctccacctcctgggttcaagcaatgctcctgcctcagccttctgagtaactgggatgacaggtgcgtaccaccacacctggctaattttttgtatttttagtagagacagggtttcaccacgttggccaggctggtcttgaactcctgacctcaagtgatcctcccgcctcagcctcccaaagtgctgggattacaggcgtgagccactgtgcctggsccagataggaattcttggaaatagcattgtctccatcctgttactctcctgcggtgttttggggccctcttgaacatccccgggatgtggatatcacaattctcagtggctggacgaaataattgccgagaaggtttttttctggcttgaaggccttcaaaccattatgagcctgggcacccttttcctgtgttacaggcccatcatcctggatccggccgaccccaccctcaacgtggcagaagggtacagatgggacatcgttgctcagagggcctcccagtgcctgaaacaggactgttgctatgacaacagggagawccccatctccagctggaacgtgaaggtaatggctcctctctgggctgtcaagggcttgaaggtcagaacgacagataaactactcagtatttactcattcagttctgtgttgatggagaacagaactttagagtcaccgtttaagggccagctgcaccacccatgggctccgtgaacttggacaaattctttggctctcagagccttgggtttcttaccttcaaattcttgttctcctttcctttctttttcccataatttactggagaatcagttctgtgttcctgatcattctttgcgtgagttgggtccagccaagtcagctcaatcagccattctgtgccagtgctgttctcagggatggggtaggggatgtgggctgggggacaacacaggcacagaaataagacatgaccacgacgctcggccaggtgcggtggttcacgcctgtaatcccagcactttgggaggccaagacaggtggatcacttgaggtcaggagttcaagaccagcccggccaacatggaaaaaacccatctctactaaaaaaatacaaaattaggcgggcgtggtggcaggtgcctataatccctgctactccggaggcagaggcaggtgaatcgcttgaacccgggagctgggggctgcagtgagctgagatcgtgccattgcactccagcctggacagcaagagggaaactctgcctcaaaaaaaaaarraaaaaagaaaaaaaaaagacaccaccctcactctcagagaactcaccctatgttgtcaggaagcaaatccatgaaacaaacttacacaaaactgctagaattaccagagaagacaagatactctgaaaacaaacaaacaaacaaaaaatactaagtcatattattatatgatgccaaacctatagtataggcagagatcacaaaaatctattttattaacatcacactttctagtgtgcaaagctcttgtccaaggtctgtctcagttgatcctcataagcaattctgtaaagtaagaaggtcgagtgttatcactatctttattattattatcatcattactattattgccattttacagaagagaaaactgaggctcagagaggttaattaactaagggcactctgctaagaggcagcagaaccaggggctctgggggtctggaagcagaataaatgttaactgaagtcaccagagaagattcctttaaaaagttaggagttgaaatgagccctaaaggccggggggagatatagacactcagaacagaggacaaaggatgatgaggggtaaaggatgggaggctgggatgagcaagatgtgtacaggacaggagactgaactgcttggagcagaaggcagaagcagaatcagaggctccagtaaggtacatagagtataaacggggggacccgctggccaaatgaggaggcccacccatgggctggaaaatatacgcctctggatttttcctgaatataaaagccattgtaggctgggggcagtggcgcacgcctgtaatcacagcactttgaggggctgaggcgggtggatcccttgagcccaacagttcaagaccagcctaggcaacatggtgaaaccccgtctctactaaaaatacaaaacttggccaggtgcggtggctcacatctgtaatcccagcactttgggaggccgaggtgggcagatcacgaggtcaagagatcgaaaccatcctggccaacatggtaaaacctcatctctactaaaaatacaaaaattagctgggtgtggtggcatgtgcctgtagtcccagctactagggaggctgaggcaggagaatcgcttgaacctgggaggcggaggttgcagtgagccaagatcgtgccactgcactctagcctggcaacagagtgagattccatctgaaaaaaaaaaaaaaaaaaaaagaacaaaacttagccagatgtggtggcacgcacctgtggtcccagctactcaggaaactgaggcgggaggatcgcttcagcttgggaggtcaaggcgcagtgagttaagattgcaccactgcactgcagcctgaggtgacagggcaaggccctgtctcaaaaaacaaaacaaacacacacaacattgtgcaaatattttttatcttggctagtcagaaaacttggcaatgccaggcttatatttctttttctttttctttttttgttttccttttgagacagagtctccctttgttgcccaggctggagtgcagtggtgcgatctcagctcactgcaacctccacctcctgtrttcaagagattctcccacttcagccttccgagtagctgggactacaggcatacgccaccacacccggctaatttttgcattttttggtagagataggttttgccatgttggccaggctggtctcaaactcctgacctcaagtgatctgcccgccttggcctcccaaagtgctgggaatacaggcgtgagccactgcacccagccaaggcttatatttcttctggaaagaatcagctagaggcctgaccctcgccagcattttccaggtgctctccagccacctggggctctcaggccctggagtgtagcctctggaggtggtgagaacacagactctggagtctgaccaacctcacttcacatatctgccctgctccttactacctatgtgattggtgttcagtaaattacctaaccctgctcagtttcctcatcaataacatgggggtaacagtagaaccaaccaactaatagagatgctctgagaataaaatgcattaagggtatggaaggtgctcagcatacagcctggaaagtgcttaccactccctaaacatttgctgctgccgctgctgctgctactattgtaaagataaggacagatgaagggaacatttgcacatcagacaaagaagtgtggacttaacacctctccttctccctctcccttccagagggcacgagacatccacttgacagtggagcagaggggttacccagatttcaacctcatcgtgaacccttatgagcccataaggaaggttaaagagaaaatccggaggaccaggggctactctggcctgcagcgtctgtccttccaggttcctggcagtgagaggcagcttctcagcagcaggtgctccttagccaaatatgggatcttctcccacactcacatctatctgctggagaccatcccctccgagatccaggtcttcgtgaagaatcctgatggtgggagctacgcctatgccatcaaccccaacagcttcatcctgggtctgaagcagcagattgaagaccagcaggggcttcctaaaaagcagcagcagctsgaattccaaggccaagtcctgcaggactggttgggtctggggatctatggcatccaagacagtgacactctcatcctctcraagaagaaaggagaggctctgtttccagccagttagttttctctgggagacttctctgtacatttctgccatgtactccagaactcatcctgtcaatcactctgtcccattgtctactgggaaggtcccaggtcttcaccagttttacaatgagttatcccaggccagacgtggtagctcacacctgtaatcccagaactttgggaggccgaggtgggaggagcgcttgagccgaggagttcaagaccagcctgggtatcayagggagaccccgtctctacaaaataaaaaaataattcactgggtgtggttgtgcacatttgtagtctcaggcactcaagaagctgaggcagaagaatcacttgagcccaggaggctgaagctgcagtgagctgtgatcacactgctacactcctgcccaggccacagagcaagaccctgtgtctaaaaactaaaacataaaaataagtaaatccgtttaaaaaaaggattatcccagccctgccagggggaggatgaggaggggtgtgaggactaaatatacaaataaatagtgtggtcacatgacgcacagcaacagaattcggacccacagccttctgcagcaatcaaccccaaaccatcaggacttgggcgataactggcagcatctctaactccccaccctactcccatcctgcttcctatttatgaccaacccaagaaacccaaataagctccccagaccaatcacatggttagccccacttctggtgagtgcacttccagcttccccataccaacagcctcaatcacggcatccctgaagccttcccattttcctgcctgtctttaaatctctgtcaaaagcgagagatgggtggctggttcctttgctatagcaagttgggaataaatcgcctttgttagttctcatttgggggctgtttatttccacagggcctaatgctgtcctaatggttattgcttgatcatttgagcttctcaactctaagaaatgaggactggggaaactgaggcaaaaagagacaaagaatgggagattgaggatgatgcagtgtaaaaaaaaatcacctcaactcctaaaacccatacacaaacagtacataatagtcaggaaactgtaggaaagtaatagcatctttattatcaaaggacgtcatgtgatcaggtttactccaagcaataaaaagtttccttttgcccccctgttttgcctagttttctggtgggctactctcctaccatagcatagaaaatgcacactgcaattggttatcaacagcctctggtcaatttagcaatcataatctgtgtatctcccacctctgtttgccttcagggacagaaaaagtgcctcctttccaggaggtagacaggctgttccagtccccatctttgtgtccttcataatgcccagcacagcccacattgtaggtggtgggaaaattcttgtttaaaataaaaaaaagaatgaaaaatgcaatgtcttagtccatctgggctgctaaaacaaaataccatacactggatggctcatgaacaataaccatttatttcttacagctctggaggctgggaagtccaagtcaagacactggcagatttggtgtctggtgaggacctcttcctgattcacagatggcagcttctcactaagtcttcacatggtagaagaggcaaaggtgtctctaggatcgcttctttttttttttttttttttttttgagatggagtctcgctctgtcacccaggctagagtgcattggcatgatctcagctccctgcaacctctgcctccgaggttcaagcgattctcctgcctcagcctcccgagtagctgggactacaggcacctaccactgtgcccagctaattttttttttatttttagtagagacggggtttcaccatcttggccaggctagtctcgaactcctgaccttgtgatccacctgtcttggcctcccacagtgctgggattacagttgtgagccaccatgcctggcctctggggtctcttttatgaaggcattgatccagttcatgagggctcaggacccattatgtaattgaaagattctccgtggggcctgaaagcttaagagaatgaatgacccctccctcccctccctccttgggcccggtcccaaggcgcaaggccactcgcgccagcagcatgtgtcagcaagatagcagaagcgggaagagagcgggccagaagacacctaccccctgaagaccgagagagacgtcatccgggtacaatgtagcggttacaacagactgagaaacttcctgtttacaggagactacaaaacccctgccccgtcctcatttggtgctgacgccattttaagcctcagcccacctgcacacacactgcctcatgttgtctgttggccacgctcttggggttcgaaccaacacaagaccctttcactaattacttcccagaggtcccacctcctaataccatcaccttgggagtaaggactttttggaaattatcagtatcaaaatggagtcacttatgtcaaaccctaacaaatgcctgtcacaaaaattatctcaagaagttcctaaaatccgcagtattatagataaaccacttgcataagaatatttgcctaacagtgggtgtctccacaataagctaaagccaactcctgcaacaggctcctgtgatcaacggtacttgttttaaagaagcttatgtggactttgtcttttctcgttgccacaacctcttttaatgtgcctatagtccactatagcatgcatatctcaaattgcaattccttgcaattctggaataaacgctttattttggagagtcagtctctctgttatttattttacggtgtcaattttaacatatgaattttggaggaacacattcagaccatatcagtcaccttcctcttctttgaaatagaaaaagctcaaggccagagagtttattttagtaaagttttgacatacctgtcttcaaagataaaacatgaaacagcattccacacacaaaagtaaagtgattttgttcatccttcactgtgaggtattttaaccacagagattctaattttttggtcttggatgggtcctgggagtcagtattgcctggctaatttttgtatttttagtagagatggggtttcaccatgttggtcaggctagtctcgaactcctgacctcatgatctgcccgcctcggcctcacaaagtgttgggattacagatgtgagccaccgtgcccggacaggattctgcatttctcttttttttttttcgagacagagtctcagtctgttgcccaggctggagtgcagtggcacgatcttggctcacctcaacctccacctcccaggttcaagtgattttcctgcctcagcctcctgagtagctgggactacaggtgcgtgccaccatgcccagctaatttttgtatttttagtagagatggggtttcactatgttggccaggctggtctcgaactcctgaccttgtgatctgcctgcctcagccccccaaagtgttgggattacaggcgtgagccaccgtgcccagcctggattctgcatttctaacgagctcccaggtgttaccaatgctgctggctcatggactacactcttaagtagtaaggccctaggctattaaaggaaatacagattcctggattccacctatcagagattctgattctgttagtattttctgtgagacccaaaagtctgcagtttaaccagctctctaaggtgtttcttaggcccaactggactgggaaattactagaataaatgacatggaatcaaaacctgggaactaatcctgggtctgtcattaactccttaggagattcccatcccctctggagatctgtcatcaagaaatgattggagaagttaatctcttaggcccttctagctcttgcctttgagaaccgcccacctccccattcccacctggtatccccaacccagtacagttcatggccaatggcggtccaagtcttggaactacaatccccacaatgcctcgcgcctctcctctcacgtgacgtcatgaaggaggcttgataacggcggtgttctccacaatcctttgcggtggttcaagatggcggcgcccagtggcactgtgagcgattcggaaagtagtaacagcagtagcgatgcggaggagctggagcggtgccgcgaggcggcaatgccggcttggggcttggagcaacgcccgcacgtggcagggaagccaagagccggtagggtactatgtttggggagactggctgaggggcgtgggatcttcccctggagcctgagaggatggatggtgaggagagagtcactgggactcggcttccttccccgagagacctccagggactgggtgtagtgcagattgaaagcatgggcaggtgcagtagggagggtatttcattattccagtcggggaagctgaggtacccaaatgtcttttgattctgcctccttgggtctatcctcactgccccacactgggaaggctgccgtctcttcgagataactgcaacagccccctcccggtattctcgcacccagcctttccccacctccaacacattctcccaccctggaggttgttgccaagagcagtgcccagcacatcactctgaccgtgactccctagtgccctgggaataaatacagagccccgcaacatcaaggggcctaatcatggatagaacccaagggttcttgaatttggaatgaaaacatgttgcatctttgctttctattcatctctgactgaattttagcatctctttccgtcttgcaagcactaagccacagtagttctggcaatgccgttactttatcccaacagaagtcacagattttcatatctcattacaatctttgcagatacagatatcaatatatcattttattgataaaaagatattggggaaaaaagtcatttacactcatccctgatttaaaatgtgccactctaatttttagacccatctctatatctaagatgtaagaagcacatacatcacaagtttggttgtttactatcatgataattaaatttcggtatcattggttttctttgtaatcctgtatgttgcatttcatgcatttaaaacattgctctgagaagagaaccgggcttcaccaggctgttagagaaggctatggcaaagcaaggttaagaaccgctggatttgtttaaaaggacttacaagccctttggtgatccattgccttcctctcccttccttccctcctgccatactgcacttcctgtaggtagcttccagaccatagtctgcccctctcaccccctagtaccataaccacagttttctctgcaagttctatttacagatctgcctttccatctcattagcggtgggaacttgagcaaagtacttaaatctcactgtacctaaatttcctcatctgtacagtgcgggtagtgatagtacccaccccataaggttgagaagtaactgagataatgcaatctacagtgcttggcacatcttaaaggcccaatacatggtggcaaatatgtggttggtctttccacatggactgctttcctcctcctgcctaattctcgctcttttttttttcaaaactaggactcagtctgttaccgaggctgacacaatcatggctcactgcaacctcgacctccccctactcagatgatcctcccacctcagcctcccaagtagctgagactacagatgtatagtcccagctactttttgtattttttgtagagatggggttttgccatgttgcccaggctggtctcgaactcctgggctcaagtgatcctcccttctcaaccttcaaagtgctgagattacaggtgtgagccactgtgctcggcttctagttttttttgtttgtttgtttgttttttggggttttttttttttttgcatttttttttttttgagatggagtttcactcttgttgcccaggctgcagtgcaatggcacgatctcagctcactgcaacctctgcctcctgggttcaagtgattctcctgcctcagcctccctagtagctgggattacaggcgcctgccaccacgcccagctaattttttgtatttttagtacagacagggtttcaccgtgttggccaggctggtctcaaactccagacctcaggcaatccacctgcctcggccttccaaagtgctgggattacaggtgtgagccaccgcgcctggtctctttttttctttttgagacgcagtctcgctctgttaccaaggctggagtgcaat

SEQ ID NO: 5765 - DNA, 24617 bp, Homo sapiens
tatagattcccagagccttctcctaaggattctgatttgataagtccatgaagttcaagggaatctgtatttatattaattactttattgacatagagtaaagtaatttttaatgtgctgacagattttttttaaagatttggggtgttgctgtgatgctcaggctgaagaaaagtggctatttacaggcgcaatcatacagcctcaaactcccggcctccatcctcctgcctcagtcttccaagaactgggactacatacaggtggatgtcactgcagctggctcagacagatcttattcagtggtcgtgccaaataaggaaacaggtccagagtgagaatgtgacattgtcaagatcacactatcacaaggtggctcatctatgattagtaaccagagctcctgacacttagtcctgcgctcttcccataatgtcaggctgctactcttatggaatttgcaacatttttcccaaatgtatatgtaatgtactatattagacaggccaaatacattgcctgctgtactctagccttttctaagggaagatattctacccccagacttatcagggacctgggtgaaccattacttccactgtaccagatagaattgattgaaccaagggtgagtatctgatcaagggtagcaaatccatagactacagcacaatgagattcaaataccaaacaaagcagatgtacaaatctattaaatgaaaattgtctaatcattaaacactactttaaacctagtaagtctgtgctttttcagcaaattgtgcttataattaagttttcttattccccttcccaagagcaaagatttcaaattgaaaagatgaggccaatacaaattaaatatttcaaaataaaatatatcaaatattatctttagtattgtgattcctatttattaattttcatttttattaaaatgtctttaaaaatgcaaacagcattacagggtttatactcaaaaaaattaaaagttgctgaatatgttgtatgcagctgatccaccttatactcataaacatttcctttattacatggcttttcaggtttttttggagttaataattgctttatttcctcccgtttgcttagttttctatgtgcctatcaccaatttattcccaaactctccactaaaatgcataaatgtgttatcagtatgctcacccacactggtgaactacatatttcatttttttcttggcaacacctcacctccacttctgccctgcttcagtgtgaatggattgctctctttgccagctgcatgtctgctaccctaggcttcccttcacaattgtggtggattaattttatgtgtcaatttgactgggctaagtgatgctcagatagctggtaaaacaatatttctgagtgtgtcaggaagtttctagaagagattagcattttaatcagcaaactgagtaaagatcactctcactaatgtgaacagacatcatccaatccactgagggcccaaatagagcaaaaagacagagggagggcatatttgccctttctgtttgagctcagatatctttctcctgcccttggactccagtgttctcagttctcaggccttcggactcagactagtacttacaccagaggctcttctggttctcaggccttggttcttcatgcttggactggaactaaagcatcttttctgggtctcccacttgaagacagcaaattatgggatttcttggcttctgtagtctcctgagccaatccatcataataaatcctttctatatatctaaatatattctattggttctgtttctgtgaggcaccctgatacactaatcattttgaaatcaccttaatctcctctatattggatcctctttttcttggattacacatacctttactggctaactttttttttttttttttttgagacagattcttgcactgttgcccaggctggagtgcagtggcgcaatcttggctcactgcacctcccgggttcaagtgattctcctgcctcagcctcccgaggggctgggattaccacccctggctaatttttgtatttttagtagagatggagtttcgcgatgttggccaggctgggttcaaactcctgacctcaagtgataaacatgtctcagcctcccgaagtgctgggattacaggcatgagccaccagccctggccagctaactttttttcttaaagatgggatctcactctgtcacccaggctggagtgcagtggcacaatcatagctcactgcagcctcaaactcctgggctcaagtgattctcccacctcagccttctgagttgtttgaactacaggtatgagctactgtacttggcttggctcacttcctactattgatggagcacattttctagtagctcttgagaaagtatgtatggaaggttaacaatttttagaacttacatgtgtaaaatatttttcattattccttcacacctgattgatactctggttggtgttacggggtgaactgtatctcttcccttcaaaaaaaaaattaaagttctaactcccagaacctcaaaatgtgactttatatggaaatgaggtcactgatgatgcaactaatttagggtaaggtcacaccgaaataggaagttcttgtaagatgatttccagctgacaacagataacacaagggaagacgccatgtgataatgacaacagagattgaagtaatacagttgcagaccaaggaacaccaaagcctgccagcaaactaccagaaagctaggaagagacaaggaaggaatcctctacactttcagagagcacatgacatcttggcttctgatttctcgcctccagaagtgtgagacagtgactatctattgttttaagtcacccagtttgttgtatcttgttatggcagccctagaaacctaatacagttggatatagaattctagtttgcaaataattttttctaaaaatttagttgctctctgtgtcttagcttccagtgctgctgaggagaagtacaatcttgttctgatttccaatccttagaatataattttttatcctctctggaaacttctaggatcttctatctattcctaggattctgaaattttatgatgattacatgtgttaaacatccacccgggtgtggcggctcacgcctgtaatccagcactttgggaaatcaaggtgggtgaatcacttgaggacaagagtttgaggccagctagccaaacatggtgaaatcccatctctacgaaaaatacaaaaattagcagggtgcggtggcaggtgcctgtaaacctagctactcgggtggctgacgcatgagaatcacttgaacccaggaggcagaggctgcagtgagccgagactgcgtcactgcattccagcctgggtgacagagcaagactccatctgaagaagaagaagaaagaagaagaagaaggagaaggaagaaagaagaagaaataaattaccagacagggaaaggaaaagagcaaaaaaaagtccacaaactcagttcctaagaatagttcccgttcctaccaaagtagaaaaaccacataattcactttgggtatggggtaaggaactttgaagggtactgtcttagtagtgggatacaattaaccctacataaatgactgaattggttccacctaaaaaaaatcaaaacccaaaagaacaaaattgtttttcaagtaagtaaattttacaaagtctagcatcttgttaaaaaaaaaaaaatttccaggcatgcaagaagcaggaaattatgaactgtaatgaagagaaaaatcaatcaatagaaactatgccagaaatagcatagatcatagaattagtagacaaggatattaaaactgtcattataattgtagtctatgtgtttaagaagctgcagaaaagttgagcatgttaagacataaaagatgtaagacacacacccacacccaaatcaaactggtagaggcaacaactacaatgttttatatgaagaatgaactggacaggatttcaatattagatattgaaaaaagattaatgaatatgaaaacatagcaattatccaaaaggaaacataaagaaaatcttgaaaaaaaaatgaacagagcgtcactgagctgtgagacaatgccagttagttcaatatacatgtatattatgtacatgcacatgactccaatagtcacaccaaaggagaggagcaagagaatggaaagaaaaaatatttgaagaaataagggcaatgtttgcatttgtcttgctctacctggtattcctatcaaggcacctggtatatattaggtgtttaataaacatttcttgaacacatttgcagcaaaaaaaaatgacaacgagtaagagataagcacctgagtgttactgcaacgtatttaggccatcagaggacaaaaaaggggaataatatggagaaaaggcttggtagaagtggcatgccttcagcagggacccacgaaatgggttcaactgagtgtgtacaaagtttggagactaggaagggatgaagaagggcattccacacaagaacaacacaaatgaagatttggagcctggcacagtggcccacgcctgtaatcccagcacttcgggaggccaaagcaggaggactgcttgagctcaggagtttgagaccagcctgggcaacatagcaagacccccatctctactaaaaatttaaaaatttgccaggcatggtggtgcttgcctgtagtcctcgctactggcaagactgagacaggaggctctcttgagctgtgattgcaccactgcactccagtctggacaacagagagaaactctgtctctaaaacaaacaaaaagacttggaatcaggaataaatatggttgaaactatactatctggactgaagtggtggttgcacttagtggtaatgagaaatgaagttagttggatgagttagggtcagagtatgcaaggctttagaaataggaaacaggagagaaaccattgaaagtttctgaacagaacttgtgatgatgaaatcagaattcaaggggagaaaaaggagcatagtggtggcatccatgatggatttggagaagaaaatactaaaggtgaatggaaagggtggaccaggggcaaacaggttattaaaacagtcccatcatgaagtgttgaaatgctggatgtaaacacacctaccacagtatcagtacagactaagggcttggataaatgttagtcaaatccaaatactaaaattcttcttggttcgcgaaaatttcagaagtggctcaaaaatctgtaatgcattaagaatattatttgcttcacaatatttcatttacttaagattttataagaatcagctgcttataaaattgttactttgtggtgcaccaaagcaccttgttctctccctcacccagatatgtttcatgctctttgtactttccaccccttaacagatttggagggaagattcaagccgtggatttttaaatttaaagcaatgctgtcacaaattgagaactgacaacatgtcattacacatttaattgccaccgaatcccagagtttaaaaattgtaaggacctaagagataggacctctcgttgtacagatgcggaaactgaggctgagagagggtaagtgaacagtcccaggtcacagagctgctaatgggcaaggtgggactagaatccaggcttgactcctctacgctgagccaagggttcgaagcgattgggataagggaagcctgaggcagggaacgagagtcaggaaagcagctcttcccaaccctaggaggccgggggacctcgtcaccgcggaaggagcggagccaggccgacctaaaaagccgcaagtccaggtacccttaccctgatggccgcggcgacacactcggccaccttcctgatctcgcgatactagccggtactcacttttccggcttcccctaggccccgcccccccacctcagcccttctgtcgtcatttcctgtgggtctgtaggttaagggagaagatggcggcgctaggggaacccgtgcggctggagagaggtgagtgcagccgaggctcggcggaggtgggcggaagggttgggggagtgctgtgtcgctggaggggaggaggagtgacccaggctctgagatccgggccacgctgtcccttgtgccggcgccagaggccgccgttgtctctgtgcctggctctaggaagggcgcttacggtattttgtctgttaaccgtaagccctcctctgttcacacggactgttccaaggcacagcacaactaaacacaacctgcccgcttcgcagacacacgccgcacacgcgctcccttggtgagcacagcagaagcagcattcggagacccgtacacccgaaaagcaaacgtcacacacccggttcgcacagactacactcattgcctgtacagcacgagaacggacacacggtacaattcaacagaacctcctttccccgctgtttgcacacaaactccttcattactttctccacaacctcgcttgtattcgggttggggtatttgctagcttttgtgcccctcctagaaatggagaggttgctttaaaaacaatcctactgacttggtcttgggaaggaggttacgtaagtaagccgaatagtggtagatgctaaaacacttgcaggtgcagtgtttttcatttcttacaaaccctacaattgcaaactggttggctgattgcttcctagagcagactgtcaaggaaaataaaaccacctctgctgagtaattagagatagagaagcctacgaaaataactggctatgcgcctaccatgatttccagcattccagcgtttccagtccttttacagatttccagcattccactctgtccctaagtcctttatttcaaacaatttcaagcatgcttttcatacaccagcattagaaatcattgataggaattgagaagtacaaataaacattttgagtactggtggtaaaaaaaaatgtatatgtaggatggagactgaaattatattgcacatattaacatttgcaattagtctaaatattactattgttccctaagaaaacacatttttagaattactgtacttagaaaaacctctttcctaatgccttcccacaaacaaatgtgcacttaatgttgctgatttgctctttacsgtgttcaccatttggaagcctcactgtaaatgagattgtttccgttaagcctattaaagcatcattttagaggactagctactctgggaagacttgccgagttaggcctaagtctctgacatcttcctcttgagcacagtggcactgtgttttatagatgggagcaaatctgtttggtgttaacaggagtaagttttttctttgaaagctagttaagattctaacgtattggtcttttgtgtttttgttgttgctgtttggagacgtagtcttgctctgtcgcccaggctggagtgcagtggcgcgatctcggctcactgcaacctctgcctcccgggttcaagcaattctcctgcctcagcctcccgagtagctgggactgcaggcgaacgccgccaaacccggctgttttttgtattttagtagagacggggtttcaccgtgttgcccaggctggtctcgaactcttgagcttaggaagtccgcccgcctcggcttcccaaagtgctaggattacaggcgtgagccactgcacccggccggtctttgtatttttaaatgcaacacaaaatgtgkaacttctgtggcatttagttttgatagtcttggctttgttttttgctgttacagatttcttttctgttcttcagtagaagactccaccycttagtaggatgaattacagtcagccctccatatccatgggttccatatttcaaccaactgcagattgaaaatactcagaaaaaaatcgtgtctgtatagaacatgtacagacatttttttcttgtccttattccctaaacaatgtgatataacaactgtttacgtagcgtcagatattgtaagtaatctagagattatttaaagtatagaggggggatatgcataggttttatgccaatactatatcattttatatcagagacttgagcatctgcagatcttgatatctgtggtatctgaagaaggtcctaatgaatcccccactgttaccaagacagctgtactagtggttgccatttagcagggtaagaaagtcagattacatcacctctgattcttgtttagaattctaacagactctattaacaaacactcccaacgatcctaaagtagaaaatcctacagtacaattacaatacagtgcctgatcacatatgatgatttagagtgccttctaaatcatcaaactatgatttaatgaaacacaaatttgagcacatagtaggtacattttagatttagtcaaaagcattttacttttttccatttttttcttcactggaaatttttatatggcttatatattataactttataaatcaaaataattgatgaaccaacagtccccatgtatcggtcattctggtgatgggaaatcagaatggtgaaggtctatttgcttccattgcatttgattaactttttaagtttaagctttctttacctcaaatttaaaaatctgctttctggccaggcgcagtggctcacgcctgtaatcccagcactttgggaggccgaggcaagcagatcacttgaggtcaggagtttgagactagcctggccaacatggtgaaaccctgtctctactaaaaatacaaaaattagctgggcctggtggcaggtacctgtagtcccagctactcgggagactgaggcacgagaatcacttgaaccctggaggcagaggttgcagtgagccaagatcgtaccactgcaccccagcctcagcaacagagggagactccatctcaaataaataaataaataatctttctgccaggtgtgatggcccaagcctgtaatcccagcaccttgggaagctgaggtgggtggatcatgaagtcaggagtttgaggccagcctgaccaacagggtgaaaccctgtctctactaaaaatacaaaaattagccgagcatggtggtggactcctgtaatcccagctactcaggaggctgaggcaggagacttgcttgaacctgggaggcagaggttgcagtgagtggagatkgcgccactgcactccagcctgggcaacagagtgagactccatctcaaataaataaataaatatctttctttactacatttattcatagttttctatctgcaaacacgaagaaggccatactaactctataaagaaaaatttccagtccttgagtgtaacgaaatcaggaacttctacttaagtcaaaaggaagcaaagcaataatagaatactgggcattgtagtaccaggggtacaaaaacagtataccaaaacagtttttggaaaaataaaagtagagatagttaacagtgttatagctgacttcctgaatcttctaaaatgtctcaattcataaaacacttatcctcacacttctcagtgagaattccctaatgtgcttcatacatttgtataaatgtatacaacctcttagggttttttttgtttgtttgtttgtttttgttttgtttggttttttgtagatggagtttcactcttgtcacccaggctggagtgcagtggcacaatctcagctcactgcaacctccacctcctgggatcaagcgcttctcctgcctcggcctcccaagtagctgggattacaggcacccgccaccatgcctggctaatttttgtattttttttagtagagttggggtttcaccatgttggccaggctggtcttgaactcttgacctcaggtgatccacccgcctcggcctcccaaagtgctgggattacaggcataagccactattcccagccaatatttcttatgattaattggtaccaatgtaacataacacttttgcttgctaagcccttttttatgtattttgtggttcagttgttaactgaactcataactcttcctcataacccttatatggaaggtactgttatttccattgtacagtgaaagaaactgagacataaggacatcatgtaacttgcccaaggtcacacaggtggtattgagaccagattgataaagctaattgtttttatttttcttttttgtaaacataagtgttggagcttgtttgaattaacagtgttaattaagttgaaaaaaaatcagtttatttcatttgtactgcttgttttttgcatttttatggttgttttaaatgtgtccctgccactaactgcatctgctctcgagtggttatctacctatgtatcatgtttctttcgaggaatgaccagtgattttactagcttatagtgccttgtactgttcagtgctttggttactaataataattaggtaaatttttattgactagtttctgacaatattgctagcttttctgaagcagtacaatgttcatgtatcggtcacatttgagtcacagtcctttccgatgacatttggtattttgtgttcaatttgcctgtgtttctccaaggtcttattttatgcttctgtaatctcagtagtttttcctatctactgtaaaatttagtgttcttacattttacattctcaccctccatgtgtgtacacacacacagtctccttcccaccaaatgtgcaaattcaatgctttttttcccctcgattgtctgtatattatttgcccttgaggaatgaatcctaactgccccactgttacataggcattgagaaaacccttggagaaaattatctgtgtgtgtgtttaactctagatatttgtagagcaattgaattattggaaaaactacaaaggagtggagaagtaccaccacagaaacttcaggctttgcaaagagtccttcaaagtgaattctgcaatgctgtgagagaggtgagtaaacatcattaaaatttacaaaaatttgagttaattaggtcagataatactctaaatttgggttcaacatttcttaagaaaaactttagaaaacattaaaaccagtccctctcatttttggaatttctgataaaaccattttataaagatgcataamtttgcctgaaattttaacttygcctgaaattttaacttcacagagaactcaagcatggtatattctgagatataactttggcttttacaggtatatgaacatgtctatgagactgtggacatcagtagcagtcctgaagtgagagcgaacgctactgcaaaggtaaatttttttgttttccaaaagtaagaattcttcataaattagaagtttaaaatatggagttattaaattcataataaacttactttgaagactaacatgtatctttcaagctacaccaaatttctcaagtactaagaaataagacatttgtttctattgcctttacataaatgctgcatgataaatagcttacataagctattttatcatgcagtttagataatgcaatagaaatgtacttgcatacaatatgtatcatgcaatatataattgtgttgtatatgttatatatatgatactatataatattcattatacaaaatctaatcagaattttaagatatgaattactatcctcatcttattgatgaggaagcatgaggtgatttgccgcaaaccacacaaatagcatatgatagagctggggtacttccccgagttgatttttgctttcttctttacattatctgcatttctgtgccattgttttcctcaaataatttaggtattgacctcactattcatgatagggggtttgaacagggtaatatcagcagtcggtgacttaaattaatcatcagcagatagttttttatggatagttactggctcacaaaaggaaatggtggattctttgttgaatacaaatacttaaacatgtggatatagtttatcagtgtagaaaagaccagagaaacatggttttaattgctgagttgtgtgagtttgatagcctactgaatttctgagccttaattccattatctgaaaaatgaggcctttttcagagcttcgaagataacgggtattcagtaaatcttgatttcttcaaagataacgggtgttcagtaaatcttgatttctttcctcctccccatttttgtgatccatcacaaaaaaatggtactagataattaccctttaaagcaaagtgaaacaaaatctcaactttataattagtttggattagtctaaagttgagctttaaagaagatacggctctgtttcatcttctgtggggatttttagttgtgtctagttaactaaagcaacaaaacattcagattggctatatgtacctctctttttctcaatattgagttatttcttgacatcttagatatttagtatatagtacaaatagtacagaagccaaaatgattacatataagggcaactccatgttgattatataggtaggttgtgtcctgcacaaaggctcctgaaggagttgggcgatccagatctaaagcccagggctgctagcatgctggggaaggggttttcctccttactatgtacaatatcagtctgcccagtaagtctgcttgccaagccctgcgcatacaggactgcacaaaagagtgggcactgaatgggctaggaatgacctaaaaaatcataacaaaaaatcgtaacatttcctgcataactcgaaattattcatttgtcgtctctaaaataccttctgtttagcttaccttctcagaatcaccagtgaatttgtgagcattcagacgtcaaaaatacgtgctcaaaagtagtttttaaaaagagacaaaagaggccaggcgcagtggctcacgcctgtaatcccagcactttgggaggccaaggcgggcggatcacgaggtcaggagatcgagaccatcctggctaatgtggtgaaaccccatctctactaaaaaaaaatacaaaaaaattagccgggcgtggtggcaggcgcctgtagtctcagctactcaggaggctgaggcaggagaatggcgtgaagccaggaggtggagcttgcagtgagccaagatcacgccactgcactccagcctgtgcgacagagcgagactccatctcggggggaaacaaaagatgaaagaactgaagtaaataaaagtcatatttttaatatgtaaaactttctttcaggctactgttgctgcatttgctgccagtgaaggacattctcatcctcgagttgttgagctaccaaaaacagaagagggccttggattcaatattatgggaggcaaagaacaaaactctccaatctatatatcccgaataattccaggtggaattgctgatagacatgggggcctcaaacgtggagatcaactcctctctgttaatggagtggtaaggatgaattttatttctatttgtagtgatctgttgtgaccacctgggggcgtatttgagtaataggagaaacctaagaaacttgtggtttagaaatgccttgagggaatcctaggcagtactattaatacagtgatccttttttttaagcactataagtgtattttgcagtgtaaattagcagtgcttaatgtcatttttatgacataagctctttattaaaggcaatacmttaaattagaagtctaccctcattttactcttataaaatgccaattgcttgatctactgaaataataaggcatatagattaatatgctaattatttggaacttaaaagccagcttttagactataaacagaatatgatgtaagagaggatttcatatagattaaaatggtaaggcaggattatttcttagttttgtaatgttggaataatataacattaaaacttttcttcattatatatattgtaaacatttttgcattttgagttactttcaaaacttagatattagtgtatggttggttgtttttttttcccctagagtgttgaaggagaacatcatgaaaaagctgtagaactgctgaaagccgcacaaggaaaggttaaattagtggtacgatacacacccaaagtcttagaagaaatggagtcgcgctttgaaaaaatgagatcagcaaaacgcaggcaacagacctaatacatttcaaaacttgatatttcattttgcgttttagctagagaagttttccttgtgacttactaatggctgcaatgccaatgattgtaagaaaacaaacaaatttatcatgaaattctccttgtcattttataaatgcctattttaacatcatttatggttccagagatgcatacacttttttctgacaagaaaaagtaaaaggtgatgagggcaattctgtcctactgtttttacaggcctttttcaaatgcagattttgtcataaagttgttatagattttttaaaatgcttttttaatattaaaatgtacttttacattcttaatctttttttagaaaggaaaagttttcttcatttagctgctgatttaaaagtaaagttctccaattctttttttttgcttactctattttttttaacctgtgaaatttctttacagttttccaagaaattaagcataacagtctcatctacggcagttcattacactgtcaatgttaacatcattgctgcattttgtactttgaacacacacataatatatataaccagtggtaaatcatgactcagtacagtgcaagttttttcacttttacttaaacataatatataatggatattcatttatactgatttatgaaagtaagtttttaaacactgaaacaatcattgctaaaatacatattcttaatatttgagcattgaggcaagaggatgtaattgatagcattacttattacatccctatttatgttcaaccgtacatcaaattataaatgcaaaacaggttcagatttcatcttttgtgatttcttttaaatactattcatttttatttaaatgcacagtatttcccctatattttagtccttccattcctagagacaaaccagttatttggtggtgggaagtagctgaagcaaagaaggaaaagtaatacctttaacctcactagcttcaagagtagacattcttactagctcaatttaaataattgattttaaataggaagaaaagaggatatatttaagatacatagaaattatgatgtgaagtattcatgagaatctgtagattccatcaaaataagtaggaactcatactaaaattgttggatttaaagaggcaacttttgtttatgattcaaatatgggaatttgagaaatatttcatttgtccactggatgtcactattttactaaaaggcagctattagtgtgggactgtgactgaggtcttaaagactgaaagagttggggttcattttctgttacaacttacaggaacatttgtactttaagaaaaatttaagtgacaaatgttagaagatgatggattgaaaaatataagtaatttggcatattgaccctatataaaaaagtgggcattttgtaacattccttcaggaagaatagaattgtatgcttttttctgcatgtttgtgatcactgtgagtctcagatgattattccagttttcaatgatttttcaaaataaaagtcaatcagcattgttatttatcattaaggtattgaacactggattgcatggttgaatgtgtctttaatccactacaaaatgtgcttgttattgataggatcatgttgttaaattgtaaattttcaaaattaattgatgttttaaaaatgttgagaccaaagtagtatagaagtatggacttaatttaattgtaaaattattagaggtatttgttgtagagctttatatattaaagagaggtattggtgcatataaaaacagtaatattattgttatgcttgtwttcttgcatttcagggtaagtaaaccctgaagaaatcttattttagtatagctacagctgcagtagcttttaagtatgtatcaacatttcattataaattatagcttcctggttctgtgtctcagctgtttcagaactttcagccaagttaaatcttttttggtgttgaaacttttagtaagttgagtaagctatttttttccctacggtaatccacaatctgttctttgtgtgggttgacacctatttataattcttaaaataagggtagctcaaaggagccaagtacagtagtttagcttgctactgttgagcatgaatagcagtaggttgttttcattaatgcagttttcataatgtatcccagaattttaaatcttgaccatagaaaaatacagtcattcattggcaaagatgtacagtggtggtttagtgcagtgaggaaatgatgggaatttttatcttagaaatggatgattcgtgaataaaactaggtacatagtaagtgtatgatagatgtttgatttgtaaattacaaatataaattatcacccccatttccatttattttcttgatatatcaaaatgtgttgacttagtgattctcaatcttagctacatattagcctggcagagctttaaaaaattgatacctgggtcctattccataacaactaaatcaaaatcacccttttttttttttttgtaaagctttccaggtggttctaaaggacacctggggtcaataacccattataaaatgatctgattacactggacactcttaggaagtatcaaaatagaacagttcaatttgcagctacttaatgattaattacatttcttaggttttttttttgttttttttttggtttgtttgttttttgttttaaaagagacaggatcttgctttgtctcccaggctggaacacagtggtgtgatcatagctcactgcagcctgaaactccttggcttccacctcagcctcccaaagcattrggattataggcgtgagccactgcacctggccaagtaatttcttttaggaataaaaggtacttggcattccttatttgggaagtaattacagtcttatctttttttttcttttttcttttttttaataaaatctaccagtaatttaaatgtgagctttttatgtctgtcatcattctgccccctttgcctttaaaacttacaaaaatacgtgtttgttatttgagaaagcatgtttaaaaattgcagatgagaaatattgtcgttaataattatgtactgtcttaatgtgggcacttcatttgttagtataatactagataatagcagcctagttctttaggatttgacgattcaaattttttttttgttttttgtttttgtttttttttgagacagagtcttgctctgttgcccaggctggcgtgcagtggtgtgatctcggctcacttcagcctccgccacctcaaggcagttcaagcaattctcctgcctcagcctcccgagtagctaggactacaggcgtgtgccacctctcccggctaatttttttgtatttttagtagagacggggtttcaccgtgttagccaggatgatctcgatctcctgacctcgtgattcacccccctcggcctcccaaagtgctggaattactggcgtgagccaccatgcccagcctcaaatatgtttttagaaaatatcattgtcctcctcctcttaagatttttttaagttattttgctcaagtacttaagtagtctggctcaagtactttgtttacaattaaaatggatattatagcatttaatagaagaaatggttatggcttatccaaaaagaatgtcagcatgacctggtgtagacttaaaaaactacatgtttgtgaatattttataatgtggaatgatcattgaaatatcaaggattctagtaattgtatttcctgaataaatgtatgtttatgaattttctaacttacattttgttgtgtcctctgccaacaatctggttttataattgttgtctaaagtttgctagtagtgtttcttcaaaggttattccaggtatggttaagtagtgagaaaaatcacttattaattttcaaraactttgagactaatttgtattgactcggttttttaaaataactggcaaatgctatgcttctacttttaaaatttgtggtaatacccagaatggatgtaaaataacatttttcaatagattacttcatttatcaatttaattctgattttaaggcttatttaaaataaatttgtatgagttatgtcctcgttctttggatttgaaaaaagttgatataactacacaatagataacgtttatgaaaggtatgtataaaaaaacataattcctggtggctgctgaaatgaaactttgaatttctatattttgctttgtctttcataaaatttaaagaaaacattttcttgtgttatttcaagagcggcagtatgacgtgattgagagcacagattctgaagccaaacaactctggtttcaatcccagttccaccattaccgtgtgtcaccttagacaggttgcttgatttctttgtgccttagttccctcacctgtcatttgttaataagaatgcctgtaagtgtcatgccattttctgtaaggcccttaaaaaggtgcctggcatagtaaatactgtttgtgtttgcttttgttcatgtaaaatagcttcagaaccttatgagctaaaggaaataattctggtcaaaaaattaaaattagcaagtttttatttttggtatttagaaaacaacctttatgcttaaaaactttagaagaataagattcataagaaattatcaaatttatattttgatcaaagaaactcggaatttttaattggagctttgaggattgaagccatattctaatgaaaatcattggaaaataagtccaagtaaggatttgttaaattaacctttaaggtgatgacctaggcatagagacaggagactactggactaggtgttagacagtccaaggcatcaccaccattaactttaaaaaagtgtggaaatgtgccacacagccgaggaacaacaaaaagcatttagtgttaggactcagtttttttcaaaactttagtagaccagagtatccattcactaaatttttctattcgggttttgttatattcactattttgattattctgattttactataatgaattgctgacccatattttgtacgtttacttattagtggcagataatctccctgatggaatcttgaagatttactttatatacagggcaaaaggtaaattcatacagaacccatttgtcaattttattttttgaattttaaattttaaagggacaaatacttcattttaacaaggtatatgtaaggcctctcctaattctcatgaacaatacctattggttagaatgagaaatcatccacactttcttacctagagacaactttaaaaacaccaaatctttttttttttttttgagacagggtctatttggacaccacagtatgtatatttaaaatcaccaaacatcaagatttggtgttttggggccaggtgcagtggctcacacctgtaatcccagcactctgggaggcctgtaatcccagcactctgggaggccgaggcaggtggatcgcttgagcccaggagtttgagaccagcctgggcaacatggcaaaaccccgtctctactaaaaatacaaaaattgaggcccagcatagtggcgcacacctataaatcccagcactttgggaggccgaggagggtggatcgcttgagggcaggagttcaagaccagcctggccaacatggcgaaacctcatctctactaaaaatacaaaaattagcggtgcatggtggcatgttcctgtaatcccagctacttgggaggctgaggcaggagaattgcttgaacccaggagccagaggttgcagtgagctaagatttcaccactgcactccagcctaggtgacagaatgagactcttgtctcaatcaatcagtcaataaataaaagtacaaaaattagctgggtgtggtggcacgtccctgtagtcctagctactggggaagctgaggctttcatgagaattgcttgagccccggaggcagagattgcactgaaccgagatagcatcactacactccagcctgtgcaacagagtgagacccccatctcaaaaaaaaaaaaaaaaaaaagatttggtgtttttaaagtttgtctctaggtaagaaagtgtggatgatttctcattctaaccaatagggatagaaattttagcccctgcagcaggtaagtttcctgtatatggcagttactgaaagtaattcatttcatcagagggtattaaaaacccaaaactaattttgtgtttgttttttatttggcaaagaaatgcaataaaaccatgaagtaggaagttattactggtatctcttaaatgacataattttgagcccagactttaaatgatatctaacctttgtgttttacagtgttatgggttgaactgtgttcccctaagataggttggagtcctaacccccagtacctcagaatgtgacctcatttggagataagatctttacagaggtaatccaattaaaatgaggtcattagggtgggccctaattcagtatggctagtgtccatattttttgaaaagttgggagagatttgaacacagacgcacacccagggagaacaccatgggtagatgaaggcaaagattggggtgatgcttctacaaatcaagaaatattgaagattaccaacaaactaccagaagcaagaagaaaggcatagaccaaattctccctcacacttagaaggaaccaagtctcctgacactttgatcttggacttaacagcctccagaactgtgaaacaattaactttcacttaagccacccagtttgtggtactttgttatgccagccctagaaaattaatatgtgagagaatccacctttcagcggcatcactaccaaaactgggtacagaagcaaaattaaatgtgggttctccagtgtgtgataaaaacattccagtagaagtggctttggctaagaaaggatgagattcctggcccttggggatgaggagaatgctggtttctttgctttctgtggttgaaatgcttccttggatacctgtgcagctgtgtaactgagcttgtgcctccacgttggccccctggactcatgagcacctaagcacctagccgtttcttcactttaggttgtcagttactgcatggatgcgtcttaactccaggactcgtcaggagttggtatcgtcagggcattgtctccttcagcactgagagtagtttatgcagcagtccttgctccagctgggtgagatgaggatttgtctttgacatgggacattcagcctgtaaaggtttgtacaggttccttatgatccatgggcctggtaccaagcattaattaagccagaaccaattgtgttgctccctttttaaaactctgcattgtacttaggataaaatccaaataccttgccatgacctcaaaggttctgcataatccctgccctacttcctctcaggcctcatctcagtccactgccctacttgttctgctccacagcctattcccttgctggaaggcttccctctggttcttctactaactggctgcccctcattcaggtgtcagccaaagttgcgttgcctgttaagttcaccatctaaaggctgattcctcatcctttaacatggcaacaccttgtcgtttttgttttttggggtgtttttgtttttttgagagacagtttcgctcgtttcccaggctggagtgcaatggcatgatcccagctcactgcaacctccgcctcccgggttcaagagattttcctgcctcagcctctcaagtagctgagattacagacatgccacgatgcccagctaattttgtatttttagtagagatggggtttcacaatgttggacaggctggtctcgaactcctgacctcaggtgatccacccacctcggcctgccaaagtgctgagattacaggcatcagccaccgtgcccaaccaacaccttgtttatattaacatgcttgtgtcttttccattaaaatttaagttgcatgacagcaagaaggacacgactgtacccccattacttaacacagtgcctaaaacggtatgatgtcttgttataccttgttgaattgactggctttccataattccacaggtagatcaataacttatattggcactgtataaacacaatgatgtgtgtatcaggtagacacagtatttatcaactgatcttgatgttagatgtcctagaaaggatcaaaatactatagggacaatacccttgtcaatcttttattacctcgctccattaacatgccaagtaccatttgtggaggacaacaatgaaggttactttcatcttttatgtaaaactgttccaactaatgttaatagtagataaaatttgtacagtaacacctaatttttaaaaatagaacaaagattttctttgggtattgccacaaccaaaattaaatgaaaaattgtgtactgctaaccaagacctaatttttaaaatgtctattgtgtaattttaaataaaaaataacaaggctggacacagtggctcacacctgtaatcccactactttgagaggccaaggcaggcagaccgtttgagcccagaagttgaggaccagcctgggcaacatggtgaaaccctgtctctacaaaaaatacaaaagttagccaggcatggtggtgcacacctgtagtcccagctactggagaggctgaggcagagaatcagttgagcctgggagttcgaggctgcagtgagccctgatcgtgctactgccctccatcctgggtgacagaatgagaccctgtctcaaaaaataacagcaatgacatagtgtagtggaagaaacactggacttacattccaattatgccattaacatatgatccttaagtcttcattttcttgattgtataataagggaggttggtagtttccaatctggtttcatttctttattccttagaaaagtcctctcttcagccaaagcctaatatatagaactacgctggttcaagaaggctgtccccttcaaccccccttcccatgctgcagacaggagttcctctgagcacagtttgaaaacctttgtcctagagctggggtccccagctccatgccgcagatctgctaggatctggtaaatctgttaggaagcaggctgcacaccaggaggtgagtgtcgggagagcaagcattatcgcctgagctccgcctcctgtcagatcagcaatgatggcgttagattctcacaggagcgtgaaccttcttgtgaactgcgcatgtatgcaagggacctaggttgcccacttgttgtgagaatctaatgcctgatgatctgaggtggaacagtttcatcctgaaaccatccctatctccctgtgaaccacagccttcccccgcaaccccggtggaaaatattatcttccacaaaaccattccctggtgccaaaaaggtcagggaccagtttaaagtccattcctgttctaaaagtgcaataacattaacacgcaattggtttgatgtgaactattttgtatcatgtaatgacatataagctagtttatgcacaaagggggtattttctaaaatatcagaaatattgataatcatgcatggctgcctttcataaagcatctactaagcactgcatctaatccttataaccccccaataagatgggtgttattctgtttcacagaatcaggaacaccaaatagtttattcataattacacacttacactgactcatggaccagattctaatcccaagtttattttcaaaacccataattttcccccaataccacactgcacttttagcaagattttctctctcattcattttattttatttttttaggtttcttgttggatttgttgtggttttttttttttaatctagagccctgtaagaacaacaacaaaaaaagcagagtatgaatctaactcgtatattatgtcaatattcaattggatatttttaagttggcatctcttccccagtatataggtattatttcattaaatagcattagcacattgaaaataccacctattattttctacctattgttactttgtatcacaaaattataaatgatacgtatgttgtagcaattaaaaatttttaagagatgaattctacggaaaatggcagcaatttaagtgaattatttccatagggggaaaaaaaatttaaaaaaaataggttgggtgtagtggctcacgcctgtaatcccaacagtttcagaggccgaggtgggaggattgcttgaggccaggatttggagaccagcccgggcaacatagaccccatttctacataaatttttcattaaaaaataatgaaatagcattctattaactgttaatgatggtggaaggaactaactgaagaaatgacaatgggaaaaattggaagaagaaagtgatcagctatggttttatacatttcaataaaatgagcatgattttgagtcttgttttactgggtacataccataaaattaattcatttattcattcactcaacagtatttattgagcatctattat

SEQ ID NO: 5766 - DNA, 34524 bp, Homo sapiens
gacaccaaattctattgttcctgatgcccaaatgcccactcctgctctctgtgactccacccaaccccgtcctgattcaagcttcgtggcctttccctgggtgatttcaacgcatgcactccttcagtgcagctttcactcttcccagagggaactctgccacatgcaaacctggccacgtcgttccccttctttcacctcttctatggctccccagtgccctcaggacacagtccaaatccttagcaccttacaaagactgtgccatctgtcctctgccgacccaccagcctcacttctaatcattgccattttgcatcctgaccccgggtaataatgacctgtctgcagttcctgaaggtacaatgccctctctcacacctgaccttggaccatccttggttttcagccaggtatgccttctgcctcttctccacttggaaactcctgttcttactccatggtggtacctcccctggggaattgcccttttgcagctggccttctcttgggcttcccactgggctctaagccagcccctctctgccttgtccttgagtctgttcctctagacatgagctccccagtggtgagggctgagtgagtctcatctgtgtattcatcatcctaccacatgcctgccttaggatgggtacggatgcctacactggtgaggagaacagggcaggatcagtgctgggggccttacgggaagcccaggggtctgtcggagcctagaagaggccccgacgaagcctgggggttgggggaggagcagagaagtcttctctgaggagatgatgccagagttggagtcttcaaggatcagtgcagtgtcaagaggcactcagtcaggtgggggcggggtgggcattccagggagcagaccctggcatcaaagacttgtgggcaaaacctggccactggcccaggggtgtgtgtgcatgtgtgtgtgtatgtgtgagagagagagagagagattttagtaggggcagagggagagacgctgaacggtagagaggtgggcagaggagctgggggctgaggatattgatctgtgtttgtgccagggactgagttatgaagcgttctgggcatgagtctcaggaatttagacttggccttcgtgcaactgggggtcaccaggcaagagacacagttgagatttgaaaaaaatccctctggcaattggtgtagaacccaggggcctcctgggcatcgttttgggcatttgtggggtgctttcagttatcatgatgactggggggtactactgtgagttagtggatggggcctgggatgccaaacaccctgtgatgttgggaacagtccacatcatgaagggttggcccatgtgccatttgattttgcatttcccaccaggcacgcgtgcagagggaaaacacctgtctgtaattgtctaagattagagcacatgtctggcttgcatagaaacggagagcatctttgcgtggtttttagcgaagactgatttgccagaactatgccttccatgcacattttaggaagattgcgccttatcttgtttggagccttacccagattcgccaccattttgaaaaactacatacttcatggcagatcttctcatgggatttgagcggccaacgggaccttccccacattggtgtgcatctgtggctgtcaccttcagtggagttctgtgtaggcacacacttctcattgctttattgtgtctgctagcatagtgtactcaacaggagcatttacaatttgaaataatggatcaccttaaattaccttcgttatgtattcttttttttttttttttctgagacagagtctcactctgtctcccaggctggaaggcagtggcacaatctcagctcagtgcaacctccacctcccgggttcaagcgattctcctgcctcagcctcctgagtagctgggattacaggtgcccgccaccatgcctgaataagttttgtatttttagtagagacggggttttgccatgttggccaggctggtctcgaactcctgatctcaggtgatccgcccacctcggctcccaaagtgctgggattacaggcatgagacacagcgcccggccctttatgtattaatttaaccaacactcatttaactcttgacattgccagacacttttctaaatgcttgatgagtaattatttaatcctcaagacaagtctatgcagtaaggtgcagttgctgtctctttttttttaccagggagctaactgaggcacagagaggtgacttacccaaggctggagtcgggcagacccaactcgaatcctgccaggcactggtgctgggccaacctcacttctctgtgccttggtttcctcatccatagaatggggccagtgctgaccttgcagtgctgctgggaagtggagaagccgggatttgaatcagcatctgtgcacctcaccactggcctatagtgtctgcctctgatgtttcagttagggcattgggttggttttcttttggaagttacaagcatacatatgttgagacaaggttaagtgccactggtggagagcctgtgagagctgggctgggagggagtggaggtctggtcactgaagctggggcatggacacgcttgtccagggaggaatgtggagtgaggagggcagggggctggagacagacccggacaggtcacaacattctgggaggaggagtgaggaacggttaacaaggtagagagaccagggtagcaggggttggggagcccacagggacagagttccaagaaggagggcatgggtgacaatggagaaggccttagagaaacccagtgaggtcagggctgatggtggccccagactcagacacagagggagcagggggacctgggccgtgagagccgaaggggcctcagctggagctgcagtcactctcaccccaatacccaatgtagggagaaggaggggaagaaacaccccaacctccatctcctctctccctggcatctccggcctgtgcctcccactggctcacctttccaggaagcagatggaaggaagccagcatgacacagcccacaggtgccagcagggcaagggcggctctgggtggggagtagggacaaacagaacaaccagtgagaccctgagaagggagatgtgagaccctggggaatgatccagagcaggagtcacctggaagggtctgaaggggttccttctggtgggctcctcagtggggagggtcactatcctcccacgacgaggctctgacagcagccgcccagtccttgcaatgttctcaggcagatgctgtgatgatcccatttacagatgggagaactaagacgcagaaaaggaacagaccaacaaaagctcacctaagggcagagagcaggaaccggattcaaacccaggtctgcctgatgccaaagctgggactcccaaccactgaaccttgctgtcgcatgtgcccatcagcttgagagttggtgggaatcccggcccaggacagcgtcccctcagccagggaggtggcagcaagtcatgctcaggctagtggaggggcagttagtaacctgcagtcggaggttcaccagtggaaaggctggagtcgggcagacccaactcgaatcctgccaggcactggtgctgggctgctcacctctctgtgcctcggtttcctcatccatagaatggggccaatgctgactttgcagtgctgctggtgggtggggggggcggtaaactgaggttatgtcgattcccttcccaggtggggaggacaggggaagtggatgcacctgggggaccatctcagaggagctggcccactcttactgccttctccagatccggaccagggagcggtcaagatggtgtgcccttgtctgacctccgtcctgcctgctgtccagcgactccctggcttcctccccgtcacgtgggactcctgtacccggtgctgtcgggggagcccccctccataccctccagacctcacaagacacttccaggtctggccacaaggtggagtgtggcggctgcaggacagtgctgggggccgggctgcagaggagactggacctgcgccgggtgacctccccgctctgtgaaagtgtgggagtttgtgtctgtgcatccagagaaccagagggtggtggttgacttgccgtgctccccccagccccccattgggattgcctgggtctctgggggatcactgagaagctggataaagagagctggcactgtcgccttggctcactaacgccaccattttacaggtgaggagactgaggcccagagaaggaagtcacgtgctgaggtcaccggctaatcagtggctgagctgggctcgaacccagatctcttacgctgtgaggcctctgcttttcctgtggcatggagaggggcttctcccacctggggagagggatcctgttgtattggagaggcaggggattaaagatggactgagagaggttagtgtcccagaaaccaaggggcaatccctgccctggagagaacaggcctcaagggcagggatggggcaggggcagtggataaggagtctacccaggcctttttgggttccctcctttggtccctggggacccagggctgtggcacttgccccgggctagagggtcggccagggcctgtgtggtgcccactgctccctcccctgcactgcaggggacccttgcccatccctctagctcatctggacctccctcaatggctcctgctgtctttccaggctgtgtcctcccgtgtcagggacacatcccagagcccagggcctgcgtgggctgtatccacggttactgaatagggacaaacaggcatgtattggcaggggccggtggctcatttcaggaaagtcccttcagcaagaggattctctccccactggggctgagggtggtagaagaaaggaatgttgttctatgttgtagtgtctctgagatgacctggcttcctgaaccaggtccccctgaagagctcctcctgtccaccccaacaagaggccagctggagagcaagcaaacatcgagtgcagcaggagactataaggttagacaacaagaaggacttcctggcaggggagagcaatgcttgcttggttagagctgcctttcagtagaatgggctgctttggattgcagtgaggtcgctggagttgcaaacagcagagccagagatcaaggtcaagtggaagaaagctgggaaaggttcagtttggctggtgaagggtggagagggtaaagggaggcagggaccaccgtggtgcaggggtgaggtgccctgcagggagctgatcctgaggccgatggtgggaggagctgtgtgtggtcgggtgggacggggtggggacagcaggagacactgagaaggtggcatggccaggagctaggggctgaccgagtgtggggaggggggagtggggagggggcgttgggctgcccgatgggaggtgccttggctccgatgggagcactggggagcagcaggtggggggacgagctgggtgggaggggctgcagcttcccagcagagacagggtctgggaggcgactggactcgaaggcctgggcttgggagagaggcccgggctggagaggtggggagggggatccaggagaggggataactaaggacttgggagtagctggcatcacctggtgagacgagagtcctgaacagccccctctccaaggacagaaatttctccaaggaggctgacctgagaggtgggaggagagtggggcagagggtcaggagggagaaaccagtgggtgccaagaccaggtcagccccacaggctagggggcttgaggacttggggctgatgtctagggacgtccacgaggtggagcagcccaggaggcctgggtgggaggaggaggcggtggcggggaggggagggaggggctgggcctctgtccacagcattagtgctggttggagggacgaggggggtgcggagccagccaggccgccctcccgttctcacagcagccgagcagagcgcagagcgggctgccatggcgctggccaggcctgggaccccggacccccaggccctggcctctgtcctgctactgytgctctgggcccctgccctttccctcctggctggtgagttggggcccatgtctggaggggcctgggagagggtctgtcccccaagacagataccccaagccttggctgctggggtggtgggtgggctggtccgcgtgggtgcaggcctgagctgtggggtgcacaggagtgcgcggctgtggcccccagactctgtggggctccacggaggtgagtgtgttctgaggctcggggctgtttcatgttgaggggggttgtaagtttcggggttgggggatcgggggctgggcatgatttgggggagctgatgcgggtgagggatggggtgcgtgttttgggaggktgctgtgttgcatcctgtaaagggctgggggacttctgggtttctaggggctgagtttggggagttgcaggtggcataagcctcaccccagagcytgttctgtgtcgcatgctgggttgtggggcacaggttgtgggtgtgttagagttgggaggtggatgagctgtctggggtgagccgtgagttgtgtccgaggagttgggtgtggtgagctgtgtcctagcacacgctgtggggtgtaggttgtccagggttgaactaggtctttgctctcaacatgaggggtgtgggatgtgcacagccgaccccaactcgggactgagtggagaagcgtgagggagactcagggagctgggtgcctgcccgcacccctccatttgtgcggtagccctgcctgtgctgagggctgctggggatgctctgggtccctgtggggtggctggggatttgggaacatgtgtgtgtcccctgctgccccctccccagcattccaaggccaatctgaaagggctccctgaagccagaccacatttgccaagccctttttgcttttgtccaagctctcggagcctggaattcctcctggggggtccaagggaacgcttggtgttagttactatagttacaggggccgggcctgggaagtcccctgcccccaccaccacaggctggggagggagccaaggagggcctgggctctcctgaggctgggggagccctccctgccccagagctccacaggctgtagggtgtgggggccaagtgtctcccagtcccacctggggaccctcatgtttcccrcactcacaaagctttcatttcctatcctctctatggggccctagggaggatgaggaccccattttgcagtgaaggaaaccaaggctcagagagggacggggacttatgagctgggctctgctggcaggcgacttgggctccatagaggggtggggcatggtggcggggggcggggtggctgctcctctctgttctctgcatacaaagcacgtgagatcccggtctgtggatcggtgctctgtcccctgccctgtgatgctcacacacccacactccgcacacctgtgtggcatgcccaagggcacacagcaccacagggacaggtgctacagacacatgtggatctaccagcacatgcacctacctacacacatggcatgtgcctgcacaccaatgtgcacaccccaacacgcacrtgtggacatgtgtgcattcacactcagtgtgcactcacaggggacctggaggcacagagtggatggaggctgtggggggtctggacactggtgtgtacactcaacccatcaggcctgctgggttgcccaggggcagcctttcctctgccrtttctgtgctgggagcgccatccctggggatccctaaaagttggtggggtacactgcaggcatgaccatttctgcatgctggtaccctagactgcctgccgggaggggagggattggggattttgtcacttgaaaaccaatttccatcctggaggggatgggggcttctggaggccatgggcccctggcttttctccccacccctgccaggccctgagctgggcctctccatcctgggcccaatttgccacaaaggcccggctggttgccatggagaggaccaagcatcttggagtacaatggggcacgttgggctctcatatccaccctcccttccccaaacacccagggagcccagcagacaaaggggcagtgagtccaggccccaagtccggcccctcctccagccagaagggggtgggggcctgcaggacagaagcagagatggagcagaaagccacacacattcaacccaatgtcaggatcctttggacagtgggtgtctgcctcaagtaaagaattgttaatgagtaagatcagccactccatggcaggcactgtgctattattaacgaggtctaatttaattctcccaacagcctatgaagtcagctctgatacccctagtttacagaggaggtaaacgaggcccagagatggccagtcccagagccaggaagccccagagccagtgctgggatttcacagtacactgtgctacttgcctaggcaaagtcacgtctcttctctgtctctacaaaacgaggacagactggcttactccgagcgctggtataaggattggaagagaatgcagtgagcggttccccaccccaggttttggcatggaacccccaatttcaagggaaattttagatggaagcccatgaatagttaatagtaaaattgttaaaagtggcctgtttgggtggcaggtggggaaccccacctgctctgtctccccctcacttcaggaggtaactccctggaactgtgctctgagcccaaactctcaagggttggtcagtgccaggcacagggtaggtgctccgtccctgacagctattgttgcaattactgttatcaaaattatgtcttttaacctcagaaggtaaacatttttgaaaaagagtatgccaaattattctgcccaaaagagaatttcaccctttcctgatgactgagtgagtgtctgcaagcctccatggttattcagccctacccttgtagggtagagccytgggrcccagggatattagatgaacaatttcttcccctatgctagaagttcccacaccttatgagatcttaggtcgcttcttagaaatattctgtctcttgatttgttgggacaggaagcttccccagtaaatgcttctttttttgtttgtggtttttcgtttttktttkktttyktttttttttttttttttttaaraaagggtctcaccctgttgccctggctgcagtgcagtggcaaaatcatagcccactgtagcctcgacaccctgggctcaagccatcctcccacctcagcctcccaagcagctgggactacagggacccaccccatgcttggcttatttcgttttgttttcatagagccagcgtctcactatgtttgcacaggctggtcttgagctcctggcctgaagtgatcctcccacctcagcttcccaaagtgctgggattacaggtgtgagccactgcacctggcttcagtaaaacacttctcatcagttgttggctgttataaacaggcccattctaagtgcatgaaaagtaggagttactaatgagtgaggcctgagacacagtgggattactgacagctgggttctggatagacggggaagattgcctgctctgcccaggctgatattggaagctgtattcctgtgaaaacctttagagattttttttttttcctgggtgaggcagctgtaatgtactaaagcaacaatatgtgagtggcaatttagggtttgtaaagtgaaaatttcacatgcattgggagatgtggacctctgggaaatcaggagctgatctgattcttcgtctcaacctgggcaaaattatcaacctctctgagttacaaaaacagaaattttcttaatggcacccaccttttctggtctgaatcaagtataacaatgtaataatagatgcacaggcccaagcacatagtacacactcagtaaacagctgggtcctcctgcccctccccaggacagggcagcaggtcgaaggggaggggcgggcgtcggttaatccctccctgccaggtcggcccaggcagcctgaggtcaggagggatttgtaaagataagcacaggcccctcgttgccctggcaacaggccccgcccctccagcctggcccgggaaggggggacagcccctcctccgccctgctgccctccacaccccgcccctccttgcctctcctgtctggcctgggctatcgtggcctcctaggctcactcctggaagacagagacaacctgaggtcagcggttcccacacctaaaagtgaaaggaatcccccaggagcaggttgsgatgcagattctcaggctcagggcccagtggttctaaatttggggtctggagtgggttccaggaatctgtattcttaatgtgggcccgtgattccgggaagcttggagtgaggccctgggtttggattccagcctccctygggctgtggactgtgaggctgcttcgagtctccctttcctgagctgtaaaacaggcatcataatcctatccacctcggaggtaaatgccaagatcaactgagatgacacatgaaagatggctgtccctcccaggcaggactgtggcactattgcatgcctcccaggacgggcagctccttcccttcctgcctggctctgactggagaaattccttcctcccatggggttggactctgtctcccgggctctgtcatttagagcccatctgctcccatggtcctgggaagatcccttgtgacaaggcacctcccccgccccccaggatcctttccccggtgctgcctccccagcgtggtcccagctgctctgagatagggggcaaagcttcagattggatgggcggggrggcggggggggttccttgcactgcacaggtgagggacagtgctctgtgggaattaagtgagggacctgttggcacaggcgctggcagccggggccctttaccatgggttatgagtgctgcaccctcctgagcagtgctggccacacccagtcccagggctgtgccctgcatcaccttggtgaatccttycaacacctccaygagatgggcactttttgcaccccagatacaaaccaggactgcccgatgccccaaacctgtgccctttcctgggggagctggaaggatgcgggtcaggccacaggacagccctgcctggaatgcggatgacgcctgagaggctgccagccttatctggggggcttcaccagagtgggggagggaagggtgcagggtctgagctgttctggggtctggtgagtgtctagatgacaacctgggtgggggaggggcacctttgggagctccggatgggggtggggggaggaatggaggctgtgtcttctggaggctctcctcccccatcccttaccgagttsttaccaaaagcagcccttgactgcggtgctgrggagctgaatagttcagcatttgatgaggggattcttttatgatctaattttcagactgggaaacrgaggctctgtaggagaaatgacttacccagggtctcatagctaggaactttctgagctgaaattgaacccaggtctgtttcacttcaaagcycaagttctcacctgggcattgtggtgacaaggctctcaggaaggcaggaggagaggaagggggatgaggatctctgggcgtggcttccaagccggttggtgaccctctgttagagcyccggtgctggaagcatcatggtggccaggggcaggtgtccgtgagccatctcaatacctgctctgtaccatgcgaccttggccaggccggccactcaggtgtttgctgatgggggatgaaattagggccagggaccctctagaagttcctaggccagtggctggcagggggtgggtagtgatgtggagaaggggtaggaatgagaccagcggagcacacgatccctgcttttgaagttgtccacccatcctccmgaggttgaggtcgggcycatctccagtttcacccagggatggagttaccagacccctggcagaagaggtggagggggcagtgggaggagcctcaccctctggggcctccttggatggatggggcctgcaggagggagacccctccccaggtggagctgaaataatccagatagaccttgaagcctgtcccagcgaacactaacttgctgtgtgaagtggacagggctgggcaggctcagcaagccttcactttctttcctgggcctccttttgctgtctggtgcaatgggcatgacggatactgcctcaaagggggactgcagggacaagacagtggagggaagctcacggggctcagggaacctctgctcactaatcctgcccagaagccagacatccttggtgctgtttctctgctatataggctctcctaaaaccgttcccagttctgggtgcagatgtgtgcagcttactgggacctggcttgcagacccctggccctctgtccatactgtgcatgcagagacccacgttgcttttggggtctggggtgggcctgagagggtggrgaggagattgtccttgtaacctctgcccaccctgcccagccagtttcttctttctacagggacggtgccttcagagccccccagtgcctgtgcctcagacccgtgcgctccagggaccgagtgccaggctaccgagagtggtggctatacctgtgggcccatggagcccyggggctgtgccacccagccatgccaccacggcgctctgtgtgtgccccagggtccagatcccamcggcttccgctgctactgcgtgccgggtttccagggcccacgctgcgagctggacatcgatgagtgtgcatcccggccgtgccaccatggggccacctgccgcaacctggccgatcgctacgagtgccattgcccccttggctatgcaggtaacagcctgggccgccctgggaggaggtctgtaatgcagatcgcatcagctgctcagagtgtaagcatcatggcttcagctttgcctttcgtgtagggacgcccccaggcatccgggcagctctagggtatatccacttggtctgactacagaactgatgcctggcagctctgggtgagagtatgtatgtgcgggtgctggcgtggtgtgtggcgcatctcaggcactcggtaaatgtgatttcagtccagcctagagttcagtttggctgcgggggtggaatacccctcattcatctctggcagtgtgaacctgcctggcgtgactttagtgaggatgcccagatagtttttctagcacttcaggcctgtgccaagctgtcatgtagacactgtctacacgacagtcaccatcagctcatttgaacactcctgatgtggtctggagtgcaatgtggacccctggcctctgggtctcccccagagttctagcatagacatacaaggtctcgttcaaactgtagtgttgacataccccagggatcgctgctgtctggagtgggataatatatacgtaagtgctcagaaaagtgactggcactaagggtaccttctccagagtgtggcccgtcccaggcccacccatggtctgagccgagaacatcctggagcggcttcccagagaggcctgaagtcgggaaggagggcgcagctggggacagaaggggcgcagtctgggagcgaagctgagtccagggcagagtctgagtctgcagtgtagatgctctggatcctacttcaatcctgaattcagacaactgtactctgagggcagagggcagtttgaagtcacttcagagcaagaggtacagattggggggctgggttccagggcagggggcctacagcgaagagatggcagctgatgaagagagatttgggaagctggttccatgcatctttctcatcgttccagtgtctcagcgtctgggtgtattagtgtacatgccagtgcaggtcacattcgtccatgtgtctcctagttccaagttctgttttgcatctgtaaagatctgccagtacctgggggtgtctvcagtcdgagtscatgtgtgggcagtgggttgttcgggcagtgggttgtgtgggcagtgggttgtgcgggcagtgggttgtgcgggcagtgggttgtgcatccggatgtgtagcactcacacacttcgggtgactcttcctgggtaagctgtggatgtgagtgggggcagcatctgccgtgactcattctctcctctttccattccaagccgggtgggggagtttgggatttccagacaaggcctggctccccctggcacagagggtgggagtggggatggggagggaggagggaagggtcatgggaaggtggggccatgttttgtgctcaatgaactgagaagggggagggttccagctggagtcagctgggcctctggcccccgcttgaccaaacccacttagggggcagggcctgctggagtctacagtgacacgtgagtccaggatgatctcaggcagcgtatctgaaaccctgggactccccatctcccttcctcttcaccatcaccctgggagagccactcagctgtcgtgattcgcccaggactgcgagggttctggggacttggtactttcagttctaaaaccaggacagtgcagggacactgggaggagtgattaccctactcaagcatctcctgcctctctgggatctgaaagccaccagagtggaccttctaaaaagtaggtagggccaggtgtggtggctcacgcctgtaatcccagcacttcgggaggctgaggtgggtggatcacttgaggccaggagttggagaccaacctggccaacatggtgaaacgccttttctacaaaaaaatacaaaaattagccgggtgaggtggcatgcacctgtaatcccagctactctgcartctgaggcacaagaatcacttgaacccagtgggcagagattgcagtgggctaagattgcascactgcactccagcctgggcgacagagtgagactctgtctcaaaaaaataaaaaacaaaaacaaacccaaaacaactaactaaaatgtaggtgggaccaagtcacttacctgtctgaaactttcaggatggacccagaggttacctggtccccaaggcactgacacctcccacccgactcacctccgccaccctctcccttgcttccaaccctccaataaccccgcctagggcatcatggccctgcccctagtggaacttgcctcttgctgcagtctctttggaatccaactgctgcccacagtcccctatctgaatccttcaaaagcctcttcttctaggaagccttccctgaacagagcagaccccggctattgctttcccaagacccaacccctttccttgttgaacttggcaacatcacctagctcatttaggtaattactggctgaatcaccccccaccatgtcctggcctagactgctgtgagccccatgarggcagggctgtctgtctcgtttctctccctgcggttgctggcatgacccgtcccccaccccccaaccaccaccaccaccatccggctctgaatgaatgaatccacgagtctctaactctggagcaggcctggcgcgacctcttccgccctgctctgggtgtccatcctgcaccctgtgtgtcccctgccctgtccaggcgtgacctgcgagayggaggtggacgagtgcgcctcagcgccctgcctgcacggggsctcgtgcctggacggcgtgggctccttccgctgtgtgtgcgcgccaggctacgggggcacccgttgccagctggacctcgacgagtgccagagccagccgtgcgcacatgggggcacgtgccacgacctggtcaacgggtgagcgagcggcggggcaggcggcaggggcgccgggtgcccgagggcggggaggccaggcgcggggcagaaggggcaggcgcgcgctcagctccgccggtgcgccctccccaggttccggtgcgactgcgcgggcaccggctacgagggcacgcactgcgagcgggaggtgctggagtgcgcatcggcgccctgcgagcacaacgcgtcctgcctcgagggcctcgggagcttccgctgcctctgttggccaggtgtgtgcrtgcaggtgcgcggcctggcgggggsaggggtaggtgtgcgcctgtgcggcctggggcggtggggcaggtgtgtggctgcacgcgagtgcccgctgggtcctcgggaccagagtgtgtgtgtgattgcaacctgtcggagcctcagtttcctgatctacaaaatagggctgatcgtagcgcctgctcctggggttgctgcggggagctcgaaggtgcgacgcctgggaagcccttggggagggcctgacagctgcaaagggctcagtaattaatgctagtaatagtagtaagactaggccgggcgcrgtggctcaagcctgtaatcccagcactttgggaggctgaggcgggyggatcacgaggtcaggagttcaagaccagcctggccaacattgtgaaaccccatctctactaaaaatacaaaaattagccaagcatggtggcatgtacctgtagtcctagctactcaggaagctgaggcaggagaatcgyttgaacctgggaggtggaggtgagcagagatcatgccgctgcactccagcctgggcaacagagtgagattctatctcaaaaaaaaaaaaaaaaaattagtagtaagactagtaatagcagtaataggccactgctgctgaaggctgccgtggtcattcctgcggcccttagtgtgtccctccctcgccattcgtggcttattccragctgcggtcccttgctggccctcgctagcctggtcatagtgaagaggtgctgcccggcaaccccgtgagacctgatgtccgcgtgtgtgtgcccccaggctacagcggcgagctgtgcgaggtggacgaggacgagtgtgcatcgagcccctgccagcatgggggccgatgcctgcagcgctctgacccggccctctacgggggtgtccaggccgccttccctggcgccttcagcttccgccatgctgcgggtttcctgtgccactgccctcctggctttgagggtgagcccctgctggggaagcggtcagcccatgtccagatgcccagggagggatsttgtgcccacccccccaccccccccacccccccaccccacaccccacacccgagtctgccctctctcttggactcagtctctctagctatagaatggaccctctcagcccctgcctggctctgagggtgcaggtgggacccacagctgggcctcttacaggagccgactgcggtgtggaggtggacgagtgtgcctcacggccatgcctcaayggaggccactgccaggacctgcccaatggcttccagtgtcactgcccagatggctacgcaggtgtctggggtggggtgggccctgggaccatcagaattggtggtcctcaggtgagaaggtcccttctgtctggatgtgtggattgatggggtcaaggagatcagggaggaggtgggtatggtggcccaggtgaccgctgagggtggctgaactgggactcgctttggaggtgagactggggctcaggagtgtagtcctggcagctggggccatagtgggctgaggttgtctgggagaacgtgtggagggatggtcttcagggaagacggaggtggttcagccaggacagagaaggaaaggggggctattgcagagagttagggggcagcatctgtagaaggatgactctgacctttggggagctggggcctgtcaggcaggagttgggggttcagaagtctgcccctgccttgggtacacgcagatgcacagacacaggaccccggtgagcccagggagctccaccgccaacactgaacgtccctgccccctctggaatgcctgcgacacctccctcacacccgcccgcattcctgctggggcacactgcctcctccccctggcaggctcctgggcacaggctcctccaccaggggaaagagatggtggtcacctcttcccctctctcactcgcctgaagatggtgggactcagtgtcccccagccctggatggctgacactcctgggggtcccgaaggcccatccactgcctccatgggccgaggttccccaagtcctgctccaagagccatggcctcctgggtacctggcacacagtgggcccacacagcacgtctggcctctgggaagcatttgctctgcattttgttttttccttgccacagccccatgaggcaggggtttaaaaccccatcttacagctgagaggatgagggggtgtcatcccccaggttcaccactatcagcgggaacccggctcctctcccagttgagctcactgttgggtgacagggagggcagacctctgaggtcagagccagggaggggggaccccagctgcagggctgggctctttgcccatcctccctccctttaggccatgctgggcatgggggaggccagtgcctggcattcctgagcaggctccgaaggaggcagctgggccaggcagggagctctgccycctccccacttccccagcctcagtgcccgcccaccactctcaacctgtctggagggcatggcaatggagccgggggctctgtggaccttcctgggccacctgtggctcctggcaggtatggaggaatgtgggccctgggcagggggaggttggtgggtggtggttcctaggaagaggctgtggtgtttgtgagctgatcgaggctgggcttcaaaccctggtgacttctctgggcctgggttcctccagctgggatgtggctctggctgagctacagtgggctatggcttctggacccaagctggggcctgagcacctgaagggatccctagagggaggatgaggcagccccttcacagccagtgtgggggccctggggcagagggactgaggggttagagcctgggaggccactcagagtgccttgggtacttgcactaccccactagctcctccatgccatcactctgtccataaaagccatgtcaggccctttgctgggcaccaaggacatattcaggtccctgaagatctcagctgagtaaacaaatacttttaatacagggttctggggagctgtgcctgggactgcagagtgacacagtagtttgaggttgggagttagggaaagcctctgggccctttgagtttgggctttgcaggatgagtaggagtttgaaaggaagggtaagggtgaatgaggcattccaagcagacagaacagtatgagcaaagccccagagtcacgactttccaggaaatgctcggaggaatgggacgttcaagatttgtgggaagcaggattgaggcttgagagcctggtaggacccagcccatgagggtgtcttaaatgtcagggtgagtgattggacttcaggcggcagaggaacccagcctggcgatgctttagaaatggacctctggctactggtggagatggatgggaragggcttctgaaggctggcgaactgggggatgcgggatggtagcccagacagctggtaaggcaggagatggggggtaggagaaaggggcattggagaatgtttaggagattaaatctacagggcctggacactcaccagacatgagaagggaaggggcatcttggcttctggcctacggggggacttgaggggaccatgagaaatcctctgggaattggtttggctgataggtactgaggtccccatcataagaggcatgtaagttctgggycagtactgtgattctggccccagacattactgaaccttggctttrtctctcccaaagggccgacatgtgaggaagatgtggatgaatgcctgtcggatccctgcctgcacggcggaacctgcagtgacactgtggcaggctatatctgcaggtgcccagagacctggggtgggcgcgactgttctgtgcagctcactggctgccagggccacacctgccygctggctgccacctgcatccctatcttcgagtctggggtccacagttacgtctgccactgcccacctggtacccatggaccgttctgtggccagaataccaccttctctgtgatggctgggagccccattcaggcatcagtgccagctggtggccccctgggtctggcactgaggtttcgcaccacactgcccgctgggaccttggccactcgcaatgacaccaaggaaagcttggagctggcattggtggcagccacacttcaggccacactctggagctacagcaccactgtgcttgtcctgagactgccggacctggccctaaacgatggccattggcaccaggtggaggttgtgctccatctagcraccctggagctacggctctggcatgagggctgccctgcccggctctgtgtggcctctggtcctgtggccctggcttccacggcttcggcaactccgctgcctgccgggatctcctctgcccagctgggggacgcgacctttgcaggctgcctccaggacgtgcgtgtggatggccacctcctgctgcctgaggatctcggtgagaacgtcctcctgggctgtgagcgccgagagcagtgccggcctctgccttgtgtccacggagggtcctgtgtggatctgtggactcatttccgttgcgactgtgcccggccccatagaggtcccacgtgygctgatggtgaggaataagccaggtgggaaggcagcacctgagatctgcctccctcagcctgcaggcctcacacctggcaccttctctccctgcagagattcctgctgccacctttggcttgggaggcgccccaagctctgcctcctttctgctccaagagctgccaggtcccaacctcacagtgtctttccttctccgcactcgggagtccgctggcctgttgctccagtttgccaatgactcygcagctggcctaacagtattcctgagtgagggtcggatccgggctgaggygccrggcagtcctgctgtagtgctccctgggcgctgggatgatgggctccgtcacctggtgatgctcagcttcgggcctgaccagctgcaggacctggggcagcacgtgcacgtgggtgggaggctccttgctgccgacagccagccctggggtgggcccttccgaggctgcctccaggacctgcgactcgatggctgccacctccccttctttcctctgccactggataactcaagccagcccagcgagctcggcggcaggcagtcctggaacctcactgcgggctgcgtctccgaggacatgtgcagtgtaagtgtctggtggcrgtggtggtggtggggtggggagtccttttcccaggatctgtcctgtgtcaccggggcttagtgtgtccttttgctgatgaggaaactgaggctcaggaggtgaagtgacctgcccagggtcccactacaggagggtggcagggcagatttacatctgtctcttyagcccagctgctcctaccctctggcggtccccgtgtctccccgagctagtcctggtgtgagagagacaccctgaccgagatagagagctgcctgagcctttctgcaggagctacttggggagcgggacacgcttttgatcatgaacagaattccaccaaccctggagttagaacagcttgggcatgaattctggttcctctctttactggctgggtgactcaggcaagtggctttgcatcactgagcctcagttttctcatctgtaaaatggggatcttagcgacttcctctcccctcgtttgtgaggagatactgtgtctgtagtaggtgctcagcgaagaagcactgcaatgccagttatggtgggtgatgctcactgcagtcctgagccaacccctgccctgcctctcccacagcctgacccctgtttcaatggtgggacttgcctcgtcacctggaatgacttccactgtacctgccctgccaatttcacggggcstacrtgtgcccagcagctgtggtgtcccggccagccctgtctcccacctgccacgtgtgaggaggtccctgatggctttgtgtgtgagtgtgtgtcctgggcagctcccgtgctgggtgctggacacctaagctggttagatcccatctgcactctcagggcttgtaggatactggtggaccaggcatgccaagccctagggcagtgtggcggggccaccgcatgtagagggacagagtttctggagaaggtgagcctgtactgggcttcagggccagactctgagagccacagggggaaggatattttatggagtggcatagcatgtgccaagtccctgaggtctgcaaggacagtggaagtgcaagggggtgagcaggaatggggtgggaaagttggtaggggctttgaggacacccagctaggcggctctgactttatcccaaggacagtggggagcctctggagggttttaaacaggagaggggcatgaccagatctgcattttacaaagatgactggctgcagtgaagggcaagcctcggccatgaggtggggcagcttcacggagaagggaaggggccagattctgccaggagttgctgttgcctggcttgtgacctggagggtcgcctaggcatcacgccccaccccccagcactggccgggaactgctcctccatgggtaggaaatacattgggagtagaagtgagggtggtgggggcggctgcagtttccaggattagatgataggtgggtgcgtgtgccccaccccaagtaagtggctgtctgccactcgctgggggaagtggggaggtggcatttctggagaaggctccgtgggctattccctgaggctccttctctccgcaggtgtggcggaggccacgttccgcgagggtccccccgccgcgttcagcgggcacaacgcgtcgtcagggcgcttgctcggcggcctgtcgctggcctttcgcacgcgcgactccgaggcctggctgctgcgtgccgcggcgggcgccctggaaggcgtgtggctggcggtgcgcaatggctcgctggcggggggcgtgcgcggaggccatggcctgcccggcgctgtgctgcccataccggggccgcgcgtggccgatggtgcctggcaccgcgtgcgtctggccatggagcgcccggcggccrccacctcgcgctggctgctgtggctggatggtgccgccaccccggtggcgctgcgcggcctggccagtgacctgggcttcctgcagggcccgggtgctgtgcgcatcctgctggctgagaacttcaccggctgcttgggccgcgtggcgctgggcggcctgcccctgcccttggcgcggccccggcccggcgcggcccctggcgcccgagagcacttcgcstcttggcctgggacgccggccccgatcctcggctgccgcggcgcgcccgtgtgtgcgccctcgccctgtctgcacgacggtgcctgccgtgacctcttcgacgcctttgcctgcgcctgcggcccggggtgggaaggcccgcgctgcgaagcccacgtcgacccctgtcactccgccccctgcgcccgtggccgctgtcacacgcaccccgacggccgcttcgagtgccgctgcccgcctggcttcgggggcccgcgctgcaggtgggatggctgggcaggggggtgggctgcgaatgccccctggggctrtggtggggcagagaagtctgccaggtctgtggatgagtcgcttcccttccctggtcctcatgtccttatctgtgacatgaggaggacagtttaatttgataaatttcctgataaaatacagatcaaaacacaaccagttagcctggaatttcagataaacagcgctgtggtctggggctgggagccgcctgccgcttacacggaggttcatccctattggtggctggttggggtggagggagggggtcaggctttggcgcttcccttattcatctggcagtggctctcccgggagcccagcgtgtggaaggggatctggctgtggcctgacccctccctctcccctcaaggaatgtccaggcgttgtgtttaggasctgcttttgttcagagtccttacactttgttgtcctgagtcctctgagactctggaaagcgagtgacaaccctgtgtcccttccctcccatcagggacctcaatcccatgcccaatagaggaaggccctgagttccatacatgagaacacaagctcaggtggcccacggtcacagcgctggggagggcaggtcccaggtgtcctgcacccactccagcctctgctctctccccaggttgcctgtcccatccaaggagtgcagcctgaatgtcacctgcctcgatggcagcccatgtgagggtggctctcccgctgcyaactgcagctgcctggagggtcttgctggccagaggtgggtctgggggcctgggaactgtgaggaggtccaatgaatgtggagggctgttcctccagccagggtggggcgggggtcctcgcccaccttctcacccctccctggtawcacagtcaccattgtcacttgagtttccttccatgactcgcaagaccatcctctgtgatacagactgctgctgggcagtggttgcctggtggcagttctggaaacccagcctcagcccgcctgtgggagaccataaaagtgcagattctgggccctgcagacagtggcgtcagcgtctggggcacctgccttcacacaggctcccgtcaccctaatgggatgagagtccttctcagtgacggctgctcaggtggtcacctggcagggcccagctgggyaggagcagcgcatggggacagtggatggataagctctgatgcttgctgaagtggggatgggcagcagagcagctgggagcacaagaggcagccatgggggaagccgctttctcagcccmcctccctctccaggtgtcaggtccccactctcccctgtgaagccaacccctgcttgaatgggggcacctgccgggcagctggaggggtgtctgaatgtatctgcaatgccagattctccggccagttctgtgaagtggcggtgagtgttgtcaggggtgaggggccgtggacgtggcctgctgggcccttggcragatgctgctggggagagagcgcagcaccatggggctgttcctgggccactctgtcatggggtggggcagtgagaggagcctcaggtcccttccacaccccccacacaagaggtatttccactgcagggagagctttgggggctgtcaccgtctattgacaagagcacaaagctcctagctgggtcagsggcttcctcagagtgcccagggcagtggcagtgaggacagatggtctctgccaatccaaccaggactcagggccatgttggtgttctgggatttaggttggtgaatccaggagactcatctccaggggtttctgagccagtgtcctgagtaggaagacacggaggggcagggggcctgggagtccgcactggagcaggctcggcccgctgtgcaggctggccccaaccccgggtggctcagcccaggaggagcctggacagacgaaggcagcaggcgctggagctgtgaacctccccgccacaccccttcctggggcggggtggggggagtgggtgctggcgaggagaggcttggaagggaagtctggggagcagccttgatctcyacaggcttctggcagcctgggtcataaaccacaaatcccctccgcttacggggaatgtttcctttcaagttgaacttttacagcctctggcttccctacccagccacctccccagggcagggggaggaaatggctttacagctcctccctcaaaatgtccaacggtggaggctggcaggaccctctcaggaccagaggaactttcctgtcaagttttaggacccaggtcacagtgggctgggaagcctggaggtacagagggaggctggtgagtcccagagcccatgcctctggaatcctcgcatcctgggactacagagtcccaggcatgtagaggctttgatggggaatcctgggagcctgtgactggagacaccagggaggtttgctgggctccccgaagcctgggccgaggctcgcagggacaagctgtcataacagcccctcggcccccctgccaccctgcccccgcaggtgggccccagtggattctgaccttgctattgtggcagggggccgctcagcctgcccctgctcctgctctgcctcatgagaccctcgtaggcttctgtgaaacccatgcaccctgcttagctcctgccgggtgttcaataaacgcccatctctgtccttctagccagaactcctttgttgtataggcctcccygagcagtggctgtgacaggtggtttcctggcacttgcctgcayacccctggggctgggtcttcactgctcccagggcagcctgctcccagctctgattttctctgagtaggtccttgtgctgcgctctctgctctytgagggccccrgcgtcctccccttctctgcggtcttaggcctcggtgtcgtgtctcttgcagaagggcctgcccctgccgctgccattcccactgctggaggtggccgtacctgcagcctgtgcctgcctcctcctcctcctcctgggcctcctttcagggatcctggcagcccgaaagcgccgccagtctgagggcacctacagcccaagccagcaggaggtggctggggcccggctggagatggacagtgtcctcaaggtgccaccggaggagagactcatctaggccagcctggctgctggcaccagcacctggaggtcctgaatggtttctacctggagacccaaggaagctgcttccagggctcgggacattgctacggaagtgtccccttggctggcagcctctgcctctgcctctgccccatcctggatggaggacgaggggagcaactcagggaaacagaggcctagagaggctgcggacttctccatcccaccctcggggttccgccttggcaggtgtacggctgtgcgtgggagggcacacgtgggttcacagtgtgttcaggagtgtgtgtatctggaggagtgtgtgtgtgagtgtgtacctgggcctgtgttagtctgcagatgctagtgtgagtgtgtcctgacatggctccagggcgtgtctgccgtgtttactgtgtgtctatgactgtgatgggtgtagctgatcccaggaggtggcggctgcgccatggggtcaaccattacagtcctagggcaggggcggcccaaggctgcatgttctccaggaggccaggccggggttgcccaggcacctccttccccgcctctgggggctgctcctgctgtggaggcagctgggaagtcagggaaggccactagcagaggctgagtgggcttctggctcctagaacaaatgtcccttcaggcaggtctgtctgccagaagccagagccagtcatgcgagggaaccacagacccacccgccccctcagccggagcagcccgagggagcagaggaggggctgcctggagcttcccaccctgctgtggtcatttgtcaaagggggaaggcacccactgcctacctcacagggctgttgtgaggatcagagaggacgacagtggggaaagaatctggaagtcttcaactgccgtctgatgggaaggaccgtctgggtgtccttctgggatgaggatgacagagcaacccttctcctgccctgaacccccccagctcacctgaccacctctggttctccagctccggtccttcctagcagcctggtgagctcactccttcccctgatgactggctgcctctacacagactcggcgagaggacttgaaggaagccctctgggttgtctgctgagtacaggggctcagtgaacactggcgctgcctctgagtcggggctgggcctgcagaggccgactcagaggagactctgctgcttgctcccagccccttccccggcgatgcccatcacactgtgacctcccatccctgaagggcacctgcctgagggcctggcctccttccagcttcatggacctggagatgtgccctttcatccttcctgcttcccaggccagtagatccgtttacacttttgggtcgacagtcagcttttccttttggttttggcgggtcccagaggcatgggtgtccagtccaatgtggggagccacgtgacaacgtgggggactgggacatgggactgggaagtcagcagacgctgggatagagagggccctgaacaccaggctcaggggcttgcttggtccttatcctgtaggaggtgggaccacctttccctgaactttctctacaacccttgggagcgtggggaggaggcggctggttccagggtcagtttactaagttagagatttggaaaacctgtgtcagctgtaactcctaggatattttatgtggaacctaacatgcagatgaaagctggctgtcccctgtcctcttcctggctcctgtgggttcgggtgcctgtttttttttttttttttttttttttttttttttgagatggagtctagttctgtcacccaggctggagtgcagtggcgagatctcggctcactgcaacctccgcctcccaggttcaagcaattccctgcctcagcctctggagtagctgggattacaggtgcctgcttttagtagagacggggcttcaccatcttggccaggctggtcttgaactcctgaccgacctcgtgatccacctgccccggcctcccaaaatgttgggattataggtgtgggatgacaggtgtgagccaccgcgcccggcccgcgtgcctgtcgttttcagcctgtcagtcagtcctgcaagtgggggcatggtcagatgatgggcgagtcggagggggtgggtggtgtgactgggcatgttccacgctcactatggggtggtcgattggtctgcattcccccgcccgcctccccgcaaacaccagcgtccaacagaggcagagtcccaggctctgttcttgctaatgagagacctgtgggggcgacttgccaggtgtccccttgaactctttcctggctcctgggtgccctcaacgtcgttggaggcctgcagtctgccccatggcccccgcagggctgagcaggcctgttgccagcccaaccccgtgcctggtctgtgaggggcagagcatgagctggcttagagccctgagtgggcaccggcttgggagggtgcggggagttgactccttccctaactgctctgcgcctggcccctgcctctacaggagcaggtggtgaggatggctccgggcccgtgtggggcctccccgacccaaaagcttcaaggacacggggatgccagcctcttccccaagatgattttattgaatgcacacaaagttcatccttgggtttgcaaaaagtcccacaagtgaagaggcagcagtgctcatgtgaacatggagcgctcaccccagcccctcagcacagccagggggccttggggtacacaccctccttccctggggccgccagcacctcctctgccctatcccggatggggcctgggggtctgcccagggtgcgaaactggaatctatgctgaaacacctaagtgcccaggaggtgcccccatggcccaggagtgacacggctcccccagcagccagagcccattcctgagccagacaggtcacggttgacccaggaagagccatgtgccaggatggccgccaagcctcactgagcatgtgcagcagtggcagcctctcagacatagagggggctccctgggtgacatctccagagacccccttgtcccccagacacccctgggtagactgtgtctgacccttcacaaataggaaatgagagctcgggtcgaaatgctcacaatttcctgcgtgtctcagatggttgttttcttaaatggtcgggccatactttaacttggtttatggaaatgaatccatttcaagattcatcaaatcaataaggtaaaaaggaaaaagaaagataataaacattcaatctaactttggtgacgttggcctcaggaatttctgtgctggcctggagctctgggcaggtggggagggactggcttctagccctcctcctgcttccccgaggcagagaccaagtttgtcctttctacctggccctggagaaggggctcagggccactgcctcgttccaacccaggaaggccagctgccttccacatcagtctgaggcattcagcttgacctttttgggttgaaatctgggttgcagcttctcagctttgcccacaaagctccagatgacaagaggctgagccccagctttgacagtgaggggagtacctggaggtatcagcgtgccagagctggatgagggctgggggctcctcccaaaatactcagatgggggtttccattttccttctataaatcaaagttgctggtgctcgcagcccccgtgcagggtggctggggctgtgtatcacaaggcagcccaagaccccctggtccccagatcctcccaggtcagaatcaactgaagttttggggtgaagacacaggaaagaacgtgtgtgtatattgctagaaacagtctggaagtgccccaccaggtaaatcctccagcccaggaggagtcctaacttcaaccccaagctacctgtgtctcgtgcagatgagctcaaactggagggtaaccctgtcacctgtgtccgaggaggtgggcgtgcagggcctggctgtggaggagacaggagagctgggctcggaggggaggccttcggagcctcttgggacacttccgggggaaggtgggtaggactcggtctggagcaatatcattggcccagctgacctctttagtgcaaaacccaatcaagggtgccgaggagaggcaaccgcggggtgggatgggcactcaggaactgggttgattcccaggctggaactggtgccattccccagggccagacatcagagatgggcagtgtggaggggaggagggggcagcagagaggggtcccatcccttcccaccagcagaacctgggcagagagagagtggcgggggagcctcggaaccgcagcagtggacggaccctcgggcctcggtgcatcccccaccctcagggcccggctcactcgaaggtctcccactgcttcctgagctgctccaccgagtctggggccggggccagggccggactcgggctcacgtcttgcttggttttctgtaacaaatcctcaaaggggtctctggcctgttgaggagcagagggctgcagtgttggctccaggccttgagggggcctgggaggcagaagcggggggtctccaggcctcagggccagcccctgcttggtctcagcagccctggcacttgagcgggccaggggcaacgttcggatcctcgacggggcaactgctgggggacccagcggctgtagggggctcgtgtgggtgcccatgggcatctggccaaagaggttgggcatggagagggcggagaggttgggctgagacctgtgaggggcacagaagccagcactggacagcaggaggccggacgcaaaagccggccccagggaagctggaggggccccgaaaggcccggctggtgtggagaccaggggcagggtgggtggggctgctggcatggatgggacaaaggggttgagtggtggctgtgggaatggggtgggtgtccctgcaggggggaagctgaattggggggtgaatggggtggctacattcggggtggcggggcgtgacgggagggtgctgcctgaccaggctgtgctgagcgggtccaggagggcgagcagggcgtcactgctcgtgcctgcagccccggggccagggctgagcggctggagcagttcagtggggccttgggggacaacaccaggcaggagccctggactcagggcagctcgcctgtcccgatccgtctgcagccgctctgagacgtcaccaagtgcggcgccggcagcctggagcttggccgggcggggaatgggcggtggaggcacgatgcccagctctggggtcttcctgccttggggccgggggatggtgatgctgcccagagtaggggtgggcacctcctccttgtcactggggttcaggatgctgtcccggttctggggccttcgaggcagggccagggagttcccgagcagggccgagggcttctcaggggaggcagctgggggcttgctggggatggccatgtcgtcctggcccaggctccagagcttgttgtacgggtgggtaagcttcaaggccactgtcaccccgcggctcctctcactcccgcccagatccagcctctgttgggagggaaggagggcggcagtgaccacgggctgagttgggacatatgtgtgcccattcccacaccacttctgtgtgctgaatgtgtgctgggcctagttgtgtggctgatcagctcctcggacttggaacagctgagggctcccccaggttaccagcagaggacccacgtgtgctgggactccaagcctgtgctccgggaactcaagacaaagctctcgtccctttatgccagtggcggttgccaaggagttttaggaaagtgactccagctaccggctggccctttttactttttagatcgcaggcacccgcaatcacctgtaagcccgggggcgcgagtgagactcagggcctggtaggaggcaccttggctggggaggaaggaggaggccaagttggagtcctggctctgccacttgcaagccacacggcccgggtgccagtccctttctcctggcccaggtcctcgttcccagcagggaacactcatgaatgactggagctctgtgaaccccacggtgtgacccagtgatgcaaagtcagaagaccccacttgcaagtgaggaaactgaggcaccgagcggggatgtgatggattagacgtcacagtgggaattacacactgatttgcattcataatgcagagccaagaacttgcatccacaggctctgccaaggagccctggcagggatggacgcaatcccggttccagcaggggctgcagccctgcctgggggtgcgaggagagtggctggcagcacccgcccccccgtctgatgcacacacagagtggggcaagtttccatcgggctctagcatcttctcctaccgtcactgttagggtggtgtgggccccggcaccctgggaggtgtttacagtcacactgaccctgagcattggctgagggtcttggaaagtcactgtttctcccttagtctcttccactgtcacatggggatcccacctcgtgtgcggacagtgccggcccccggcagataccctcccttgcccatgccatacctgatagtcaaaggtccctggctgctccctcaggtctttgggggcacgaaggtcctctaagctcttggcctggcccagtggctgcagtgcggcctccatgtccaggttgctgaagacgtcttccagaaggtcgatgctggcagcccggtcagggggagctgggacagggcctgtggacttccgcacttgctgctctggactctctgcctcgtcgccttccgcgctgtctgactccctgagtgtccgatacggctgcggcctgtgggggacagagcaggctgcactctcccacccaggccttcaggggaggagcaagcggactccagcccaagcacattgagggcttgaggggtgcacgcaggggcctgcgggacaggagagtgtcccggggtctccgtgagggcaggagtctgggaggctgcgagggtgcaagctgggcatgccgatgggcctggggctgtgaaccagggcaactcgctttggctctcacttgcactcaggggacccatttagtgccccccaaactacaggtcctttcataaaactggctactgggcttgtgagccattcagacaaggtgtgaggaacagacaggactggaagggggctcacaggccagcagtcatgctcctcttgctcccgccctgctctgctgtttgtttggtggcctaggcacagccacagtcaggttctgtgaacagcccatggggaactgggctggggaagctctccaggggagctgtctgggcctaagcttgccctgctaaccttggttccacctctggtcatgctatttcttgctgtgggacctttggcaggtcacttaactctctgagcctcaggtgctcaggtggtggtggtggttacatgagcaaatgcggtgcccggcacacagcagacacgcacgggttggttacagcatccatcgcccaccagtgagcacggctgtcacacaggctcttctgctagcagctttctgtacttttacacattcaaaaccttgcagtcattggctgggcacggtggctcacgcctgtaatcccagcactttgggaggccgaggcgggcggatcacttgagttcaggagttcgagacca

SEQ ID NO: 5767 - DNA, 38753 bp, Homo sapiens
ctagaaaaaagaaatgccagcaaaccccaaggccgaattgtggggggcaaggtgtgccccaaaggggagtgtccatggcaggtaaggcttcccctggcttcaggattccaagccctgagggtcttgaagccttttgaatgtgaacaacagctctggaagggaaaatgggcaggtcagccccaagcccaccaggctccaagtcagcacacctagcacctccagctcgcggcacccccatgcttttagtggggcaaggaaggagaaaagaaaacgacactcactgagggtctaccctgtgcagagaaccctgcgagatgccccatccgagttgtcacgtcgtcctcacggttactctttgaggtgggatctttgcctgatctttgcaaaatcaggagcattggatcaaagctatgtgaagatcctgtgaggtgaacagtgaaatctcacagcgacatttgtattcttgggccgtgcccaagagcacgtctcggctagagaggggcacagcctcccagagccaggtctgagcagctttgcctgggagggatctgcaaagaccccaggatttcagaaagaaattgtgcaatgccagaggttccttggcatgcccgggagggcgagtcatcagagaaacaatgacagcaatgtgacttccacacctcctgtccccccgcccaggtcctgttgttggtgaatggagctcagttgtgtggggggaccctgatcaacaccatctgggtggtctccgcggcccactgtttcgacaaaatcaagaactggaggaacctgatcgcggtgctgggtgggtaccactctcccctgtccgaccgcggtgctgggtgggtgccactcttccctgtccgaccgcggtgctgggtgggtgccactctcccctgtccgaccgcggtgctgggtgggtgccactctcccctgtccgaccgcggtgctgggtgggtgccactctccgctgtccgaccgcggtgctgggtgggtaccactctcccctgtctgaccgcagctctcaagtgtctcaggggctgtggctctgggcttcgtgctgtcacttccacagacagacagacatccccaaaaggggagcaaccatgctgggcacgactgctgtggccaccgtgctctcagccactttcccatgcccaaataaaacgataaaagactgggggcttctgcccatcctgcctcacttgaccaagagcccagaagaggatgcgacacccagggcctcatgggaccaccggctggcaggggttctgctcactgggtttatgggtgagacgagcactcccaggagggccactgggccgggaagaactgtggagaatcggggcacgccctgtcctcccagctgccagggcacagcatcccttccccacctcaacacccagaccccagattcaccccagttcacttgtccccacacgagccacaggctgccacctggggcaggctggccccaccttggggttagatgcaggtccccttgccccagaaggagactgcagcccctgcagacctagaaatggccacagcccatccccatgcaccagggggtgaggtggcaggtggtggaaagggcctgaggggggcttcttccttccaggcgagcacgacctcagcgagcacgacggggatgagcagagccggcgggtggcgcaggtcatcatccccagcacgtacgtcccgggcaccaccaaccacgacatcgcgctgctccgcctgcaccagcccgtggtcctcactgaccatgtggtgcccctctgcctgcccgaacggacgttctctgagaggacgctggccttcgtgcgcttctcattggtcagcggctggggccagctgctggaccgtggcgccacggccctggagctcatggtcctcaacgtgccccggctgatgacccaggactgcctgcagcagtcacggaaggtgggagactccccaaatatcacggagtacatgttctgtgccggctactcggatggcagcaaggactcctgcaagggggacagtggaggcccacatgccacccactaccggggcacgtggtacctgacgggcatcgtcagctggggccagggctgcgcaaccgtgggccactttggggtgtacaccagggtctcccagtacatcgagtggctgcaaaagctcatgcgctcagagccacgcccaggagtcctcctgcgagccccatttccctagcccagcagccctggcctgtggagagaaagccaaggctgcgtcgaactgtcctggcaccaaatcccatatattcttctgcagttaatggggtagaggagggcatgggagggagggagaggtggggagggagacagagacagaaacagagagagacagagacagagagagactgagggagagactctgaggacatggagagagactcaaagagactccaagattcaaagagactaatagagacacagagatggaatagaaaagatgagaggcagaggcagacaggcgctggacagaggggcaggggagtgccaaggttgtcctggaggcagacagcccagctgagcctccttacctcccttcagccaagcccacctgcacgtgatctgctggcctcaggctgctgctctgccttcattgctggagacagtagaggcatgaacacacatggatgcacacacacacacgccaatgcacacacacagagatatgcacacacacggatgcacacacagatggtcacacagagatacgcaaacacaccgatgcacacgcacatagagatatgcacacacagatgcacacacagatatacacatggatgcacgcacatgccaatgcacgcacacatcagtgcacacggatgcacagagatatgcacacaccgatgtgcgcacacacagatatgcacacacatggatgagcacacacacaccaatgcgcacacacaccgatgtacacacacagatgcacacacagatgcacacacaccgatgctgactccatgtgtgctgtcctctgaaggcggttgtttagctctcacttttctggttcttatccattatcatcttcacttcagacaattcagaagcatcaccatgcatggtggcgaatgcccccaaactctcccccaaatgtatttctcccttcgctgggtgccgggctgcacagactattccccacctgcttcccagcttcacaataaacggctgcgtctcctccgcacacctgtggtgcctgccacccactgggttgcccatgattcatttttggagcccccggtgctcatcctctgagatgctcttttctttcacaattttcaacatcactgaaatgaaccctcacatggaagctattttttaaaaacaaaagctgtttgatagatgtttgaggctgtagctcccaggatcctgtggaattggatgttctctccctgccacagcccttgtcaatgatatttcacagagaccctgggagcacctgctcaagagtcagggacacacgcatcactaaatgcaagttcccaggccctggctgcagtgggaggacctggcaagctgcactcttgctgagtccccagggtggtggaagaagaatgagaaacacatgaacagagaaatggggaggtgacaaacagtgcccccactcagactccggcaagcacggctcagagagtggactcgatgccatccctgcagggccgtcctgggcaccactggcactcacagcagcaaggtgggcaccattggcactcacagcagcaaggcaggcaccagcaacccacctcgggggcactcaggcatcatctacttcagagcagacagggtctatgaactacagccgtgggctgcttccaaggcaccctgctcttgtaaataaagttttatgggaacacacccatattagtgtccatggagtggccgtggcagagacgtccagccggacagaccagctgacccgccaagcccagcatggttagtgtcaggacctctgctgaagatgcttgctgaccctggccagaccccggttcctaatgccccctaaacgggacgggagccagtggcgggccctgatccaggtcagagctggctctgctttctcttttgtccgagtgaccatgcctcagtttcctcatctgtaaaacaggagcccaccgtgatgcttatggtgggatgagatcagcatggatggaacaaggccctggaagggcccatgccatggtcatcgacagcaaagccactctgcagacagatgcttcagtgaattggtagaaaattctgcaaccagaatgcccggggctcctgagggcctaagcccagcccagggttctggaagccgctctgacttcttgggagtggaagttggcaggactcttcctgggaagaagcggagggtggggatgagaggacagttcaggagcccacccagacccacaggaggaaactaggggagtcatgcggggtcctggtggagcgccagcctcccttcctgccaatgggaaatgcaggcgcccacctcatggtgctgccggaggagggggcccgggactccccagaggcttcgctgaagggcctgggcgcccccaaaggctacatgtttcatatgggacgtgccacctgccacggctcagctccagctttctgtgagtggcgagatagaatacggggaggccactggccatgggcctgggacagggtgggatgaggcggcaggcttgggccaccaaagccagcatcgccacccagcattgatgacaaagactgcgtgtctgccatgagcatcctgctgttggtgcacacaccgcattggtctctccatacaaacatgcctagaggcgatgtcagagggtggagaccaggagaggcaggagtcagacatctggtgccaccaggaaggcccttctcagaggaccaggctgtgcgtggtgcccgccgtgggaggccagcctggcgttggcatccagcatcatcagtttgtgcagttgggtggggctcagtgagtgcctcctgtgtgccaggcacaatgacgcacaatgtgtgcacaccaggctcatgtgcaggtggctgcgagacagggcgacccatcaaggcagatgcaccatgaggcagtggccagtgctgtgggtgttaggggcattgctccccggccactacggcatagcaggcagtgatcgccacactggccaagctttagaccatttattccagagaccccagaggcaaaaagcccggctgcacctcccagtgactcccacagccattgagcagagacgctcaggaccttgtgatgggaggtttctgcactggagaacgagcccagaagccctctcagcctcggaacagtgtggccagtggtgggcaggtcaggaggggcttcagacacagcctgtccctccagatggtcacgggaaggtcactccccacagaagtacgttttggggccatgcgggcacagaaggtttgggggtgggtggggcaggtgccagcctggcctgtgggaggccatggtgcagatgccaagcccccccgtgacatgagaccacctgataccacccagagagtggctgtgagcggaagggcccgcccagaaacaagcagggccttggggcagaagtcctgggctcagatcccacgctcactgccagcggcctcggctcaggcttctgcgctctctaaacttagttttctcttctggaaaaatgatggggaaaatgatatttgtatgtgattgtgaggactgagagttaaatgtaaacatctggaaactacaaaatgagcacgaaatgatgtttttattcttagaacagaaagtccccacacccgcggccctggtgactgatgaggatgaggttccgaggggcctctctggccgcccagctctgcctggggaaggtggggccagagtggatgtgttcccagcgtggtcactcccctgcctcgccagcaggtctcggctccaatcaggaggcctaagccaagtgataagcagccagacaacagccatcccagctgrggcgtggactttgctccagcagcctgtcccagtgaggacagggacacagtactcggccacaccatggggcgcccactgcacmtcgtcctgctcagtgcctccctggctggcctcctgctgctyggggaaagtcgtaagtgcccctcgcccttcagacccaaaagcagcgccagggagcagggaggggcggcagttggggaaaccctctcatctctgcagcctggacggtgggtgccttgagtgctgccagaggctgggctcggatggctgggcttggcctttccagccaacggcatcctcaaggccagctgtggctccctggggctgagagtcagacgggcggatcagaggtcacagagacaaaaacacaaggacagagtcagagagagaaagggagagggarggagaaacggagacacagtgagatgggaggccaagaggcagagacagaggtagaaagacggagacagagagagagggaggggttggggcaggcagagacaggacagttagccatctgccaccacagggaggcacaggacgaggggcacagcagaggagctcccagggaggaggaggctgagccgagccagtgccaccactctcggactggctccgtcggggaaggagctgcctaatgcacagctggacaggtgggggcagcagggctgtccaggacccccgggtctgtccaaaagcagaggcccagacaggacagaagccaggcmagcctggggacagcggaggaagaggaggcccctctggtggggacacgagagacagggaccctagacttgtttgcatcctggacaaagtggacaggcaggggcaccaaggggacccaggcctgggaagggaatgtgtgagggagagacggagcagggggagaccctcgtggggtggaaaggggagacccctgggaaggctgagtggatcctcagtgcatcactgacctaaacggcccctccgcctggtgacttggagctccagtcacatcacacgggggtcttctccatcccaccctcaaccccctgccctccccagcctctgtcccctgagccacatcttcctgtctcccacgcggaacgggactcccgtcttcatggggtactgtgtggctccaactcgcccagccttcttcctccccctcaggccacactgccccctgcaggagcccactgtgatgcttgtggtgggatgagatcagcgtgggtggaacaaggccctggaaggacccatgccatcatcatcgacagcaaagctactctgcaaacagacagatgcttccgcgaattggtagaaaattctgcagccrgaatgctctaggatcctgaggccctaagcccggcccggggctcccgaggccctaagcccggcccgggactctggaagctgctctggcttattgggaatggaagttggcaggactcctcttcctgggaagaagcagagggtggggatgagaagacaggccaggagcccacccagacccacaggaggaaactaggggagttatgcagagtcctggtggagcgccagcttcccttcctgccaatgggaaatgcaggcgcccacctcgcggacctctgggtccacagggtattggcacccttagctgtgtgatgcgggcctggctcataaccatggcctgtggtgtccccgggggccggcctggaccctgggtggacatggccagccccggagagccagggccaggccatctctctcccctactctgcctcagaggcctcggcagctgcactgtggggtgggtggggctgaacacaggtcccagaaggtcccactcaggaccctgctgtgcacacttttgattttaataaaatcagaatgcgcacagcatctgcagtctagcctttaaacgagcacagctgtcctggcagtcacggaagttcttctggggcggtgggacctcagcattcctttgctggtactgctacaagaaaggacaatggaccaagtagcttaaagcaacagaaacatttctcccacagctctggaggctggaagttcaaaatcaaggcgtcagcggggctggttcctccagaggctgggagagagtctgctctaggcctgtttcctggcctcggggtgccagcggcctcacagcccrtggcttgtgggagcattgctcccatcgctgcctccatcatcgcatggggttctcaccatggctgtttttctgtcttcttttctctcagaaggacaccagtcattggatttagggctcactctactcccataaaatgtcttcctaactaaatacatcacaaaagttctatttccaattaaggtcaggttctgaggttctgggaaagacatgaatttggagggacattattcagccctgtcctgccacctgtgagtgttttctgcaatccaactttttattttaataaaatcagaatacgcagagcacctgcagtgccagcctttaaactactgctgttgtactggcaatcattaaagctacgtggcttcagtttcaatctttacattcaacaagtttaaacccattcttcatgagtttggaccttactgactgaaaattttgcttgctggtaaaacttgctcaaatgcagttgctgactgtggaattcactgatgttgccaaaacaacaaacacaactgtgtgctcgaggattgcaatgctcccaacagcttctgaagaaacaaaccacacgacaaatgtctaccaatctggatgctccatatcagagttctagagtgttccattaatttcttgagacaagtgcctaaaaaccttgttttaatttcgttttgccaaaatcccattttactcacatcagaaagtgtggccacgtggcccagacccggcctgctcagtctgactgaagcgttgatgcgactcagccataacagatagcagaagcgcccagattcagtccagagggcygagccaggcacgccatctttccttcattccctcaacacatattggttaagttccggccgtgctaggcacgggcatacagctgtgaccaaacacgtcaagtctttttccagcggagggaaggataagcctgtcagcatgtaatgtcagagaggggttgggtgctagaagacaaatagcacagtgtaaggggatgaaagagacacgagtgggggcaacgtcagagggcgtggtcagggagggtgtctcggagggcgctgggcctgagccacttgggtatctgtggaaagaatgttccagacagggaggtgactggtgcaaaagtcctggggtgtgagtgttgggctcagccagggtcagcgcagagcccagtgtggcagagagaggtgaatgagggcagagttgaaggtggtgaggcctgggaggcctggccatgggaagaccctgggctctgttctaagaccactagaggcagattctgggtagtccttgacttccttgcatcaccctttccaccccgtgcctgccacctgtaccctcttcctcacacagtccagctcaaccttataggccgtgtcctacccccatgagctggggagagctgagcaggcttcagggagatgggaaaaggcgggaactggacaggggctgcaaaggaaaggtgacttcttactggtcaatcagcctggggatgctcgggggtggatgccaaggggaacagagctgtggccgctatcacagaacagcgagttcctctaagaggtcagaggaggcgcaagggatcgaccagagacagtgagggcgtcaggctccagttgagtggggaccaatccttgtggcaagtctgtgaaccatcactgtggctctagggyagcagagaaaaaagcaggcatatgtccatctggccacaaggaaggagaccaaggggaagagagaaggtaccaagagaggtgttcacatggaggtgcgtcagaacaccgagggcaaggcagaacgcggtcttcagaccccaactggagcccaggaggcccgcgagtcccagtttgggaaacactaagccaggcttggataacttgtctgaggctgtggtcatcccaacatgwgagccagaggccccaagggagatgggcattccccacccctcagcttcctcagtgccttttgtggagtggaggtgacatgaggctgcaggttgcagggagccacgtgtgggctgcatttcagagcaagtgtgtgggagtggagcagacacgcagagtaatggggcagggtcaagaaataataaatctaagtctagcgttggtgggataatgtcggtgtcactaaaagaaatggggaatttggaaggtaaagtaactggaggtaggaatgaacccaagatttactaagcaccttctgtataccaaactcaacactaggagtttatacaatctttaaaacagctctaagagtagayattataattcccttctgccaataataaataataagtgactaaggtgtttttgaagctcaagattgcttgattctgcagtcttgttttaaattttggacatrgagagtttggagttctgagatgagggaaggcatctgtcatagtgagagagctgaaaacatggagctcaggacaaaagtcagtgctagagagatcagttggaagagttatctttattgtagtgagacattgaatttttcagtggaaaaaaagcacagaaaaagactacagagggccaagaaaagaaactgaggctgtcaaaatgaaaagaggaggaggagtgggtgagagacaaaggagacacaggcagagagatgtggacagcacagcccacagacacacactctacaagggacacagactctcggatccagggcattttaaccagcagatcaagactcatttgccmgtcatgaaatcaactcagtatttttttttaaaagagtagaatcaaatagaaaactttgtactaagtactgtattttaggaaatactaataaatactatttcttgaaagttggcatgtatgtgtgtcctggcacttcataaattgtactattatagtttgtaattgaaacagcatcaccaatccccacataacaaagagcagagaccttaaagacgagtggggccaggctgaaggggcacagcttgagccaaagcacagaacagtgggctgaaagcaccctagggagggagaattcaaggaagggggcttgggtggccaggctgagccagcgtgagcatgtgaggaggctggtgagctgattgggtgggatgtgtctacttctccagagaagggtgcatgggtctagagcaggtgcctcatgctgtacctcatagagaactggggggaggggggaaatgggcatttccctccacagcccccaaagtgcctgaggaaagtgttgataaagaagccaaactctgtaaaatatttgaagagatttattctgagccaaatgtgaggaccacgacccatgacacagccttggaaggtcctgagaacatgtgtccaaggtagttgggtcacagcttgattttatgtattttagggggacagaagttacatacagacaccaatcaataagcataagttgtacactggttcgttccagaaaaggggaaggtgggggcttccaggtcataggtggcttcaaagatattctgattggcaatcagttgaaagagttattatctaaagacctggaataaatggaaaggagtatctgggttaagataagaggttgtggagaccaaggttcttgttatgtagatgaagactcataggtggccacccttagagggaatagatggcaactgtttcctcttcagacctttaaaaggtgctacacacatggccaggcgccttggctcatcctgtaatcccagcactttgggaggctgaggcaggtggatcacttaaggtcaggagttcaagaccagcctggccaacatggtgaaactccatctctactaaaaatacaaaaattagccgggtgtggtggtgcttgcctgtagtttcagctactcgggaggctgagacagtagaatctcctcctgaggcaggacaatggcttgaacctgggaggcagatgttgcagtgagctgagattgtgccattgcactccagcctggatgacagagcaaaacaccatcttaaagagaaaaaaaaaaaaaaaaaaaaaaaaaggtgctagactctcagctcagaaaaagacctggaatggtaagggggttctctacagaatgtggatttccctgagatagctttgcagggccatttcaaaatatgtcaaacaaatacaatttggagtaaaatcatttattttagggcctgctatatgtcatgtgatcctatactagagaagtcaggttggaaactggtatcttattgctacaaagactctgtttggtcagcctcaaggtctcttaacgtgaatgctggtcagctgtgcccgaattccaaaggaagaaataatgaggcgtgtgggacctgcttcccctcatggcctcaactagtctttcaggttcctatggaattcccttggcagagaggacgggtccactcagtgagttgggggcttagaattttatttttggtttacaagagagtgatccgccttttgtgatctggatatggcaagggacatggcagtcagggagcataggtgagggggagcctgggtgagggtgaccagagcttttaaccctgtcctccctgccttccagtgttcatcygcagggagcasgccaacaacatcctggcgagggtcaygasggccaattcctttcttgaagrgatgaagaaaggacacctcrraagagagtgcatggaagagacctgctcatacgaagaggcccgcgaggtctttgaggacagcgacaagacggtaagggctggggatagcctggctgttggtaaggagctcaggccacagcgccctcgctggcccygctgctccgyccatccaggggggcrgcctggaggaaggggcagcgtgcgcgaaggctttcaggggcggggcccagcaaatcgaggcctcggcggagtcctgcccacagggacatcagtgccgcccccgcgctgactccttcccggcgaggactcagcggggagggatgcgcccaagtcccttgagggtcacagggcttctgccagagttaagttctatttaaaaataaaakgttaacctaaaaaccaatagtcatggtctcggccagcgcctcgccgagttgcagtgagctgagatcgtgccctcccacgcccgcagcccgcgtcctgccttggcctccgtagtcgctgagagccacagcctagagcgccagcgcgcaggcgcacaactgacgccaggccacgaacccagtactgckcctgcacagcagaagcactagcactgaggccgggcsgcgaacccggcactgcgcctgcgcagcaaaaggacacgcactgaggccaggccgcgaacccagcacggtgcctgcgcagcaggaagaccggcatccmcaccggacgacgaacccagcatcgcgcctgcgcagtaggaggagagcratgccaccaggccgcgattgcgcagccgcagcagccccgcgcggaagacgctaccytcctctcccccgaagaggcggggcttcgaacgaacctggaaatggccgaggggtctcgacttcctcaccccaggcrtcaggaaaggtgcctgcaggacagggctctgaagtggaagtgggcggtggtgatgccgaactgacaagaatgagctgaagagaagaaagtagccgagaagggggccaagccggagctcagtgagcaacagctaggccagccgcggctggtgccatcagccacaccactaactgtggacccaaatggaaactttgaggccccttacaggtcccccagcgcaggccaccgccgaaggttactggggaagacccctgcagcttccatgtggacattactckcttgcttcatcccggagtgcagtcacctgcagcctgggaccacctgactgatgtcaccctggagatccatgccaaaagagctggggaaagttcaccttctaatgacccctgcggaccagggtgaagttacaagttatggccaggtcaaggaattataagtcaataaataaactgcctcagggagacgtactcagagtccaggaaaatctaggaaacaccaagaagggcgagcgcagcatcagcccctgcaaaattgcactgctgcctcctggctcacatgttgccccatccttactttagcctcaaaggcaaggagacccaatattatttgagtacttggatttgatcctgagtgactttctgagaaagcagtgtatcatctgccctaagatcaccacatatatgacaaggtttttggatgagttgagatttctagacattgaaaccctcatgatgaacgtcatcccgggtagcaggggctaagcctttcatcacctgctacaacaagctggacattaacttgtatttgagaattgctccaggactctaccttcagatgctggttagtagcattgactggatttatgaaattggatgccagttaaggaataagagaatgtatttgatttgccaccctatatggtctgtgcagactgtcatgatctcattgaaatccaagaaaagattatgtcagggatgaagcacatcacaggtggttacaaggtcacccaccatccagatggctcagaaagccaaacctatgggttgacttctcctcacccttctggagaatcagtgtggtagaagagcttgaaaaagtgctgggtgtgacgctgccagaaactaacctctttggaactgaagaaactcaaaaaattattggtgatatctatgtaacaaaagcttttgaaagtcttctacctcagaacatattcaggcgccttgataaacttgtcaaggagttcctgaaagtgacttacatcagtcccacatttatctgttatcacctgcagataatgagctctttgaccaaatgatctctctaagagggtctcactgagcactttgagctatttgtcatgaagatagctgaatgtttccatgcagcaacagcagcagctgttgacaaacaagacaaggccagcaaagatgatgaggccacattcatagatgaaagcttccatgcaaccctggaatatgggcttccgcccacagctggttggagcgtgacaatcaaatgtgttaccatgtttctcacagactcccacaacatcaaggaaatatttctgactcctggcatgaaacttgaagaaagagaatgtagcagccactaatacaatggaaagcgcaacattgacacgtctatctagaaaattttaattgtctaagttgtgtgactcagatatctttgcatttctgcaaaagatcaaggtctactctaattcttaattaaattaagaattcctttttattacttgttagcaaataaatggcttgtctctaacagaaaaaatttagaattttcggaaatattttcaaatacttcttatatatacatatatttttttccactggtagaatttttctttagtaaaagtaaataatgctgatccaagtttatgtttcactcagcatcgtttctcaaacactcttctttacttatatatagctaccctatagctaagctatattttattgtatgatgcatttactcttttcagagtttggccatataagttatttctaaatattgctattaggaaaacacatatgcatgcatttcttctagattatcatctaagagtggcttctccagagagagacgactgaattaaaggttatcaacaagttccaattccagataagatgaagaaatcacattccacactgcctctcccactgagtgtagctccaaaacatggatagaatgcatgtagcagctatttgasgaccctaaaaagtaaatcgcagtgtattgcagaataagactacaattagatgtatgatatgatacaactggctgtgagtttatcattttttcctccagtcttccagacatcacttgacctgaatctaatggacatttataggattctcaacaatagcaaagtacactttccttccacatatggaaaattcctcaaggtagactatatcctgtgtcttaaagcatacctcaataaaaagattgaactcacataaagtatgttttctgaccataatggaattaaagtaaaaattactaacagaaaaataactggaaacttccctaagtactcggaaattaagtcacacatgtataaataatctgtgagtcaaagagaaaattttaaggggagtaagaaagtattttgagctgaacaaaaatgaatatgtaacataaaatctgtgggatgcagctaaaaaagcagtgtttcaagggaaatttatagcattaaatgctcacatgggaaaagaaagrcggtctcaaattgtttatgtaagcttccactttaataaactagaaaaaaagaaaaaaataaaccaaaaggaaattgaaaaagcagaaatcaaagaaatttaaaacaaaaataatagacaaaattaataagctgatgaaactcaaacaagactgacaggaataaaaacaaacaaacaaaaacaagaaaaaggacctatgttggaaatggaagagaggggacatcactacagaaactgtagatgttaaatgtataataagaaaatactttgaacaactctgcatatataaatttgcatgagatttgaacttggatgaaatgagcctattcttcaataccacaagccaccaaaacatacacaagrtgaaagagatacctgccaattcaattcttaatttaaaaccttctgaaaaagtaatgttcaggtacagatggtttcactggtagaattttaccaaacatttcaaaaagaacaccaattctatacaactcttccagaacatagaagagggaacacttcttagtttgtcttaggccagcattaccctgatgtcaaaaccagacaaatactgaaaacaaaaaccaccctacgtaacaatatctctcatgaatctagacataaaaatcctcaacaaaatattagcaaacggtgcagcaatatatttttaaaagagtaataatacaccatgaccaagtgagtttttctggggcacacatgactggctcaatatttaaaaataattatgtaatccaccatataaacaaaagagaacatccacataatcatgtcaattgatgcaacaaacaaatctggcaaaatttaacatccatttatgattttataaaaaacctatcagcagaatatgaataggagggaattttatgaacataataaagttcatctacaaagagtctacagttgatattatacttaaaggtgaaaactgaaggttttctccctgagactggaacaacacaagaatgtccattcccaacactcctaattcaacattatactggaagtcctagctctaaggaaggccttcagtaagtcaagaaaaagaaataaagttatcactatttgaagatgacatgatcatgcatatagaaaatcctaaagaatgtgaaggggaaaaaagcttgttttagtcccttctcacgctgctgtgaagaactacccgagactgggtaatttataaaggaaaaaaggtttaattgactcagttctacatgtctaaggagacctcagtaaacttacaatcatggcagaaaaggaagcaaacgtgctcttcttcacatggctgtaggagggagaagaatgagagccgagcaaaaggggaatcctcttaaaaaaaatcagatctcatgagaacatactcccacgagaacagcatggaggaaccaccctcacgattcagttacctcccacttggtccctctcactacacatggggattatgggaactacaattcaagatgagatttgggtggggacaaagccaaaccatatcaatgctcctaaaatttgcaaatgagtgtaacaaggtcacagaatacaaggtcagcacatgtgttaatcacatttttatgtaatagcaatgcacagttatttgtaagccaaaaatttttaaatgccatttacaattgcttcaaagaaaattatatacttatatgtaaagctaataaaacatatacaggatctttatcccaaaatctacaaaattccaatgaaagtatttaaacagacctaaataaatagagacacatacagtgttcatggattgaaagactcaacatattaagatatcaattttcggccgggcgcggtggctcatgcctgtaatcccagcactttgggagaccgaggtgggtggatcacctaaggtcgggagttcgagaccagcctggccaacatggtgaaaccccgtctctactaaaaaaatacaaaaattagctgggcgtggtggtgtgcgcctgtaatcccagctactcgggaggctgaggcaggagaatcacttgaacctgggaggtgaaggttgcagtgagccaagatcaagccattgcactccagcctgggcaacaagagcgaaactctgtctccaaaaaaaaaaaaacaaaagaaaagaaagaattgtctttttcaacaaattatattagtctcagtctgtttgtgcttctataacaaaatagatcagactgggtaaattataaacagaataaggttattgctcacagttatggaggctgggaagtcctccaagatcaagaaaccagcagatatggggcctgatgagggcctggtctctgcttccaagacggtgcctcatggctgtatcctcacctgacagaaggcagaagcacagaagggacaaacactgtgtgaagcctcttttataaggacattaatcctattcacaagggcagagccttcatggcctaatcacctcctaaagatctcacccttaatactattacattgtcgattaaattttaacatatgtatggggggcatgttgagaccatagcagtgttggaacaattatatatttatatgcaaaaaaatgaacctgacctaaacttcacaattatacaaaaattaacacaatatagataatagatccaaacataaaatacaaaactataaaacttttaggagaaaatacaacaaaatttatgacatggagctaggcaaaaattcttagacattgacaccaaaagaatgattaataaaagaaaaaagtcataaattggactttatcaaaattaaaaccttttgcacttcagaaataaacactgttaagaggatgaaaayacaagctacaaactaagagaaaatatttgcaaatcacatatccaacaaaggaatcatattcggaatatataaagaaatcttaacagatcagaagaagaaaataaacacycagttaaacaaaagaccttaacagccaactcgccaaagaggatatatggatagaaaataaacatgtgagaagatactcaacattattagctcttacagaaatgcagataaaaaccacaataagaacgactatatactcatagagtaaaaaacactgacacagaacagcgctggttaagacacggagaaagcagaactttgatacactgctcgtgggaatgcaaaatggcacggccactttgaaaaggaatttgacagtttcttataaagttatataaggttaccacaggactcggcaatcccatttctgggcatttaccctagagaaatgaaaacttatttccacataaaatcctgtacataaatgtctatagcaactctagtctttttttttttttttaatttttattttttgagacagagtcttcccgttgcccaggctggggtgcaatggcacaatctcggctcactacaacctcctcctctcaggttcaagtgattctcctgcctcagcctcccaagtagctgggattacaggtgtgtgccaccatggcaggctaattcttgtacttttagtagagatggggtttcaccatgttggccaggctggtctcgaactcctgacctcaagtgatccacccgcctcagcctcccaaagtgctgggattataggcgtgaggcaccacgcctggccagcaactctattcttaattgccaaaagctggaagtaagataaatgtcttttgctgggtgtacccatacaatataacagttgtcagcaacaacaagtaagaaagtattgatacaacttgcatgaatttcaaaggctttgtattgaatgaaaagctagtttcacaaggtcctataataaacactttcatttacatgacatgctcaataggttgttatcattgtgataaagaatagattagtggtgggacagggtttgccaagggttggcaggtgggggagatggcatggggtatttgggggggaaggatggacctgtactgcatcctgatgatgctggtggctacagaagtctctccatgtgttgaaattcatagaagtgtacaccaaaacattggttttgctgtgtgagaattttaaaagtaaaaaagtaagaagatagtgtatttgcttcctagggcaaccataacaaagcactacaaacgccttaaaataacagggatttattgtcgcagctttggagacaagtctgaaattagggtgtcagcagtgttggttccttctggaggctctgggagagtctctgtcccaggctctctgctcgcttccaggagcacccggcaatcatgggcatccttgggctgcggacgcgtcgctcctgtctctgctttcatcttcgcatggccttctctctctgtgcctctgtgtgactttttctgtctcttataaggactttctcctttatttagggcccacactgacccagcatgatctcwtctacagccttggcttagttaacatctgcaaagacccgatttccaattaaggttctattctgaggctgcaggtggacctgaattagcagggagggcactattcaaccaactgtagagagttaaaaaacaataagcctgtggacattttttagcgtaatctaggctcttgatgacctgttttaaactaatcagcaatgaatatttttcagctaacgtaatsactattgacaagcacgtgacccttgtctgaatgttaactcaggcatagcaactaaaaaccatccattgaccagctcgggagtagcaaacagagcaagccattcttggtgcaacctgtttctaggtaattaacttgaaaatattttcaatattcaacaaagatggttcatttaagatgactgaagccacatcttcacagatgcagaagatctgaatagctttcctctttagattgaatagttctagaacaattcattcctaaaagtgacttccattggggaaaatatcctattcagcttgagtcacttaattatggttgttattggtataaaatgtctctgttttccctaatatatttttaaatytcttttttccttttagaatgaattctggaataaatacaaaggtcagtattttttctgttttaaccttcagtgagaggggttcatcaggatatttgaattttgaaaatagttcctgaatttcctttctgcttttgttctmattttactcatttaagactttttccctcagggtgtttccataatagttattgtaaaagagtttttagagtaattttatactaatcctagttttgttattgagttagagatatatatttaaatcagttcattctcatttgaggataccaaattccatgataacttttcttaaataaaagtgtattcggtaaaagcaaaaaacagagtctgaaagattagattcccgactaaggtaaccaccttgatttaatgcttaatagcatctgaagtggcctcagtcatgactacctggtaacagtattcacatttctcaaaatgacaactgggcctatctctaaatgagattgtgtaaatcctccaagaaatgggaagccccgtgttagtgtttgccttctccttttgccccaggatgatttggaaagaggaaccctaacctcctctcccgtcaaggcccagcccagaaatgagcatcaggctctcacctttcctccatccttccagttggtccctgtggtcacctctgactgtaaacacactgcaaaacaccggcaaaaatcaaaaagctgggccggtgatccacctagataaaggcatcacgtacacatggccacaaaagggggtggatcaaataaagtccaaagagggggagttgtttacagagaaaccggaagactcttccagttatctgaacggcagggccaaggttagcacagcaaaactgtttccatgatgccggaaacagcttgcagactccagtttcgaaatcctctctttgcagatggcgaccagtgtgagaccagtccttgccagaaccagggcaaatgtaaagacggcctcggggmatacacctgcacctgtttagaaggattcgaagrcaaaaactrtgaattatgtaggttcctctgcttggtataccttcagatcagatgcccctgaagagtggcaggtgggcggggraagaagtgaaaacgcctaatgaaacaatcttaagtcatttctgatttacaaagtctgggctctattatacctattatactgtgccactatagcaatagaaaaaaaagccccaatatgtcccccaaacgattcggtttgggggcatgatgagagagacacagtcacttctctgctcctccgagagagactgtagaacattgatgaagcgtgtgatccattcatgtgtaaacaggagtggactctctgttttccttggggccaagtgcattgccctgttattcctgctccttgtgaccctgtgcagtgattctaaatcacctcttatttatgtgtatggatgcaggtgtcaatatttgtgaatatttgtgattggccaattataaaaatttgatacatttaattagttctacgtggaaaaatcactaagtgctttctctaatgtggtgattaagttttaaataaaaagttaggctactgttagatcaatttccctaaggaaaaagatttgcatttcttttaaagtacttaattgatcatctttttttttttttttttttgagatggagtctcgctctgtggcccaggctagagtgcagtggcacgatctcagctcaccgcaagctccgcctgccaggttcacgccattctcctgcctcagcctcccaagtagctgggactataggccccggccaccagtcccggctaattttttttttttttaattttttagtggagacggggtttcaccgtgttagccaggatggtctcgatctcctgacctggtgatccgcccgcttcgacctcccaaagtgctgggattacaggcgtgaggcacagcgccggcctaattgatcatctttagactgtgttcttagattggattacttttgagttttccctgatgagaatatcaattacgcatcattccattccaagtccgcagtcgcctccctggaacaccatttggtaacttatgaggcataaccctgttcaggctcccagggctattatgcacattttctaaaatttcaggcatgttgatctttgcactgtgattactttttcatcaaaagccacacagagggatgtggagtgaccgtaatgtgagtgctgctggggcagggggtaccggccatcccggaggtgtgaggggcaggtacctggagcctggcttctggctacaccgggcactgcaccatgagctccccgtgacccgtgaggttgcccttcaaggcaagtgtacctgtcgcctggctctggccctttgctcaacccaatggccgctttgtggctgacaggcaagtggatgtagctggcacccttgggccagcccagcctccatttctccagctgtccccagagccracgtgcctctcctttgcagtcacacggaagctctgcagcctggacaayggggactgtgaccagttctgccacraggaacagaactctgtggtgtrctcctrcgcccgcrggtacaccctggctgacaacggcaaggcctgcattcccacaggtaggaggcacgttgggccacagccacccgctgccgctgggccgggccagggaggacaagcccgtgccagggggtggggacacaggcatgttctgggcgggcctggcaggtaacagtgacaccaagaggacaggactgagccctgggctccgggcccaggtggttcaaacatgaagaccatgaggtttggaaacagacccattatttctgtaagccagatctgctgtttaacctcagcttccccatctgacaratgggaccaacactattgcctgactgcttgggtgatccctggagcactttgcaygatgcctggcccaccgcaggccctcagtctgcattgggactgtggggggatccagtgcaagggctcaaagcaccagggcaggcaaagggcagagctggcccgaggaactggagctaaggtgcggrgctgggataggagtcaggggacgctcaggctctgagctccttttaccaggaccagtgttcattgaacgtagtttttcttttccttgatgaatgtggacaacaggcggccagagggcagtgagcacaggacaggcaggggactgggcagggtggggacgagcctccctgtcctgaccccgtgggcattgcctacgctgggcttgcctggctgccggcacttccacacggccagcacacatgaggccctcgaaggcggggcctaggcgtcacagctgcaccttgcacagcaaccccactcccactcatagctggcccgacccgcagcgttggcctcacccgggggcatattcgaagggcagagttccaggcccgccttttcaagagcctggtgacccagctcaccttccggcttcaggtgcggctcagcccccagaccgtgttctgcccccggctaccatgactgtcccctccagacacaggttactcccgagtgttctgtcactcttcctttcatatccttcttaccgaaaacaatttacttccaaagatgagtgatcacgaaaagaccgggttccatatgcatccttcaagcgctgcttcaattatgtgcctgaaacatctcagcaagtgaaagacactgtggctgaccttgctactggcaatgacattcaagcttaagctggttaaaaaatattttaactgaagtcatttcttgacatacacacgaatattttttaattctagaaacaatcacaaatccatttaaaaccaagtgtgggccgggtgcagtagctcatgcctgtaatcccagcattttgggaggccaaggcgggcggatcatgaggtcaggagatcgagaccatcctggcyaacacagtgaaaccccgtctctagtaaaaataccaaaaaaaaaaaaattagctgggcgtggtggtgcacgcctgtagtcccagctgctcaggaggctgaggcaagagaatggcgtgaacctggaaggcggagcttgcactgagcactgagccgagattgcgccactgcgctccagcctgggcaacagaatgagactctgtctcaaaaaaaaaaaaaaaaaaaaaatcaaaaggcaaatgtgatgtgtgaaaataaaattacataatctactttgtagtgcaaaaagttcaggctgggcaaggtggctcacgcctgtaatcccagcactttgggaagccaaggtgggtggatcacctgaggtcaggagttcaagaccagcctggccaacatggtgaaaccctgtctctataaaaaaaaaatacaaaaacttagctgggcgtggtggcgcacgcctgtaatcccagctactcgggaggctgaggcaggagaatcgcctgaacccaggaggtggaggttgcaatgagccaagatcatgccattgcactccagcctgggagacaagagagaaactccatctcaaaaaaaaaaaaaagttcagttccaaataatggatgaactcagaacttggaagggtggtgactgcacacatggacagagctgaggcacggcggggtggargcccctgcggctggcagattcaccggagcctcctcagactgcgcaggagcacagcaagtaaacagctaagctgtgcccatctgaccccagacacgtgtggccacagagaagccccttgccatccattcccccctcctctcctctcctgctcccccacacccctgccttcctccaacatgtttcagccattctcttggccttggtgccctaattggccgttatacaaaaggaagcttcctaacatctcggcgtggcctctctgggagctgtgctattccagacgctctcctgtgcctccagttgtttgcgtgcgccattccttctgcctgaaaacttttttttcttcaatgtttcattaggaaaagttttccaacacacagcacactggaaagaattttgcagggagtcgcacacgcccagcacttgggttctcctgttggcatcctccggccagrtgcattcatcccatttcgcccggcccgtttgtctctgtccatccgtcaagctttcttgacttcttggtgcattttcaggcaaaccgcagacgccaacrctcccctcgctgcctgggttgctgcctggcgtccattgttcacaggcggtcacctgaggggaggccaacgctcggacagctgcgctcacctgcagatccgacccctgccgacgacgtggggcctcgccctgcaagcccgctgcccctccgggtgcccctgcgctctgcctcccggctctctgactcttctccctcagggtgagctgtgyaggctatggggagcctctctctgtgctgaaggccccggccgtcctctttctttcagggccctacccctgtgggaaacagaccctggaacgcaggaagaggtcagtggcccaggccaccagcagcagcrgggaggcccctgacagcatcacatggaagccatatgatgcagccgacctggaccccaccgagaaccccttcgacctgcttgacttcaaccagacgcagcctgagaggggcgacaacaacctcaccaggatcgtgggaggccaggaatgcaaggacrrggagtgtccctggcaggtaacagtaggatgtyccctcgggcctgctggagagaccacctgtcccgctgtgcacctcggggaggccagcctgacacttggaatagcaatccgggaaggaactgttccgaactaggacagaggggctccgccacccaagcctgcctgcctgtcccctccctccgggcagccaaggaggctgtgagctccacagggaagtggccggggctgagggagaggctgggcccaggcaacgcccccctcagccccttcccactgggcatttccatggctgcccgtggcatgcccaggacgatgctgtcctgtgaaacagaagagagggagaaggcgcagccacacgctcaagtgtcctcaaacctcccctacaccaggagacaaggctaaagccagrgagccacccacactgcaggggcatcagcgggcaggaggacggtgccgggtgggcaaggcctccatctgctcttctgtttgacgggaggcagaaagagttggtgtcctcgcttcatttctaattttggaatttttttacccaaacacctaaatcctatggaggtagatagtaccttagagaaaaacacatctacttattttcaaaggtaaaaaagaaaatcactctttgaggcttttttgttaagagacagtaccttgctctgttgcccaggctggagtgcagtgtcgcgatctcggctcactgcaacctccacctcctgggttcaagcgattctcatgcctcagactcccaagtagctggaattacgggcgcccgctacttacgcctggctaatttttttttttttttgagacggagtctcactctgtcgcccaggctggagtgcagtggcgcgatctcggctcactgcaacctccacctcccaggttcatgtcattctcctgcttcagcctcccgagtagctgggactacaggcgcctgccaccacgcccagctaattttttttgtatttttagtagagacrgggtttcaccgtgttagccaggatggtctccatctcctgacctggtgatctgcccacctcagcctcccaaagtgctgggattacaggcgtgagmcaatgtgcccggccatgcctggctaatttttttatttttaatagagacaggaatttcaccatgttggccaggctggtctcaaactccaggcctcatgtgatccaccctcctcagccacccaaagtgctggagttacaggtgtgagccactataccaggtcctaatctttgattgttgatttggactaatgctgccagattaaacaaataaaagcacaatactttcaattaaatttcaatttcacataaactagaaatacattaaacaaaagcacaatactttcaattaaatttcaatttcacataaactagaaatactttcagtgtaagtatgttccaagtatcgcatgaagcatacatatgcgaaaaattatttgctgtttatctgattcaagtcaaactaggtgtattagtcagttttcacactgctgacacatacatacccgagactgggtaatttataaagaaaaagaggttgaatgractcacagttccacgtggctggggaggcctcaccgtcacggtggaaggcgcaaggcacgtcttacatggcggcagcaagacagagaatgagagaacaagcaaaaggggtttccccttagaaaaccatcagctcttgtgagacttattcacttccaccagaacagcatggggaaaccgccctcacgattcagttacctcccaccaggtccctcccacaacacacgggaaatatgggagctacagtttgagatgagatttgggtggggacacagccaaaccttgttgctgggcatcctgtattttctctggcaatcctcacttggacttgaattttcagcgcccaaaaccagaatgtcctctcctacaagcaagaatctcagagctgccagcgcccccatgaattcccccaggtcttcccccaccccagaccgtgtggcgggtgagcctctgtctaactataaagagccaagcgagagagggatgcactgaggtggctctgcaatgcatgtttgttgagggccttctgtgtgtcaggcactgagccgggtgctgtgtaggtgggatatgaaaccatgaagcctctctgtgaccaatacacagaaatctcaacctagttagggagctgagaccgaaatcctcccagtcccaggcactgtgtggytggggcaagaacctcgatgcaggagaccccaccgaggatgagcaggaaaagcctcttgtggggctgaggagctggacttggagctgcaggcggggttttggaggggktcctgggctgggggaccagggtggggcgccctggagggctcactggaggggccctcgcccagcctgttgaggtttgcgattcttgtttcctggttcgagtcttggcaagtgggcctcatctgcatctttaggaagaatggttggtgttcgtgtcttagaaagcctgactttccctcatgtaagctggatgatgagttgacaaattatgcaaaaaagaggcaaaaacatgaccccttttctagccatgaatgttttaagaaatgttttaagactcggtattgtcagtagtttcattggtctgtacatgtgcccagccactatcacaggacgggaaactccccagagaaaagaaaaccaaaatatgcccgggctccaaacttgcaagtccagctccctagggacagcatgtggcacccctgtcagtgcttgctcccctgggaccgtgttccaagtcctggcrggtaggagacccttcacaggagctgccacagggacccccaggaagtcacctgggatggaggtgtccgtgcaccatgggggacaggctcacactgctgaaccgtcgggacaccaggcaggcacaccggttgaggcagatgatgtttctgcacagactggcgtctcctggtcccaggtagaaatcctgccacagagacgggaaaggctgctcccacagggagcatcttttccaaagcatggacagatgtgtcgtgtgcatgagactttagagagctctgtgatggagttggtagaaagaagagatgactccctatatcagtgagtgtgtggcacaggcagagaaaagagacagacaaggaactgtccttgggtggatggcaggagaccgaagaggacagcttggcatggggagggccrggcagtgccacctgaagagctggcttctcagtcaggcaacacctgtccacctggccagccacactgagcctgtcacgtctgtcacaggccctgctcatcaatgaggaaaacgagggtttctgtggtggaacyattctgagcgagttctacatcctaacggcagcccactgtctctaccaagccaagagattyaagrtgagggtasgtaagtgaccaacagcccccagggccgtggtgrggggcaccgtcactgtctgcttttcagaaaccactaaagctgatggaatttgttggsaacactggttgaaatcctgaaatcctatttgtaggggttaggggcatttcacagaggaagaagatgaggaagcagaggaaggggaagagtggggaggaggacggggaggggaggcgaaccagcccagcccttctcccactgrgtgtccaggtctcgggtctccgagtctctgggtcccgggtctctgggtctgcatgtccagctaatgttctgtgtctcagtgtcttttattgggagccttccagacctccctttctctttaacatactctgaacaccaagcacctctgtctcttctatttttatttgtgggattgtttcattaacatctgtctttgtccactagaccctagagctgctcagtacaaacccaacacaagctacaaatgcaagcaatatatgtaaactgatatttttctaacattaaatgttctattatacattttaaaatataaaaaaacaggctgggtgtggtggctcatgcctgtaatcccagcactttgggaggctgaggcgggcagatcacctgaggtcaggagtttgagatcagcctggccagcatggcgaaaccccatctctactaaaaaatacaaaaattagccgggcatggtggcacgggcctgtaatcccagctacttgggaagctgaggcaggagaaccacttgaacccgggaggtggaggttgcagtgagctgagattgtgccattgcactccagcccgggcaacagagcaaaactctgtctcaaaaaaaaaaaaaawatatatatatatatatatgtatatatatatgtgtatatatatatacatatatatacacacacacacacacaatttccataatatatcttatttaactcaacatattgaaaatattactttttccatgtgtaatcatgttaaaggtgtaataacacattccgcacattttctttcatgctaagtctctattttacgttcatggcacaactattttacactctcagccagcggccacaccgcacaacctgggtctgggatgccaaaagccttcggtcctgggacgcctcgttggtgcccacgactggcacagacgatgcacccgccaaaggacacaggagtggcggccgtctaaagaaccaaacgtgtgagacaggaccagtggttccctgggcagcaaggctgacaggcacttttatttgctgctttgcacttccctctatttttcaaattttcaaaagtgatcacgtgccatttttaatttaaaaaaatatatataacttccttaaaaagcaacggatgtgcgagagcatgtccctggctgagctgagcacagtcccactcgtctgtcccaggggaccggaacacggagcaggaggagggcggtgaggcggtgcacraggtggaggtggtcatcaagcacaaccggttcacaaaggagacctatgacttcracatcgccgtgctcyggctcaagacccccatcaccttccgcatgaacrtggcgcctgcctgcctcyccgagygtgactgggccragtccacgctgatgacgcagaagayggggattgtgagcrgcttcgggygcacccacgagaagggccggcagyccaccaggctcaagatgctggaggtgycctacgtggaccgcaacagctgcaagctgtccagcagcttcatcatcacccagaacatgttcygtgccrgctacgacaccaagcaggaggatgcctgccagggggacagcrgggrcccgcasgtcacccgcttcaaggayacctacttcgtgacaggcatcgtcagctggggagagggctgtrccsgtaaggggaastacgggatctacaccaaggtcaccgccttcctcaagyggatcgacaggtccatgaaaaccaggggcttgcccaaggccaagagccatgccccggaggtcataacgtcctctccattaaagtgagatcccactcaaggcctggtttgtctctcgattgccgccttgccctggcttctcccgccctgttgaggtgggaaggtgaagtgtctgtctggaacaccagcttccgcccttcccagctaggctggggattcctccagggaatattctagtctgtgggggcaggatggaggctccagggatgatactgtgccatgactgccatgggcattcctttccccagataccttcctgcatctgggtcacgcccagaggcagatgggagcctgtgcaggccccgtggcgtcgggaggggcccacacgttggsgcagcctccccaagaccccccacttggcctggtctctcttgttcctcttgggaattggacacctccccggtgactgcctatgacccgcagactccctgggagggaaacgtccagaaagcttctcattggggcggacattttacattaacttaaacaaccaggtgctcttcaactgcacggtgccaggccccaccccagctcaggcttgtgtggtgggggccacaggcatcccccgggcaggtgacctgctcaccaggcagcgacctgacctggcacagttggcccccaccgtggccacccttagaaccccctgtgggctttagcatgcctgcatccaggccacagcctggccactgaaatcagtctctggagtgaagctggccaggagcttctggaagcttctggagctcctcaggtgctgagtggtggtggcgtggcaggcggggcttcggggggctcctcctctcctagggtccagatgtttagtccttgccctgctgcaatccggcactgtccctaggcctcaagttaactggccatgaaaatcaaatgaactttcggtaaacagaaaagattccggacaaggcctgccgtgtgtctcccaaacgtctcctgcagtttgcgtcttgtgtaatgtccctaagcaaagttcaacagttctagtacaaaaactccccaaaaaagtcatgagctgggcaaaaccgttcgtaaacagatgttgcgaagtcagggaaaatcaaagtggacaggtgttcgacctcccagaaacggtctgaggaggggccggtctcccagggtgggcgggagggcattcctggcctgcccgctctgaggccttctccgtggagctggctgtcgggctcctcgccggcccttcctggagaaaaggcttctgcctcggagctagcctgctgttgggctgcgtttcctaggcagccacgtggtccccagggccccagaggtaaaccctggacttggattcccgtttctggaaatcaaaggttgagtggggtccagagagaactctgggaaaataattacaattgaaaccccccatcgccatcactgtctgcaccctggttcctgccgcactgggtgtctggtgcccgtgcccgtctcaggatagaaaggaaactggaggctgcagagagaaggacctgatgggtcgtagctcagcatctgccgaagccccatctagaaataggttctcgtcctgggaggtgtgggagggagcctcgggagggagacagcaggaggagaggccccagtcctggacacgcgctgggggttgaagtctcggctctgcaggctcctgtgctgcgtggcagggattttctctctgcctaaatatcgtcttcataagtaaaggcaagtgggctaaacctatgtcatctccgtgttaactcagaatagtctaggcctgggccaggggacactttgtgatctgagacccccagaattccctgagggaggcccagctctgtttcgggaaataactgaagcggctgtttgtgcgaggtgagaccctgaggaccgagagcagcaggaggtcatggtggggagcaaaaacgggaaaagtgattccgcctgagactgagggagagagaacccaggtgagaccctgaggactgtgagcagcaggaggtcacggtggggagtaaagatgggaaaagtgattccgcctgagagtgagggagagagaacagaggtgagaccctgaggaccgagagcagcaggaggtcacggtggggagtaaagatgggaaaagtgattccgcctgagagtgagggagagagaacagaggtgagaccctgaggaccgagagcagcaggaggtcacggtggggagtaaagatgggaaaagtgattccgcctgagagtgagggagagagaacagaggtgagaccctgaggaccgagagcagcaggaggtcacggtggggagcgaaggtgggagaagtgattccgcctgagagtgagggagagagaacctgcagcagccccatcgcctcccccagtgacacctcccctccccctgagcaggaaggggagctttggggcgtccacctctggaggacgaaggtgagagcgggtgtcgggggcctggtggggcagggaggcccttgtgggtgctgggagaccagcctgtgtgggtccagagctgcgcttggatggggagatgggcctgccgtctgggaacacgcagcccaggctgtgaggaagaggaagcaggaatgagagcttcagccaggacagctggtggacggcagacctcggccccaccatcactgtcatggagccatctcagcagggctgggggttaagctcccgtttagaaggaccccactccacagccacggggtagccactgatgtgggcaagcgcccgccatgaagaccccaccttggtggaagggcactgagaaactggacaccctcgagactcagaggatcacctcagaactggcctgttaactatgccaggaaagcatgcctttagcgtggcaaaacctggggacccagcctcctcctgagccgaaggcagggggctgccaaaacactgtctaagcagagcccgatcctgagtcaggcaagtccagatggaggaaaccatagactcttaaaaaacgtcagcgtcagcaaagaccagaaacagccagtgactctgcagtcagtgagaccagaggagtctgcaggctgccaggagagcgagggagactgctgggggttcccgtcagacagcgctcagcgggggcgaggggagagggagagaggcagagccagagagacaaaaagaaagagagacagagacagagagaaagagagagacagagacagagagaaagagagagacagagacagagagaaagagagagacagagacagagagaaagagagagacagagacaaagagaaagagagagacagagaaagagaaacagaggggagggagtaagtccaggtaaaaaacaaacaaaaaaattgagaatagaacaagagagaaacagagacatggagacacagagaaagacacagtgagacacaggagacagagacagagagagatgctgagagacagacagggagagggagagagagaggagacaccaagacacaaagagggcggagagacagacacagaaagagggagacagcggggctggatggacgtgtggccgggccagtggggaggagagacgagtccgcagacagcgttcagaggccgcgctgcctgggtgctgagccgtcccggggttcacggtcgcagtttgtccttacaaaacgcccagccgccccgacctgtggtgcttagggaggacctacctggctgtgccggtctgagaaggggccagtgaggcccggtgcgggtacgggcgggtgcagatgcagccaggaggacgggcgggagcgggggcctgtcccacacgggggcctcggcagcaccggcatggctggaggccagtacggccaggtgtggcgggagggagcgccgtctggcttgggtcgtccatcctgacaggacgctgcaagggcaggagccccgcgccccgtgtcctgcgcccccgctcgaggacaagccccagccgccggtctccgctgggttccgacaggccttgctgggaggccttgctgggagctgggggtcgaggctcacagactgcgctgaccccagcaggcacagctgggtccagggactcgggaactcgcagcctgacgcgggccggacccccggggtgggtgctgagggcctcggatgccctccctggctggacgttgtggctgtgctgatactgagcggtaaccctaggaaggagagtcccctgggctcagctacccgggacaaggtcaacagggacaccggccccagttccaggagaaaaacaagcacggccagcggcgagtgtgggcgacagcagctcagggagaagcagattatcaacagcgaattcactcagggtcagccaactgtacgcttaaaaaaagattcctgcggtaaactgtatgtctattttaccacaataaaaaacttattgtttttaattaccaatgacttctaaaaaatgtttttaaaacccagatcacaaatcctgaacatagggcctgaaaggcgaattcagccaccacggaggactcccgcacggtggagccgggacgcagggactccatgctgcgcggagggcaggggcacgtgacgcagggcgtgggggaggcggggcgtggaggaggcggggcgcggggggcggggcgtgggggaggcggggcgtgggggcggggcgtggggggcggggcgtgggggagggcaggggcacgtgacgcagggcgtgggggaggcggggcgcgggggaggcggggcgcgggggaggaggggcgtgggggggcgggccgtgggggaggaggggcgtgggggggcgggccgtgggggaggaggggcgtggggggcggggcgtcggggagggcaggggcacgtgacgcagggcgcgggggaggcggggcgcgggggaggcggggcgcgggggaggcggggcgcgggggaggcggggcgcgggggaggcggggcgcgggggaggcggggcgcgggggaggaggaggaagggttctgagtggacgcggggactccatgccacgcggagggcagccgctcatgaggcggggtgtgggggaggaggaggaagggttctggagtggcttttctactccagaagtctccccgatcctgaaagaaaatctagacaggtggaaaaaagagaaacatgtccagatagtgtcttccacattaatggtctcccaagctctgaggaagcccaatgagttgaacagtttctcataagcttgcgggtccctgtcagtgcttctgagatgctaaaaacgccaggctgtgggctgcgtcaccatgtgtctcctctttaatttcttcaggagctccaggtgataagctgccacctccatccacaatgtggacatcagaggatgcagcatgctgtggtttgaatgtgtccctatagtgcacgtgttggaaacttaatcccaaggcaacagtgttgagaggtgggacctttaagacgcattcattgtcagagcccacgtgaatgaattgataccactattgtaggagtgggttcgttattttggaataaaaggatgagtttggcccccttcctctctcccctttctctctctctctctctctctctctctctcacgcgcatccaccttccaccatgggatgacgcagcaagaaggccctcgccagatgggggcccctggacctttgatgtcccagcctccagaactgtaagaaataaatttctgttctttataaattacccagtctcagatatcctgttacagcaccacaaagtggactagaccacactctactctgtgaatctaagacgcaccattattgatgaacctgaaagaaagagcatatacccaaattagctgtgggtcagctcagcctggaggcaagagggggaagctcagataatctaaaccacaggccagccaggaaccagctttgcaatacatttacactattcacatgggctcccaaaactcacacaaaaaaatgtatttaaagggattgcaaagtggcagtgcccccagggggcaacataaagcacaacccctttcaggaagaactcggccttgtccaggctgacattagaacattggctgtagggaacaggccaattcagagatgttgaaatctaaaacataggtcccagagttgattgaacaggtatttaaatagggactgcggcaagatctaagtattcaatgaccaggttctccataggctgctcatttcaggttccacacaaagttgtggggtcagttgatttaagctggggacccccacagaggacaccccaacatctgaaggacacgacaaagaccccaaaggaaggaagattctcctcaggtatacagaaggaaagtaaaccagtcaatggaaaaagtgtcccaatgttggttggtttgtttttcagaacagaagagggtgacagaagaacgattattcatatgagagatgaggaagatgagc

SEQ ID NO: 5768 - DNA, 41399 bp, Homo sapiens
  misc_feature (1)...(41399): n = A,T,C or G, or insertion/deletion polymorphism (see Tables 1-2)
tggtgaacccttgtctctacaaaaattagccaggcatgatggtgggtgcctgtaatcccacctacttgggaggcgaggtgggaaaatcgcttgaatccgggtggcagaggttgcagtgagccgagatcacgccattgcactccagcctgggcgacagagtaagactccgtctcaaaaaaaaaaaaaaaacccaaacccacacaagatcaacctacctcttgctgcccagcttaaactagatgacaaaagaaagatttccatacaaagactggcagcttcccatctatacctcctggctgcaaaaactactaaaaaaggtacttcaacaacaagaaaataaacgtataagaaacaagcaaaaggaaccatgaggcaaaccaaacattactccccacctcccccttttttttttgagacagggtctggccttgtcgcccgggctggagtgcagtggtgctatcaccactcactgcagcctcgacctcccaggctccatccttctgcctcagcctcctgagtagcagggaccacaggtgtgcgctgctatgactggctaatttctttttttttttggtagagatggggttttactatgttgcccaggtgagtctccaactcctgggctcaagtgatctgtccaccttggcctcccacaggctgagattacaggtgtgagtcactgcatcttgccagtaaatagatatatgtatttttaaaaaggtacaatggccaggtgtggtagctcatgcctgtaatcccagcgctttgggagttcaaggcggggcggatcacctgaggttgggagtttgagaccagcttgaccaacatggagaaaccccatctctactaaaaatataaaattagctgggcgtggtggcgcatgcctgtaatcccagctactcgggaggctgagacaggagagaattgcttgaacccaggaagcaaagtttgcggtgagattgtgccatcgtactccggcctgggcaacaagagcaaaactccgtctcaaaaaaaaaaaaaaaaaagtaaaacgaatcctacaagactatgacactatgacagggaaactagaaaggggccttcagagggtattccaacactagttgtagctatttaaccttgttattttactaaaagatcagataacttccaagtcagcgagggaaaacgggaggacagagcggaagctggcaggaagagtgatgccaagacaagccaacttacaaactgcccctcgtcgatgcctatgacagccacgcccagggcctcctgggccacgtctcggagcaggcaggcgggcagtgcctccatggtgttcctgggaagagaaagccagagcgtgagcagggccagggaggccagaagccacaatgcaggggccagggaatggcactgtcgtgaccacctgctacctgcaaagcaggctcagtgttcacccagccgggctttgagaagttagcacctatgggaaaggccctcgtccagaaaaccagttatttatttattttttatgaaacagagtcttgctctgtcacccaggctggagtgcagtggcgccatctcggctccctgcaatctctacctcccaattctcaagggtctcaagcgattctcccacctcagccacaagagtagctgggactactggcacacaccatcacacccagctaatttttgtatttttagcagacatggggtttcaccatgttggccaggctggtctcagactcctaacttttaagtgatccacccgccttagcctcccagaggaaaaccagttatttatacaagccacttcacttgatgctttggattagaaattagtaatgtccagtacaaagctcaatgagactaaaaactcttccactgttcaggagctgggggcagactaggccaacttcatcaggtaccagggcccatgataccattaggggccagccaaatgtttccttttaaaattcagaagaatgaataactagaactgggcctgggttatatttgtctttatattaattatgttgcaaaacataaatttttaaaatcctgtattctggccagacacagcagctcatgcccgtaatctttggggaggccaagacgggaggatcacttgaactcaggagttcgagaccagcctgggtaacacagcgagacactgtgtgaaaaaaatgtaaaaattaactgggtgtggtggtgtgcgcctgtagtcccacctgctcagggggctgaggtgggacgatcacttgagcccaagggtttggggtcacgtaacagtaagctatgattgagccactgcactccagcctgggtgacagagagagaccctgtcccaaaaacaaacaacaaacaaacaaaaaaacatactttacaactattgtttcgttattaccttgctataatcctacttcgagttctggaaagaatgtgtgaaacagtattttgggcattttaaattccctcttccctccctaaacagagaaagacaaagtgagggcaggtgggaggccagctgtggcccctgcaagggcagcctctcgagccatcaatgctgctggcccagccttggcctctgtggcccgtgttagagatgacttgtgacacacgggcagaactcatatttaatcccggatctgactgactccagaagttgtacttccaacagctggaacgaagtgacctcctctgctttccctgtccccaccaggtgtaacaccaccctgtgccgtggacatcgcatcttaggaatgaggaagcaaatttggaaaagtaaatgacctacatcagacagcatggtcacgaagtgcggttaaattcccacatgcaactccaagccccaagcaccctccactccaccagcatctggcttcaggagcccctcagctcccaccgaaggccacacgccgggtggatctgttctctgcacagccatagcaactctcggatacagctcccagccagggctctgaggctgaagccctataatgtgtggcacagcatggctttgccactgggtgcccaggtggacaagtccagaggaccaagcaaagcgtctcaggctcagaaacatcaggcccacatctgctgccaaggaagtgaatttaactcccaaactgaggttgcaggcggaaatgtccagcgagctcaaacagctacacataaaacagggaagcgtgaaggctgccaggtgacgggggagccagccaacaacggacaactaaaaaattaaacaaaaatcaacgtgcaggccaaaccaaaccagtctgcagcctgtgtgaagctgaaaccctacggcagagtttctgaacactggcaggctcctgacatttggggccagctcgttcttgcatgggggccgtcctctgcaccataggacccttagcagcagtgtccctgatttctacacattaaagcccaaaagcatcccctcccccctccagttgcaacaactagaaatgtcttcaaacattgtcaaatggaccctggcggcaaaatcaccctcagtggagaaccactggctccagcccagggagtggagagtgtgcgctaccttgccaagcaccttggaaagtgtgctgatttgaatcattcaatgttcaaatgattaaccatccccattaaagagagtcctaacagtgtgtcctgtgccttgtgattttccactggacaggactgcagggggcagggactgaccggtcatgtgtgcagaagctgctgctgtagcgagtgtctttggcatacttgatcaccaggcacttgtactgagcaatctggaagcgacggacgcgtctcatcaactctgtgctgcaagaggagagagggtcaggtgaggtccacggcgggaggagtgggagaaggagacccctccccaacaagcctggctcctcattgtccctagtggtatgcagactgagcccaccacagccagaaaagagcagggcagagcaggcagggtataatatccctacaaagagggttggaagtcagaattctctatggggaagaggtccaggaatggtactcaggtggtcccaggaagtgtgggaggagtaaccttctccaagatgtagtggggaaggcagaagcaaaggctacatgtagagggaacctgcgactgcattccaaagtaacctcatcccagagttgttcccagagttcagagtttttctttctttctttttggggtggagtctcgctctgttgcctaggttagagtgcagtggagcgatctcagctcactgcaacccctgccttccgggttcaagagattctcctgcctcaacctcccgagtagctgggattacaggaggctgccaccatgcccagataatttttggttttttttttcagtagagatggggttttaccacgttgaccagggtggtctcaaactcctaacctcaagtgatcaacgcacctcagccttccaaagcgctgggattaaaggcgtgggccaccacacctggcatacagcttttctaaattaatttcagaaagtctttgtgtgcagcgtcaaaagcacttgcttctgggtccaagaagtccaactctgagccacatcttcctgagcaaggggtttgagctgaagtgatccccagggccataaaagaatgttggggcagggcatggtggctaacatctgtaatcccagcactttgggatgctgaagtaggaggattgcttgagaccaggagttcaagaccagcttgggcaacatagcaagaccccagctctataaaaataaaataaaattagctgggtggaggcgggggggtgcacgcctgtagtcccagctacttgggaggctgaggtgagagaattgcttgagcccaggagtttgagaccagcctgggcaacatagcaagatcctacctctagaagaacaaaaacaaaacaaaaagaatggtgcgtgggtagtttactcaagaaactcactagccccacccgggtcagggaatggttctatcacctcaggagagcagaggctccacggcttcagactccttggtttagaaagcgactacgtttccttggccttagaaggaaacagccacattgaataggggtgtacaaaaaggcctggcctacaggggacacaactggttgccaccttctcagaggacttggtggggaagacagctaagctgtaagcagctgtcaccagctccaggagggagtggcgtccacacaggacgaggggcttggcctgggcagaagagggcagagacttcctcctggactgaattcaagggaggagcaccccaggcgggagctgtaggaggctgtgctggtccttctaggggaagggaaggggagggaagggaaggggagggaaggggaggggaggggaggggaggggaggggaggggaggggagggacaaggggtccccggagaagaggaaggagctccaccccagccccgcgaagccattacctttttcctgagaacatcggcccgagaatcacctaggagagaaggtgaggtcatttgagggcccgccctgcgcggatgcctggacacaggctatcaccacgaccacctcatccccagccacgcgcagggctggcccccgcacctggatctgcccccgggtcttgctgggggagccaggcagcacagtgggcaggttaatgcagctcattgcgcctccgggaagttcacgaacccgagtactctccaaggccgtcccgcagtaagcccctggttcccgcgccgaccgctttaaaccacggcgtgctggccaatcacgagccggccccgccgccatggggccaatcagcgcccggccgctgacctggcgggagatttggccgcagcccgccccctcgtgggaggaatccgggacgtgcgcccagggactgggagggcctggaaatcagggcgatggacgtggctgatcggggtggggcctggtctgagccccgcctcggtccgcccaccaagtttaaaggggcggagcgaggcggggctctggccatataaacagagggacgcacgcccatgcggctgtagacgccatgatggatgtgtctggtgtgggtttcccaagcaaggttccttggaagaagatgtctgcagaggtaggtggattgcagggagggactaaggggctggggcggagttagctcatttattagattggaattccaagaaggaagcttagaagccgtctagagcactcctgtgggcatgcagagcgcctagtgcgtgccaggtccccagtgcttgagcaccatggtgtattttaccttctcctaaggatttttgttaacctggttttcaggataaagaaaattgaagtcctgactatgctaataatatccgtagaccctgccaggcgtggcggctcacacctgtaatcctagcacttttggcggatcacgaggtcaggagttcgagaccagcctggccaacatggtgaaaccccgtttctactaaaaatacaaaaattagccgggcgtggtgatgtacctctgtaatcccagctactggggaggctgagacaggagaatcgcttgaacccaggaggtggaggttgcagtgagccgagatcatgccatttgtactccagcctggaaggctgggcgatagaccaagacttagtctcaaaaaaaaaaaaaaaaaaaaaaaaaaaaatccatagacccgcaggaggttaggggacaaagttctggaccttgatctgaggttacacaatgtttttgggtctgtgcttatgtggcacaggctgaaggattcagaacagctggtatttacattggggttgtgaaggttagaaacatacaggccgggtgcggtggctcaaaaaaaaaaagaaagaaagaaaagaaacccattgtataatcatgatcataaataatagcaacaaagatggtggtagtgatcacagagtgtgccaggtgtggctgtaaggatcctacaggtaataacctttccaggtacagattggacagatccaaggacctctgacaaagagctccttcactgggaggaagaagcaacccacactgactggcttgctttattttactcgcatgctttatctcttttaaccttgtgatttggatacatgccttctttttttgagacacagtctcgctcagtcacccaggctggagtgcagtggcatgatctcggctcactgcaacctctacctcccgggttcaagtgattctcctgcctcagcctcccgagtggctgggattacaggcacactgtagctggtactacatgcctggctaattttttttttttttcttttgagacagagtctcgctctatcgcccaggctggagtgcagtggcgcgatctgggctcactgcaacctcttcttccagggttcacgccattctccggcctcagcctcctgagtagctgggactacatgcgcccgcaaccatgcccggctaatttttttgtatttttagtagagatggggtttcactgtgttagccaggatggtctccaactcctgacctcatgatccgccccccttggcctcccaaagtgctgggtttacaggcatgagccactgcgcctggccaatttttgtatttttaatagagatggggtttcgccatgttggacagactggtcttgaactcctggcctcaagtgatccacccgcctcggcctcccaaagtgctgagattacaggtgtgagccactgtgccgggcctggatagataccttctaccagtcaggaaactgaatctcagagactaagtaacttgttgaggataaaacagtaagtaagtgagggaggtcagatggcatttgacctcaggccttgccatgaggctgccctgacttcccatttctcatgatggttttgagccctttcttcaaaatctggttccttgttacttttttttttttttttttttgagatggagtctcgctgttgtcacccaggctagagtgcaatggtgggatctcagctcgctgcaacctccacctcccgagttccagcgattctcctgcctcagcctcccgagtagctgagattacgggcgcccgccaccatgcccagctaatttttgtatttttagtagagacggagtttcaccatgttggccaggatggtctcgaactcctgacctcaggtgattcacccgcctcagcctcccaaagtgctgggattacaggtgtgagccaccacgcccagtgttttgtttttttttttttgaaacagggttttgctctctcaggctggagtgcaatggcgcaatcttggctcactacaatctctgcttcctgggctcaagcgattctcctgccttagcctcccgaatagctaggactacaggtgtccaccaccatgcccggttgatttttcatatttttcgtagagatagtgtttcgccatattgcccagactggtctggaactcctggactcaagtgatctgcctatcttggcctcccaaagtgctgggattacaggcgagagccaccgtgtccagcattttctgttggtttttttttttttttttttgagatggggtctcactctgtcgcccaggctggagtgcagtagcatgatcccggctcactgcaacctctgcctccctggttcaagctattctcctgcttcagcctcctgagtagctgggattacaggcgcgcgtcaccatgcctggttaatttttgtatttttagtagaaatggggtttcatcatgttggtcaggctgatcttgaactcctgacctcgtgatcccgcctccgcctcccaaagtgctgggattacaggygtgagccaccgcgcccagcctctgtttttttttttctttttttaattctccaaactgcctcagaatggttccttgttactttctgcataaagtgtgaaggtgttagcccgacattcaccgcccctcctcctccagcccagcctcccagcctcacctctgtgtgtcagccatagggcctgccagcatttgcaaactgacctttcattccttcctcctcacctctgtgcctttgactgtgcagtgacctcctgtggtcagaatcgcaccctctcagcgcagatcagctcctccttttttaatttttttgaggtagagtcttgctctgtcgctaggctggagtgcagtggtgcgatctcggctcactgcaacctccacctcccaggcttaagcaattctcctgcctcagcctcccaagtagctgggattacaggtgcacaccaccacgctcggctagtttttgttttcagtagagatggggttttgccatgttggccaggctggtctcaaacttctgacttcaagtgatccacctgcctcaggctcccaaagtgctaggattacaggcgtgagccaccgggccacctggcctcccctggtcgtaactgctgtgggagtggtgcccatgatggcattaactgaattcgtttgggggacctcatctccccttaaggctgccagctggctaaaggcacagcggtcgctggtatacctctagaccatggatctgagggcatcttggagaccctgggatactggggcgagggcttctaaggcagagaggagcagccgggcatgggcgagggggaggggcacactctgttgagaaggaaagtcttacggagcctcatgtttgtgccctgcaggagctggagaatcagtactgtcccagccgatgggttgtccgactgggagcagaggaagccttgaggacctactcacagataggaattgaaggtactagtgtgacctctccgtggccgcattgggtgtccttaagcatgtggcagtgattcagaatgctgggggttgggggggctgtgctgcaccacctgggcctcgaggggcatttcccaaacaccaggcactttataaacctccctgctcaggggcaggtgcccaggaccccttgctgcagggactactggaggcaggagaggtccgggggaggtccacggctcagtcgaccatgcctggcctttcttgctcagccatccatacccaggcccgtaaggctgcgggctgtggttggcatagggaggtgaagtgaacagaggaacgttccccatccgctgctgaatgtggaatgcggtcactattcctaaaaagcaatactttgggaggccgaggcaggtatatcacttgaggccaggagttcaagaccagcctggccaacatggcaaaaccctatctctacaaaaaaatacaaaaattagctggacacctgtaattccagctactcgggaacctgaggcatgagaattgcttcaacctgggaggcagaggttgcagtgagctgagattacatcattgcatgccagcctgggtaacagtgagaccctgtctcaaaaaaaaaaaaaagcaatgaagcctcttttttttttgagactgagtcttgctctgttgcccaggctggagtgcagtggcgcgatctcagctcactgcaacctctgcttcccgggttcaagcgattctcctgactcagcttcctgagtagctgggactataggcgcacctctccacacccagctgatttttgtatttttagtagagatggggccaccatgttggccaggatggtctccatctcttgacctcgtgatctggctgcctcggcctcccaaagtgctgggattacaggcatgagccatcgtgcctggccgccttttctttctttcttttttttgtttttgagacagagtttcgctcttgttgcccaggctggagtgcaatggcatgatctcgactcaccgctaacttcgcctcctgagttcaagtgcttctcctgcctcagcttcctgagtagctgggattacaggcatgcgccaccacgccctgctaagtgttttgtatttttttttttttttagtagagatatggtttctccatgttggtcaggctggtcttgaactcctgacctcaggtgattcgccctcctcggcctcccaaagtgctaggattacaggtgtgagccaccatggctggactttttttttttttttttttttgagacggagttttgctcttgctgcccaggctggagtgcaaaggtgcaatctcggctcactgcaacctccacctcccaggttcaagcgattcttctgcctcagcctcctgagtagctgggattacaggcctgtgccaccaagcccagctaattttgtatttttagtagagatggggtttctccatgttggttaggctggtctcaaactcccgacctcaggtcatccacctgcctcggcctcccaaagtgctgggattacaggtatgagccaccgtgcctggactttcaccttttctttctttaaagaaatctggacttgggaacctgtaaactagtgaagtmttaaggtccatttccatctctaccctgtatctgcaaagtgctgtaccacgatctgaacacctggtaatgcatccgtgctgggatggggagcaggccccgaggaggaagtgtaggtgaggacgcagccaaccatgcttggcaaattagctctgttgcagcaggctcaacacagcctttcagaggcagatgcctgggctcctgggcttggtggttttctaagcggagagaacccaggaggaggaacagacttgttagaagtgtattccagcaattccaccatcctcctgtctcaatagattgggggggagctgtttcctgggctcttcatgttccttgctgtgctcagctctgatccaaattcatctctatttgctcgataaatacatgagtgtggtgaaacatacaagagctgtaagcagccaggcgtggtggctcatgcctgtaatcccagcactttgggaggccgaggcgggcggatcatgaggtcaggagatcgagaccatcctggctaacacggtgaaaccccatctctactaaaaatataaaaaattagccaggcatggtggcgggcgcctctagtcccagctactcaggaggctgaggcaggagaatggtgtgaacctgggaggtggagcttgcagtgagccgggatcgcgccactgcactccagcctgggcgacagagcgagactctgtctcaaaaaaaaaaaaaaaaaaaaaaaaaaaagctgtaagcaaacctatttgcctgtcttaattgtcttgagtgataaaaagagctgaccctattgagaaagaatgtcagatgtaaaaagcacgcactattgaaacttcaagtcatatgaatgaaagaaaattaaaaggaaaggattaaaaaggaaaaaaaaaaaagaggccaggaactgtcacacacgcctgtaatsccagtactgtgggaggtcaaagcacgaggatcctttgaggccaggagtttgagaccagcctgggcaacatagcaataacctgcctctacaaaaaatttaaaggccaggcgtggcagctcacgcatgtaatcccagcactttgcggggctgaggtgggcagatcacaaggtcaggagattgagaccatccyggctaacacggtgaaaccctgtctctactaaaaatacaaaaaattagctgggcgtggtgcgggcacctgtagtcccatctactctggagactgaggcaggagaatggcttgaacccagaaggtggagcttgcagtgagctgagatcatgccactgcactccagcctgggcgacagagcgagactccatctcaaaaaaaaaaaaaaaaatttaaaaattagcagggtgccgtagtgtgcacctgcagttccacctacttgagaggctgaagtgggaggattactgctgccttggagttcaaggctgcatatttctttatgtattgggttttttttttttttctttgagacaaggcctcgctttgtcacccaggctggagtgcagtggcgtgattttggctcattgcaacctctgcctcctgggttcaagccattcttgtgtctcacattcttgtgtttcagcctcccgagtagctggaatttacaggcgcgtgccaccacgccagctaattttgtatttttagtagaggcggggtttcaccatgttcgccaggttggtctgggactcctggcctcragtgatctgctcgcctcccaaagtgctgggattataggcgtgagccacactttgccttctttgcaccagggagaattatattttttctcattttttatttgtattcgtccttacaatgccagcctgttaacttgcaatgagggatgttcgcttttaatgagtagacagcctcatccccatcaaggcctggccgccctcatctgggctcagggagaacaaagtctaactgctgtgtgagtatggtcagggcgcaggaggctggcagagagggggtttaagaaccatttcctttaccactagcttttaaattagttttactgtgaccttcagtaaaaatacttttttttttttaagacggagttttgctcttgttgtccaggcttggagtgcaatggcgcaatctcggctcaccgcaacctccgcctcccaggttcaagcgattctcctgcctcagcctcctgagtatctgggattacaggcatgtgccaccacgcctggctgattttttatttttagtagagacggggtttctccatgttggtcaggctggtctcaaactcccgacctcaggtgatccacctgcctcagcctaccaaagtgctgggattacaggcgtgagccaccgtacccggcccaaaaaaatacattttacagtcagcaaaatgctgtatatattttttatccagatacaaaagttcaaattctgtatgatttcatttaaatgaggtccctagagaagtcaaattaataaagacaagaaatggaatggtggttggtaggggcaaggggagggaggaatggggagtgagtgtttaaaggggacagtttctttctttttttttttcttttgagacagggagagtctcactctgttgcccaggctggagggcagtggtgctatgtcatctcactgcaacctccacctcctgggttcaagcagttcttgtgcctcagctkcccgaatagctgggattgcagatgtgcaccaccacgcccggctaatttttgtgtttttagtagagacagggtttcgccatgttggccaggctggtctcaaactcctggcctcaggtgatccgcctgcctcgacctcccaaagtgctgggactacaggcatgagttgccgcgtgcagccctgcagtcctgttttttttttttttkgggcggagtttcactcttgttacccaggctggagtgcaatggcgcgatctcagctcaccgcaacctctgcctcctgggttcaagcagttctcctgccttggcctcccaagtagctgggattacaggcrtgcgccaccacgtccagctaattttgtatttttagtagagatggggtttctccatgttggtcaggctggtctggaactcccgacctcaggtcatctgcccgcctcccaaagtgctgggattacaggcaagagccaccacgcccggccttgcagtcctgtttttaataccatgcacagcattataaattattattattattattatttttgtttttgagacggagtcttgctctgtcacccaggctggagtgcagtggcaagatcttggctcactgcaagctccgcctcccrggttcacgccattctcctgcctcagccacccaagtagctggtactacaggcgcccaccaccatgcccasctaattttttgaatagagacggggtttcaccgtgttagccaggatggtagcattagaaattatttctaacccaggctgggctccatggctcatccctgtaatcccagcactttgggaggccaaggcggtgggaatcacttgaggtcaagagttcacggccagcctggccaacatagtgaaaccccatctctactaaaaacacaaaaagtagccaggcatggtggcgtgcgcctataatctcagctacttgagaggccaaggcaagagaattgcttgaactcaggaggcagaggttgcaatgagcaaagattgcaccactgcactctagcctgggtgacaaagcgagaccttgtctcagaaaaaaaagaaaagaaattatttctacccagccaggcacagaggctcacgcctgtaatcccagcactttgggaggccagaggggggcagatcacttgaggtcaggagttggagaccagcctggccaacacgacaaaacaccttctctactgaaaatacaaaaatgagccaggcatagtggcacatgcctgtaatcccagccaccggggaggctgaagtgggagaatagcttgaacccaggttggggaggttgcagtgagtcgagaccacgccattgcactccagcctgggcaacaaagaatgaaactccatctgaaaaaaaaaacccagaaattatttctaacccaaaacaattgaaaacaggtactcaaacaagcatttttacacgcgtgttcgtagcaccatttccacatagcctgagttgtaaataatagcaatgaagcttttgctttaatgagaaaggaagtttgccataaggtttgttctggggtgtcttgctgaagccctcctgtgttcttgccctggggttcagggactggagggccctctgtggggggcatgagtcacttcattctctgtctctgcaccccagctgtcctctcctagagagaggcaatttctctttcccgaggttagtagagttttttaatatctgagagaggcttatgcatgataatgaacacctatagctgcttggttttaatggccattccacttagaacataaattccatgatgtttttcttaatcgtagcacaactttaatctagtccatttataggcttgagaactcctgtgtgaattaaatcacgaccttctgatgaagccactccgatgagcctgtgaggcacattgtcttcacactgtgctggggcagggttgttggcaaacccccatggatggcagccggcaatggcctcacagtgacaaatgcgtctgccttttgacccagaattctacccctgagagtgcgtcctacagatgcttgcaagtggtatggtaatggatgtacaaagctattcacagcaggggtgtttgtggtagcatggcctgggagacagcccagatggctttcagcaaaggattggtggcaggtctgcagccctggggcttatcagacaccaaccctgctggcaccttgatcttggacttccagtttgcagaactgtgagaaaataaaatttccattaagtttccccagtctggtattttgttatagccgcccaggctgactcagacaggagcccaggatggatgtgagcgtgttataaccagctcacgcttgtggctgtagggagtccgggtagaagctggaagagcctagaggggtggctgctgccttccagggaacaggtcaaagggtatccaaccagagtggtctcagtgcagatggggaggagactctagacccaggacaagcagtggagggggcatccaaggatttcctgatgatcagatgtggtttgagaaagagagggggccggtggcgcatgcctgtaatcccagactttgggaaaccaaagcaggaggacgcttgagcccaggagttcgaaaccagctggcaacatgcaagacctggtctctacaaaaaaattaaaaattagctgggtgtggtggtgcttgggaggctaaggtgggaggatcacttgagccctggagttcgagaacagcctgggcaacatggcgaaaccctgtccctacaaaaaatacaaaagttagccaggcgtggtggcacacgcctatagtcttagctactctggtggcagaggtgggaagcttgtttgaacctaggaggttaaggctgcagtaagccgagattgcaccactacactccagcctgtgtgacagagtgaaaccgtgtctcaaaaataaaaagtgaattcaggagttccagaccagcctggccaacaccgtgaaaacccatctttactaaaaatacaaaaattcgcctgggccagatgcactggctcgcacctgtaatcccagcactttgggaggccaaggcggggatatcactcaaggtcaggagttcgagaccaacctggccaatatggtgaaaccccatctctactacaaatacaaaaaaaaaaaaaattagccatgcatggtggtgcgtgcctgtaatcccagttacttgggaggctgcggcaggagaatcgcttgaacccaggaagcagaggttgcagatcacttgaacccaggaaacagaggttggagtgagcggagattgcgccgttgcactccagcctgggtgacaagagcaaagctctgtctcaaaaaaaaaaaaaaaaaaaattagacaggtgtggtggcgcacacctgtaatcccagctgctcagaaggaggagacaggagaatcacttgaaccccagaggcggaggttgcagtgagccaagattgcaccagtgggctccagcttgggcgacagagcgagcctctgtctcaaaaaaacaaaacaaaacaaaacaaaaccaaaaccacacaaggcttttcagtgaaatgctcactcctcttccctttcgtgtgcccagttcccctggcccccgtcaaggtggccactgttcttcatatggatatagactccccctccctttcatccaaatggccccgtagtacacacagttccaccctgccagtttcacttagtatttcttggagatgtttcctcatctgtacgtagatagcttctcgtcagtacgtcagtacgcagggagccctgcaggggcaagtggttggtaacgtgggtgctggcaaaacaggttttgcaacctcactggcgttctgcaaaggcagcttcctgcctggattggcccatgggcaacttccctttgatttccctcagctttaatccatccagctgaagtggagacagcccggtttatggttctgcattctggcatagacgcaattcgtacaagctctcagccccatgctttttcttcctctgccgtgtttacccttctggagttgcagaatgaatcacccacccgagggaagcacggttgtttttttttttcttttctttttttttgagacagtcttgctctattgcccaggctggagtgcagtggtgcaatctcggctcgctgcaacctctgcttcctggttcaagcaattctccttcctcagcctcctgagtagctgggagtacaggtgtgcgccaccacgcctggctaatttttgtatttttagtagagatggggtttcaccatattggccagggtggtctcgaatgcctgaccttgtggtccacccgcctcggcctcccaaagtgctgggattgcaggtgtgcgccgccscgcccggccaggcttttttytctctaggcctgctgtggycaccaaggctggggaccagggggcctccagggacagggatcccaagttgcacgttaatacacggagccctttctgagatgcaggttctacagggaactggattccacctcttttggggagatcaacccagcagcccaaggatcccctgatggtgcctgagcacagctgtgagaagggggtatctggatccttggggtgacaggatgggagaggtggagcatgggcctgcaggctggcccccagaggccttaggtctctgctgactagctagaattctgaaaactgtgttatgtaagacgtttagcatctgcagtgccaaataaaggtgacccccacaacgacataaaaaaaaaaaaagatatgtccaaatcctaaccctgggaacctatgaaaatcctaaccctgggaacctatgaaggtatttccttatttggtgtgttttgttttggtttggtttggtttggtttgtttgatacagagtcttgctctgtcgcccaggctggagtgcagtggtgtgatctcagctcactgcaacctctgcctccgggttcaagcgattgtcctgcctcagcctcccaagtagctgggattacaggcacgcgccaccacgcccagataatttttgtatttttagtagagacagggttttaccatgttggccgggatggtctcaactcctgacctcaagtgatctgcccgcctcagcctccctgtaaccagctgggattgcaggttcccggttggtatttccttatttggaaagaccatctttgtaggtgttattagctaaagtcaagtcattctgggttagggtgggccmtaaatgccattgactgctatcctgctaagagacagaagagggagggacacacagggaggggaccacgtgaagacggaggcagagacgggaagaggcagaggtgactggagtgacgtagccccaggccttggaacgcctggagccaccaggagctgcaggaggcaaaagaggcattggcagagtgtggcagtgtccacaccttaatttcagacttctggcctttagaactgtgagagaatcacgttctactgctgtgagacactcaatttgcagtactttgttacagctgccctggtaaacaaatgcaatatttattttcagcaaagcagggagttcctgcaaagatgactagaccaggttccttctcccaagagcgcagtgtcctagctgtgaatactaggagtgcgttgctgcggtgggaggggaggcagggtttactgactgatcattcccagtggtctggatgctctctttctttctttcctttctttcgagacagaatctcgctctgtcacccaagcttgagtgaccagaagctggagaaggcaggaaggaccctccctaggaaccctgcccacatttgacttgagacttccgttctccagccgctgtgagacacagccctgcaaggagtgcccagcttgtggcagtttggttgcggcagccctggaggaggagtcccccagggaaagtggaatctctcttgcagtccaccatccacatcccccgactcaccttccgctctgccagtatcctccgtgaaagaacaggaagaaaggcaaggctgcaaaaccaagcacagggcgtgtgagcgaggcccgccctgctgagctctgccactggacccccaagccccgggacccccagccccttcaccgacaaccttcagacgactcgtcggggaagtaaatgtccactttctccccttcgccgtctccataggggacatgcagcaggctcttcctggtggcccgggcccttgtggtggctgtctcagaaatggacaagtcgctgtcagcacaagctcaggtggtagaaatttttcttttcttttttttgagacgaagtctcactctgtnnnnnnnnnnnnnnnnnnnnnnnnnnnnnnnnnnnnnnnnnnnnnnnnnnnnnnnnnnnnnnnnnnnnnnnnnnnnnnnnnnnnnnnnnnnnnnnnnnnnnnnnnnnnnnnnnnnnnnnnnnnnnnnnnnnnnnnnnnnnnnnnnnnnnnnnnnnnnnnnnnnnnnnnnnnnnnnnnnnnnnnnnnnnnnnactgcacccagcctggcagtcctctttcgatgggaggtgctcagagctgaagctcaacacgccaacttaagggagctttcagctggaatgtttctacctgagctgaaatagaaattgccgccacctggctgggcacagtggctcatgcctgtaatcccagcactttgggaggccaaggtgggtggatcacgaggtcaggagttcaagaccagcctggccaacaaccctgtctctactaaaaaatatatatatatatataaaaattagctgggcatagtggcgtgcacctgtagtcccagctacttgggaggctgaggcaggagaatcgcttgaaccggggaggtggagattgcagtgagccgagatcgcgccactgcactccagcttgggcaacagagtgagacttcgtctcaaaaaaaagaaaagaaaaatttctaccacctgagcttgtgctgacagcgacttgtccatttctgagacagccaccacaagggcccgggccaccaggaagagcctgctgcatgtcccctatggagacggcgaaggggagaaagtggacatttacttccccgacgagtcgtctgaaggttgtcggtgaaggggctgggggtcccggggcttgggggtccagtggcagagctcagcagggcgggcctygctcacacgccctgtgcttggttttgcagccttgcctttcttcctgttctttcacggaggatactggcagagcggaaggtgagtcgggggatgtggatggtggactgcaagagagattccactttccctgggggactcctcctccagggctgccgcaaccaaactgccacaagctgggcactccttgcagggctgtgtctcacagcgctggagaacggaagtctcaagtcaaatgtgggcagggttcctagggagggtccttcctgccttctccagcttctggtggccttagacagcccttagcttgtgtctgcatagctccagcctctgcctccattcacatgtgatcctggtgttcctgggtctcaaatcttcctctctctttttttttttttttttttttttttgagacagagtctcactctaacccagactggaacgcagtggtgcgacctcagctcactgcaacttctgcctcccgggctcaagcaattcttctgcctcagcctcccaagtagctgggattacaggtgcacgccaccacacccagctaatttttgtatttttagtagagacagggttttaccatgttggccaggctggtcttgaactcctgagctcaagtgatcctcctgccttgacctctcaaagttctgggattacaggcgtgagccaccacaccagcctccttttttttttttttttttttataaggtcatagtcacaggttctggggttaggatttggacatatcttttggggggacacagttcaacccactacacccagtgagaagcatgttcagcctcctcttgaatcaagggaaaagccagagtgaccaaccactgtcccagtttgcttgggactgaggaggggtttcccaggacatggggttttcagtactttaggaaaaaaaaatgagagtcccaggtaaaatgggacagttggtcactgtaagctaagcagtgggtatttgggaatttgggatcttggcagacactgctgttccctagggtcttcctacagagttgccttcaagcatgttcatgttaatagcttacatttaatggccaggtacggtggctcacgcctgtaatcccaacactttggaagggcaaggcggacggatcacttgaggtcaggagttcgagaccagcctggccaacgtggtgaaaccctgtctctactaaaaatacaaaaattagctggacgtggtggtgtgtgcctgtaatcccagctactcgggaggctaatgcaggagaatcgcttgaacccaggaggcggaggttgcagtgagctaagatcatgccactgcactccacccagggtgacagagcgagactctgtctcaaaaaaaaaaaaaaaaaaagcttacatttattgcacacaaaactctctacactgctagtctttaattctcaaaaacagttccctgagagagggaacataattgcctctattttacagatgacaaaaccaggcttagaagttacacaaattgccttgcacagtggctcacacctataatcccacacattgggaggctgaggcaggaggattgagttagaaaccagcctggtcaacatagcaagacccycatctctacaaaagaaaagataaatttgctgggcatagtggtgcacacctatactcctgcttgggaggctgaggcaggaggatcgcttgagcccaggaggtcgaggctacagtgatccatgatcgcaccattgcactccagcctgggcgacagagcgaggccctatcgcttagaaaacaaaaagttacatgaagttcccccaaggtcccgtagctagcatgtgatgtgkcagggagagagcctgtccgcttcactctctcacatgggaccagaaaggggtgatgctgtgcgtggacaggacatctggcaagtggtgtgtccaggacacaggaagcagcgtagtggccaagctgcctccagctgtcacatctgtgtgtctctgcagtaaggatgagtctgccttcatggtccacccgctgacggcacagggagtggccgtggtaatagtggcttacggcatcgcccccaaaggtaataggagtggttgctgcaggtccgagggccggtgggctttaggaggaagtgcatccctgacccagctcatgctctctgtgcaggcaccctggaccacatggtagaccaggtgacccgcagcgttgcgtttgtccagaagcggtatccaagcaacaagtgggtgttgccagtagattttcttcctgttggacctcagtgggtgggaggacagtgcaatcagtacctaggatacagccaagctgcccctctggcctgtggagcagaaagcaaattgggactcttcgaagggggcctgatgttgtggggaaactgcgtgcaaatccagctctctgctctgacccctcccaggggaatttrcctgtgtggacactcagccggggcccacctggctgccatgatgctcctggccgactggaccaagcatggggtcacgcccaacctcagaggtttccatgggagctacagcctggctgggcaaccttcatctccccatgagccttggggtttgggccaactgcttgaaatcctcccggccatgagtggcttgaccgcagggcttcgagccctctgagcaaggccttctctgcctcctctgtgccccttcccctggtcctgcccctctggcggtgggggtgggctggccctgccttgctccgcctggagcctggccctgtgacaattctgtaccttcacaggctttttcctggtgagtggggtctttgacctggagcccatcgtgtatacttcacagaacgttgctctccagctgaccctgtgagttacttggccaccacctcccctggctcaccaggagcctggctcctctctgtcctgacccctgtccactccccaccccagggaggacgctcagaggaatagcccccagctgaaggtggcccaggcacagccggtggaccccacctgccgtgtgctggtggtcgtgggccagttcgactcccccgaattccaccgacagtcctgggagttttaccaggtactcccagtgcaggtttgtggccagaggtcgagggtcatgtgggctcattattttcctctttcttttacccaagtggacaagaccctccatcatttatttaacacgtactgagtgaaccctgacctgtgccaggcatggccccatgtcctgccccacctcccctcccactgctcaggcccctcttcccatgtctcccctgcccagaccctgtgtcaaggagagtggaaagcctcatttgaagagctccacgatgtggaccactttgaaattgttgagaatctgacccagaaggacaacgtgctcacccaggtggggcctcatccctggcagccctttcatggtagacagcacaggtcctgtcgcagccccttagatgtgcaaaccaggagttcaagaccagcctggccaacatggagaaactccgtgtctactaaaaatacaaaacaaattagccagatgtgatggtacgtgcctgtaatcccagctactcaggaggctgaggcatgagaattgctttaacccaggaggcagagattgcagtgagccaagattgcaccactgcactccggcctgagcgacagagtataagactctgtctcaaaaaaaaaaagacctgagaacctaggaaagaaagaacctaagaaagaccatcttgtttctttctttttttttttctttagagacagggtctcctctcttgcacccaggctggagtatagtggcaaaatcttagctctctgctgcctcctgggctcaagtggttatcctgccccagcctcttgagtagctgggactacaaaggcgtgccactgtgccctgctaattattcaatgtttttgtagagatggggtctctctatgttccccaggctggtcgtcgtcgtcttccttcttcttcctccttcctccttcatcttctttcttctcctcctccccctacccccccttcttcttcttcttccttcatctcagcatattatacctctaaccagactgtcttcaactcctgagttcaagtgatcttcccacctcagcctcccgaagggttggggttgcagacgtgagccactgcatccagccctgtctcatttccttaatcaaattcctgcaaagagctgctctgattctggggcttttgtgtcttctcttcctgttccagattatcttgaaaacaatcttccagtagttctgacgatacttggagcctggtccacgtgcatcccaccttgggaagcctctccaaagagctttcggagctgacactgacagcttcagtttcccccagcacccaggagagccttgctgtgtctgtctgcccggcaagagtccattctcactgctgggacactcatgaaaatctccacgtcctccctcttcccagcctggatggagctccagggctggggaacgtccgcaagtcaatgctcagagatgcccggagctgcctcttagactcgtctggcccatctacctgctgacagagcatgacaaagatgacgctcaaaagtaatgccattacttcttttttttttttttttttttttttttttgagaaggagtcttactctgtcacccaggctggagtgcaggggcgtgatcttggctcactgcaacctccacctcccggggtcaagctattctccttcttcagcctcctgagcctttgggactgggggcgcctgccatcatgcctggctaatttttgtttttttaggggagacgggggttcaacctattggccaggctggtctcaaactcctaaccttgtgattcgcccgccttggcctcccaaagtgctgggattccaggcgtgagccactgcgcccggccagaatggcattatatttaaatagttcataaagaagcacaaaagaatattatttcataacatgtaaaaattatataaaacgtaaatttccatgttgataaataaagttgtattggaacacggccctgctcgttcatttacgtattgtctagggcagctttcaagctgcagggtggagctgagtggtggtgacagtgacctcctggcccgtagtgcctgaagcatttcctatctggcccttttcaggaaaagtttgcggacccctgggtaagggcttccccaagccagctaccctctgccttctgcttcagtctcctgtctgctctgtcctccatctccctgacatttgggtctgtccctgaatgccccggggtctcagcgttggggccaacaccttgaccttgacaggacaatgctacccacatgtaggacaagcttcctctgcacccgagagtggtgtgcatgtcccaagaagccagctatatccatccaccacccaccccaccacaccgcctctttctctcacaccgaatagcattcaagaatttccactgtgggctgggcgcaggggctagtgcctgtaatcccagcactttaggaggccgaggtgggcgaatcacctgaggtcaggagttcaagaccagcctggccaacatggcaaaaccctgtctctactaaaaatacaaaaattagccaggcgtggtggctggcgcctgtaatcctagatacgtgggaggctgagttaggagaatctcttgaatccgggaggcagaggttgcagtgagctgagattgtgcccctgcactccagcctgggtgacaaagccagactccatctcaaagaaaaaaaaaaaaattccactgtatgtgtgcagcaaaccatcatgacacacatttacctgtgtaacaaacctgcacatcctacacatataccctggaacttaaagtaaaagttgggggggggggtaaaaaagaatttccaccgtgacattattgagtatagcaaaaaaaaaaaaaacaagaaacagcctagtgttcattagggaataaacgcattcaagcagcatcaaaccctgcagccattacaaagagatctatgttgaccatgtggaatatctccaagagccacagtagcctcccttatctgtaggattcactccaagaccctctgaaaccatggataatactgaaccctatatacactatgttttttcttgtatatacatacctacgataaagtttaatttataaattggcaaagggtatataaatattccttctaagagattaacaataactaataaagtagaacgattaaaacaatatactrtgatcaaagttatgtgaagccaggtgctgtggctcaygcctgtaatcccagcactttgggaggctgagacaggtggatcacctgaggtcaggagttggagaccagcctggccaacatgacaaaaccccgtctctactaaagataaaaaaaattagccgggcatggtgacacatgcctgtaatcccagctacttgggaggctgaggcaggagaatcgcttgaacctgggaggcggaggttgcagtgagctaagatcacaccattgcactccagcctgggcaacaagagtgaaactctgtctcaaaacaaaacaaaacaaaacnnnnnnnnnnnnnnnnnnnnnnnnnnnnnnnnnnnnnnnnnnnnnnnnnnnnnnnnnnnnnnnnnnnnnnnnnnnnnnnnnnnnnnnnnnnnnnnnnnnnnnnnnnnnnnnnnnnnnnnnnnnnnnnnnnnnnnnnnnnnnnnacttcatctcaaaaaaaaaaaaagaaaaaagaagtccagaaacccgcggagacactatcacactatcccccccaggctggtagtgcagtggcccaatcatggctcactgcagcctcgacctcccaggatcaagtgatccttccacctcagcctcccgagtagctggaagtataggtgcacgcccgactgattttttttttttttttttagacggagtctcactcttgttgctctggctggagtgcaatggcaggatctcggctcactgcaacctctgcctcttagattcaagcgattctcgtgcctcagcctcccgagtagctgggattacaggtgcccaccaccatgcccggataattttttgtatttttaatagagacagggtttcaccatattggtcaggctggtctcaaactcctgacctcaggtgatccacctgcctcagcctcccaaactgctgggattacaggcgtgagccaccgggcatggcctttcctggctaattttttaaatttttgatagagatggggtctcagtgttgcccaggctgatcttgaactcctagattcaagtgatcctccctccttggtctcccaaagtgctgagattacaggcgtgagccaccgccccgggctggaaaatacttttttaaacgagggcaatgtgaatctgaaatgccatttgaggaaagatctgttcgcctgacatcctgtttgagcctgggtggacaggacagcacctgccagcatcgggaagcactgcagatgggaagaggcttggtcactctccaaaggtggcaggagttggagggggtgagctgaaggtaaggagaaaggaggtggggacccaggagacaggggctgcgcagcgggctcggggctgacacccccacggatacagttcactggggctcaaacataaaaggaacccaactattgtgggaggaaaagactcttctgcctttctgccttttctttttttctttttctttctttctttttttttttttttttttgagacagagtcttgctctatcgcccaggctggagtgcagtggcgtgatctcggctcactgcaagctctgcctcccgggatcacgccattctcctgcctcaacctcccgagcagctgggactacaggcgcctgccaccacacccggctatttttttgtattttttagtagagatggggtttcaccatgttagccaggacggtctcgatctcctgaccttgtgatccgcccgcctcggcctcccaaagtgctgggattacaggcgtgagccaccgcgcctggctcttttttctttctttttttttttccgagacagagtttcactcttgttgcccaggctggagtgcagtggcgcgatcttggctcactgcaacctccacctccagggttcaagcgattctcctgcctcagcctcctgagtagctgggactgcaggcgcgcaccaccacgcctggctaatttttgtatttttagtagagacagggtttcaccatattggccaggctggtctcgaactcctgaccttgtgatctgcccacctcagcctcccaaagtcctgggattacaggcgtgagccaccgtgcccagcctgacccctctgccctttcaaaaactatgttcgttctctcacagccttctcttgtcatattaagtccacaccgcaggcctaatttgtccagtgaatgctatgcaaatatttcatgcacctgctgatcgcaggaatgatatgtacttggtacgcactgatcgtacctcggggtgggagaagagagggcaaggaagcaaagaatagccccctcctttcctggtgcaccttcagatgtgccgatggggcccaggctcgctgcagatggcccccttcccagagacaggggaggatcstccacccactccccagcctccaggaccatcctgactcctgccttcaggcactcaagttatgcgtctagayatgcggatatattcaagctgggcacagcacagcagccccaccccaggcagcttgaaatcagagctggggtccaaagggaccacacccygagggactgtgtgggggtcggggcacacaggccactgcttcccccygtctttctcagccattcctgaagtcagcctcactctgcttctcagggatttcaaatgtgcagagactctggcacttttgtagaagccccttctggtcctaacttacacctggatgctgtggggctgcagctgctgctcgggctcgggaggatgctgggggcccggtgcccatgagcttttgaagctcctggaactcggttttgagggtgttcaggtccaggtggacacctgggctgtccttgtccatgcatttgatgacattgtgtgcagaagtgaaaaggagttaggccgggcatgctggcttatgcctgtaatcccagcactttgggaggctgaggcgggtggatcacgaggtcaggagttcaataccagcctggccaagatggtgaaaccccgtctctactaaaaatacaaaaaaattagccgggcatggtggcgggcgcatgtaatcccagctactgggggggctgaggcagagaattgctggaacccaggagatggaggttgcagtgagccaagattgtgccactgcactgcactccagcctggcgacagagcaagactctgtctcaaaaaaaaaaaaaaaaagtgaaaaggagttgttcctttcctccctcctgagggcaggcaactgctgcggttgccagtggaggtggtgcgtccttggtctgtgcctgggggccaccccagcagaggccatggtggtgccagggcccggttagcgagccaatcagcaggacccaggggcgacctgccaaagtcaactggatttgataactgcagcgaagttaagtttcctgattttgatgattgtgttgtggttgtgtaagagaatgaagtatttcggggtagtatggtaatgccttcaacttacaaacggttcaggtaaaccacccatatacatacatatacatgcatgtgatatatacacatacagggatgtgtgtgtgttcacatatatgaggggagagagactaggggagagaaagtaggttggggagagggagagagaaaggaaaacaggagacagcgagagagcggggagtagagagagggaaggggtaagagagggagaggaggagagaaagggaggaagaagcagagagtgaatgttaaaggaaataggcaaaacataaacagaaaatctgggtgaagggtatatgagtattctttgtactattcttgcaattatcttttatttaaattgacatcgggccgggcgcagtggctcacatctgtaatcccagcactttgggaggccgaggcaggcagatcacttgaggtcaggagtttgagaccagcctggcaaacatggtgaaaccccatctctactaaaaatacaaaaattagcctggtgtggtggtgcatgcctttaatctcagctactcgggaggctgaggcaggagaatcgcttgaacccgtggcggggaggaggttgcagtgagctgagatcatgccactgcactccagcctgggcgatagagcgagactcagtttcaaataaataaataaacatcaaaataaaaagttactgtattaaagaatgrgggcggggtgggaggggtggggagaggttgcaaaaataaataaataaataaataaaccccaaaatgaaaaagacagtggaggcaccaggcctgcgtggggctggagggctaataaggccaggcctcttatctctggccatagaaccagagaagtgagtggatgtgatgcccagctccagaagtgactccagaacaccctgttccaaagcagaggacacactgattttttttttaataggctgcaggacttactgttggtgggacgccctgctttgcgaagggaaaggaggagtttgccctgagcacaggcccccaccctccactgggctttccccagctcccttgtcttcttatcacggtagtggcccagtccctggcccctgactccagaaggtggccctcctggaaacccaggtcgtgcagtcaacgatgtactcgccgggacagcgatgtctgctgcactccatccctcccctgttcatttgtccttcatgcccgtctggagtagatgctttttgcagaggtggcaccctgtaaagctctcctgtctgactttttttttttttttagactgagttttgctcttgttgcctaggctggagtgcaatggcacaatctcagctcactgcaccctctgcctcccgggttcaagcgattctcctgcctcagcctcccgagtagttgggattacaggcatgcaccaccacgcccagctaatttttgtatttttagtagagacaaggtttcaccgtgatggccaggctggtcttgaactccaggactcaagtgatgctcctgcctaggcctctcaaagtgttgggattacaggcgtgagccactgcacccggcctgcacgcgttctttgaaagcagtcgagggggcgctaggtgtgggcagggacgagctggcgcggcgtcgctgggtgcaccgcgaccacgggcagagccacgcggcgggaggactacaactcccggcacaccccgcgccgccccgcctctactcccagaaggccgcggggggtggaccgcctaagagggcgtgcgctcccgacatgccccgcggcgcgccattaaccgccagatttgaatcgcsggacccgttggcagaggtggcggcggcggcatgggtgccccgacgttgccccctgcctggcagccctttctcaaggaccaccgcatctctacattcaagaactggcccttcttggagggctgcgcctgcaccccggagcgggtgagactgcccggcctcctggggtcccccacgcccgccttgccctgtccctagcgaggccactgtgactgggcctcgggggtacaagccgccctcccctccccgtcctgtccccagcgaggccactgtggctgggccccttgggtccaggccggcctcccctccctgctttgtccccatcgaggcctttgtggctgggcctcggggttccgggctgccacgtccactcacgagctgtgctgtcccttgcagatggccgaggctggcttcatccactgccccactgagaacgagccagacttggcccagtgtttcttctgcttcaaggagctggaaggctgggagccagatgacgaccccatgtaagtcttctctggccagcctcgatgggctttgttttgaactgagttgtcaaaagatttgagttgcaaagacacttagtatgggagggttgctttccaccctcattgcttcttaaacagctgttgtgaacggatacctctctatatgctggtgccttggtgatgcttacaacctaattaaatctcatttgaccaaaatgccttggggtggacgtaagatgcctgatgcctttcatgttcaacagaatacatcagcagaccctgttgttgtgaactcccaggaaygtccaagtgctttttttgagattttttaaaaaacagtttaattgaaatataacctacacagcacaaaaattaccctttgaaagtgtgcacttcacactttcggaggctgaggcgggcggatcacctgaggtcaggagttcaagacctgcctggccaacttggcgaaaccccgtctctactaaaaatacaaaaattagccgggcatggtagcgcacgcccgtaatcccagctactcgggaggctaaggcaggagaatcgcttgaacctgggaggcggaggttgcagtgagccgagattgtgccaatgcactccagcctcggcgacagagcgagactccgtcataaaaataaaaaattgaaaaaaaaaaaagaaagaaagcatatacttcagtgttgttctggatttttttcttcaagatgcctagttaatgacaatgaaattctgtactcggatggtatctgtctttccacactgtaatgccatattcttttctcacctttttttctgtcggattcagttgcttccacagctttaatttttttcccctggagaatcaccccagttgtttttctttttggccagaagagagtagctgttttttttcttagtatgtttgctatggtggttatactgcatccccgtaatcactgggaaaagatcagtggtattcttcttgaaaatgaataagtgttatgatattttcagattagagttacaactggctgtctttttggactttgtgtggccatgttttcattgtaatgcagttctggtaacggtgatagtcagttatacagggagactcccctagcagaaaatgagagtgtgagctagggggtcccttggggaacccggggcaataatgcccttctctgcccttaatccttacagtgggccgggcacggtggcttacgcctgtaataccagcactttgggaggccgaggcgggcggatcacgaggtcaggagatcgagaccatcttggctaatacggtgaaaccccgtctccactaaaaatacaaaaaattagccgggcgtggtggtgggcgcctgtagtcccagctactcgggaggctgaggcaggagaatggcgtgaacccaggaggcrgagcttgcagtgagccgagattgcaccactgcactccagcctgggcgacagaatgagactccgtctcaaaaaaaaaaaraaaagaaaaaaatctttacagtggattacataacaattccagtgaaatgaaattacttcaaacagttccttgagaatgttggagggatttgacatgtaattcctttggacatataccatgtaacacttttccaactaattgctaaggaagtccagataaaatagatacattagccacacagatgtggggggagatgtccacagggagagagaaggtgctaagaggtgccatatgggaatgtggcttgggcaaagcactgatgccatcaacttcagacttgacgtcttactcctgaggcagagcagggtgtgcctgtggagggcgtggggaggtggcccgtggggagtggactgccgctttaatcccttcagctgcctttccgctgttgttttgatttttctagagaggaacataaaaagcattcgtccggttgcgctttcctttctgtcaagaagcagtttgaagaattaacccttggtgaatttttgaaactggacagagaaagagccaagaacaaaattgtatgtattgggaataagaactgctcaaaccctgttcaatgtctttagcactaaactacctagtccctcaaagggactctgtgttttcctcaggaagcattttttttttttttctgagatagagtttcactcttgttgcccaggctggagtgcaatggtgcaatcttggctcactgcaacctctgcctctcgggttcaagtgattctcctgcctcagcctcccaagtaactgggattacagggaagtgccaccacacccagctaatttttgtatttttagtagagatggggtttcaccacattgcccaggctggtcttgaactcctgacctcgtgattcgcccaccttggcctcccaaagtgctgggattacaggcgtgaaccaccacgcctggcttttttttttttgttctgagacacagtttcactctgttacccaggctggagtggggtggcctgatctcggatcactgcaacctccgcctcctgggctcaagtgatttgcctgcttcagcctcccaagtagccgagattacaggcatgtgccaccacacccaggtaatttttgtatttttggtagagacgaggtttcaccatgttggccaggctggtcttgaactcctgacctcaggtgatccacccgcctcagcctcccaaagtgctgagattataggtgtgagccaccacacctggcctcaggaagtatttttatttttaaatttatttatttatttgagatggagtcttgctctgtcgcccaggctagagtgcagcgacgggatctcggctcactgcaagctccgccccccaggttcaagccattctcctgcctcagcctcccgagtagctgggactacaggcgcccgccaccacacccggctaatttttttgtatttttagtagagacgggttttcaccgtgttagccaggagggtctcgatctcctgacctcgtgatctgcctgcctcggcctcccaaagtgctgggattacaggtgtgagccaccacacccggctatttttatttttttgagacagggactcactctgtcacctgggctgcagtgcagtggtacaccatagctcactgcagcctcgaactcctgagctcaagtgatcctcccacctcatcctcccaagtaattgggactacaggcgcaccccaccatgcccaccttatttatttatttatttatttatttatttattttcatagagatgagggttccctgtgttgtccaggctggtcttgaactcctgagctcaagggatccttttgcctgggcctcccaaagtgctgagattacaggcatgagccaccgtgcccagctaggaatcatttttaaagcccctaggatgtctgtgtgattttaaagctcctggagtgtggccggtataagtatataccggtataagtaaatcccacattttgtgtcagtatttactagaaacttagtcatttatctgaagttgaaatgtaactgggctttatttatttatttatttatttatttatttttaatttttttttttgagacgagtctcactttgtcacccaggctggagtgcagtggcacgatctcggctcactgcaacctctgcctcccggggtcaagcgattctcctgccttagcctcccgagtagctgggactacaggcacgcaccaccatgcctggctaatttttgtatttttagtagacggggtttcaccatgctggccaagctggtctcaaactcctgaccttgtgatctgcccgctttagcctcccagagtgctgggattacaggcatgagccaccatgcgtggtctttttaaaattttttgattttttttttttttgagacagagccttgctctgtcgcccaggctggagtgcagtggcacgatctcagctcactacaagctccgcctcccgggttcacgccattcttctgcctcagcctcctgagtagctgggactacaggtgcccaccaccacgcctggctaattttttttggtatttttattagagacaaggtttcatcatgttggccaggctggtctcaaactcctgacctcaagtgatctgcctgcctcggcctcccaaagcgctgagattacaggtgtgatctactgcaccaggcctgggcgtcatatattcttatttgctaagtctggcagccccacacagaataagtactgggggattccatatccttgtagcaaagccctgggtggagagtcaggagatgttgtagttctgtctctgccacttgcagactttgagtttaagccagtcgtgctcatgctttccttgctaaatagaggttagaccccctatcccatggtttctcaggttgcttttcagcttgaaaattgtattcctttgtagagatcagcgtaaaataattctgtccttatatgtggctttattttaatttgagacagagtgtcactcagtcgcccaggctggagtgtggtggtgcgatcttggctcactgcgacctccacctcccaggttcaagcgattctcgtgcctcaggctcccaagtagctgagattataggtgtgtgccaccaggcccagctaacttttgtatttttagtagagacagggttttgccatgttggctaagctggtctcgaactcctggcctcaagtgatctgcccgccttggcatcccaaagtgctgggattacaggtgtgaaccaccacacctggcctcaatatagtggcttttaagtgctaaggactgagattgtgttttgtcaggaagaggccagttgtgggtgaagcatgctgtgagagagcttgtcacctggttgaggttgtgggagctgcagcgtgggaactggaaagtgggctggggatcatctttttccaggtcaggggtcagccagcttttctgcagcgtgccatagaccatctcttagccctcgtgggtcagagtctctgttgcatattgtcttttgttgtttttcacaaccttttagaaacataaaaagcattcttagcccgtgggctggacaaaaaaaggccatgacgggctgtatggatttggcccagcaggcccttgcttgccaagccctgttttagacaaggagcagcttgtgtgcctggaaccatcatgggcacaggggaggagcagagtggatgtggaggtgtgagctggaaaccaggtcccagagcgctgagaaagacagagggtttttgcccttgcaaatagagcaactgaaatctgacaccatccagttccagaaagccctgaagtgctggtggacgctgcggggtgctccgctctagggttacagggatgaagatgcagtctggtagggggagtccactcacctgttggaagatgtgattaagaaaagtagactttcagggccgggcatggtggctcacgcctgtaatcccagcactttgggaggccgaggcgggtggatcacgaggtcaggagatcgagaccatcctggctaacatggtgaaaccccgtctttactaaaaatacaaaaaattagctgggcgtggtggcgggcgcctgtagtcccagctactcgggaggctgaggcaggagaatggcgtgaacctgggaggtggagcttgcagtgagccgagatcgcgccactgcactccagcctgggcgacagagcgagactccgtctcaaaaaaaaaaaaaaaagtaggctttcatgatgtgtgagctgaaggcgcagtaggcagaagtagaggcctcagtccctgcaggagacctctcggtctctatctcctgatagtcagacccagccacactggaaagaggggagacattacagcctgcaagaaaagtagggagatttaaaaactgcttggcttttattttgaactgttttttttgtttgtttgttttccccaattcagaatacagaatacttttatggatttgtttttattactttaattttgaaacaatataatcttttttttgttgtttttttgagacggggtcttactctgtcacccaggctgagtgcagtggtgtgatcttggctcacctcagcctcgaccccctgggctcaaatgattctcccacctcagcttcccaagtagctgggaccacaggtgcgtgtgttgcgctatacaaatcctgaagacaaggatgctgttgctggtgatgctggggattcccaagatcccagatttgatggcaggatgcccctgtctgctgccttgccagggtgccaggagggcgctgctgtggaagctgaggcccggccatccagggcgatgcattgggcgctgattcttgttcctgctgctgcctcggtgcttagcttttgaaacaatgaaataaattagaaccagtgtgaaaatcgatcaggaaataaatttaatgtggaaataaactgaacaacttagttcttcataagagtttacttggtaaatacttgtgatgaggacaaaacgaagcactagaaggagaggcgagttgtagacctgggtggcaggagtgttttgtttgttttctttggcagggtcttgctctgttgctcaggctggagtacagtggcgcaatcacagctcactatagcctcgacctcctggactcaagcaatcctcctgcctcagcctcccagtagctgggactacaggcgcatgccaccatgcctggctaattttaaatttttttttttctcttttttgagatggaatctcactctgtcgcccaggctggagtgcagtggcgtgatctcggctgacggcaagctccgcctcccaggttcactccattcgcctgcctcagcctcccaagtagctgggactacaggcgctgggattacaaacccaaacccaaagtgctgggattacaggcgtgagccaccgcacccggcctgttttgtctttcaatagcaagagttgtgtttgcttcgcccctacctttagtggaaaaatgtataaaatggagatattgacctccacattggggtggttaaattatagcatgtatgcaaaggagcttcgctaatttaaggcttttttgaaagagaagaaactgaataatccatgtgtgtatatatattttaaaagccatggtcatctttccatatcagtaaagctgaggctccctgggactgcagagttgtccatcacagtccattataagtgcgctgctgggccaggtgcagtggcttgtgcctgaatcccagcactttgggaggccaaggcaggaggattcattgagcccaggagttttgaggcgagcctgggcaatgtggccagacctcatctcttcaaaaaatacacaaaaaattagccaggcatggtggcacgtgcctgtagtctcagctactcaggaggctgaggtgggaggatcactttgagccttgcaggtcaaagctgcagtaagccatgatcttgccactgcattccagcctggatgacagagcgagaccctgtctctaaaaaaaaaaaaaccaaacggtgcactgttttcttttttcttatcaatttattatttttaaattaaattttcttttaataatttataaattataaatttatattaaaaaatgacaaatttttattacttatacatgaggtaaaacttaggatatataaagtacatattgaaaagtaattttttggctggcacagtggctcacacctgtaatcccagcactttgggaggccgtggcgggcagatcacatgagatcatgagttcgagaccaacctgaccaacatggagagaccccatctctactaaaaatacaaaattagccggggtggtggcgcatgcctgtaatcccagctactcgggaggctgaggcaggagaatctcttgaacccgggaggcagaggttgcggtgagccaagatcgtgcctttgcacaccagccaaggcaacaagagcgaaagtccgtctcaaaaaaaaagtaattttttttaagttaacctctgtcagcaaacaaatttaacccaataaaggtctttgttttttaatgtagtagaggagttagggtttataaaaaatatggtagggaagggggtccctggatttgctaatgtgattgtcatttgccccttaggagagagctctgttagcagaatgaaaaaattggaagccagattcagggagggactggaagcaaaagaatttctgttcgaggaagagcctgatgtttgccagggtctgtttaactggacatgaagaggaaggctctggactttcctccaggagtttcaggagaaaggtagggcagtggttaagagcagagctctgcctagactagctggggtgcctagactagctggggtgcccagactagctggggtgcctagactagctgggtactttgagtggctccttcagcctggacctcggtttcctcacctgtatagtagagatatgggagcacccagcgcag

SEQ ID NO: 5769 - DNA, 28573 bp, Homo sapiens
tttatcataagttatgcctctgacagtccacaggggccaccacctttggctggtagcagcaggctcaggcacatacacctcgtcaagagcatgcacatgctgtctggccctggggatcttcccacaggagggccagcgctgtggaccttacaacgccgagtgcactgcattcctgtgccctagatgcacgtggggcccactgctcgtggactgtgctggtgcatcacggatggtgcatgggctcgccgtgtctcagcctctgccagcgccaaaacaagccaaagagcctcccaccagagccgggaggaaaaggcccctgcaatgtggtgacacctccccctttcacactggatccatcttgagccacagtcactggattgactttgctgtcaaaactactgacagggagcagcccccgggccgctggctggtgggcccccaatgacacccatgccagagaggtggggatcctgcctaaggttgtctacgggggcacttggaggacctggcgtgctcagacccaacagcaaaggaactagaaagaaggacccagaacggcttgctttcctgcatctctgtgaagcctctctccttggccacagactgaactcgcagggaatgcagcaggaaggaacaaagacaggcaaacggcaacgtagcctgggctcactgtgctggggcacggcgggatcctccacagagaggaggggaccaattctggacagacagatgttgggaggatacagaggagatgccacttctcactcaccactaccagccagcctcagaaggccccagagagaccctgcaagaccacggagggagcgacacttgaatgtagaataggcagggggccctgccccaccccatccagccagaccccacgctgaccatgcgtcaggggcctagaggtggagttcttagctatccttggctttcagagccagcctggctctgccccctcccccatgggctgtgtcctaaggcccatttgagaagctgaggctagttccagaaaacctctcctgacccctgcctgttggcaggcccactccccagccccagccccttccatggtactgtagcaggggaattccctccccctccttgtgccttctttgtatataggcttctcacggcgaccaataaacagctcccagtttgtatgcagctgcatctgcttccacccactccccagcctttaccaaccccaggtcaatggatgatgatatcatccagccaacacctaggtaggatgaagccaggtctggggacttgcgggtttgagggtaaagattgatggaggtggccaggtgcagtggctcacacctgtaatcccagcactttgggaggccaaggcatgcagatcacctgaggtcaggagttcaagaccagcctggccaacatggtgaaaccctgtgtctactaaaaatacaaaagttagctgggcgcagtggcgcatgcctataatcccagctacttgggaggctgaagtaggagaatcacttgaacccaggaggcagaggttgcagtgagccgagatcgtgccattgcactccagcctgaacgacagagcaagactctgtctcaaagaaaaataaaaagattgatggaggtgacactggcccctgctctcaggaatcctctcatctaagggtcagtcatagagatccagaacagaagatgaggggtaagccttgggagacctggatgaaacccagaacgccttcttggaggacagcgtgctgaccctggggagggacgagcaggcagaggtggcagtgtgcagggtcgggaagaggtaaaagctactcagctgtaggaacaggcagtcctggcaggctgtggagggaggctgggtgcaagggtggagagaggagagcccttagtcgggctgaattcaggtaagagcctgctttcctgccttggtttccccacaaccaccaccagacgccaataagagatcagaaggtaaaccactgatccaaggctgcagagactgaactgtcacaaggtccagcctccaggagctgagagctctggtctttcagaagctccttgggagtgtttgagcgcctggcttacatggcaacagcacgtggatcaagccttcgctttgcttcctgccatgtcctgggttcccaaagcagcttcctcctttgccctcggtttgtcccctccacacaggcctggggaatggagtaaggctgttccccctgtgacctggaatgtggcctaggtccttctgttaattttccttaaggctgtgaactttggcaagacttcactggaggctggaaattgctacccagagaagcgcagaggtagaagccaggtcagatatgctcagagctcacagacccaggctgttctgggagacccacctgatgcctgggtgcctcccagcctccttgtggtggcagctgcctgccccacctccctccaccagcgctcagctcacaacagggttctgggcccaatgtccgcccctttccctctcctcactttctgtgccgggatttgccccttcccagggtgactgacaatggaatgtccactttcccaaggaaaaccctagcccctacccggagctgccaagctctcagaacccagtgaatggagaccacactttattttctagaatctgggatccagttctttgggcataacatgtgtgggttgtcaaagctcggcccagtcttgtccttacagccacttcctgcttaagacaggggtgttgacacatccctctggccagtttcacagaccccctagtctcctgtgagccactgcttgaggaagaccccccccacacacacacacactcttgaggataggtcattttcagaactagcgtgagctacatattatgaaagaaacataactggcagagatatagcaatgcccactgtaaaagaaccctctgcaatgccaagtttcttgagctccttggagagtccccccccaccaacccacactgtacatatagtgggagatttgggaatcggtgggggtgcagtttacctcggcatcacctaaccaaacttgactatgatgtaccacatcacaccactgctgttagcaccctgcagcaggctctgcagaaagagttcttatccaagcacagagcccacattatggaagtccagcctaaggtgagggtcatgggaaatctctttccctctcctacacctagccttagaggccacggccttttccttgttactttaattttgacaataacagcaatagctaccatttattgctaggcacagaaataagcctttttttttttttttttttttttttttgagaccgggtctcagtcagttacccagattggagtgccgtggcacaatcatggctctggctcactgcagccttgacctctggggctcaaggaatcttcctacttcagcctcccaagtagctgggactataggtacatgccaccacactcagctaattttatattttttgtagggacaagatcttgctatgctgcccaggctggtctcgaactcctgggctcaagcaatcctcctacctcagcctcccaaagtgagggccaggtttttttgtacataatattctatatattattctgtgcacttgaaaactgcactcaccagcatcatcaatcacgtcctaattgctagcccagtggatgtttggtggttctctggaatatctctgtggtgtgctcctctgcttgccctgtcttctttttcaccctgtcctccctactaggtgctgagtactgcctgatgctagagatagggcagtgaataagacagatacaacccctgccctgccctcacggagcttaaagtctagcgggaaaacagatcagttggcaaacaattttcactcaattgataagagctaccatcagctccttttaacccctccttcctggatttgtccaggtagctttcagccaatccctttcctcgacgaggtacctgtttcacatgtcctgatctttccttgtcctctcttaaggggtcttgtggattcccagtctggatgacagtgacccagactgcgaatatttgctaagaccaggagatctaaggagcccttgaagggagcctataacccagcttggcaggatcaaggaaggcttccaggaggaagggatgactaagcagctgagacctgaagaatgggcaggtgaaggtgggaagaaagaatgatccagacagaagagatgcatttgcagtggcttagagattagaggctggttcaaggcagcagacaggtatggctgggagctgcatgggggaatgtagagagaggagtctggagaattaagcaaaagtcaatcgacttgtgacaactggaaaggctccagtaagaagaagagagccattgatggcctagcacagtgcctcatacctgtaatccctgcactttgggaggttgaggcgggcagatcacttgaggtcaggaattcaagaccagcctggccaacatggtgaaaccctgtctctactaaaattacaaaaattagccaggcatggtagtacatgcctgttatcccagctacttggaaagctgagacaggagaatcgcttgaacctgggaggagaagtttgcagtgagccaaggttgtgccactgcactccagcttggacgacagagggagactcaatctcaaaaaaaaaaaaaaaaaaaaaaaatagcccattgaaaggctgtgagcaaggaagtaataaggtcagatttgcagttgagaatgatccctgagtctcggttttcttatctatgaaatgaggctaagaataataaaatagagaattaaatgagataatgcctgtaaacagtgcctggcatatagcttattattcatccagctaagaggcccttccatatgtgaagctttgctctgtgaggtctgtattacaatcacattcagttatagctaattatttacttatgtagctatctctgaaacttagaaatgaaatcatcgaggaaaaaggccatttcttgatcctgtctgtgttccctgttcccagcataaagcctaacacgtattaggctaatgtcaccgagcaaagaaagcatcaaagtggcgggtcgggccctaaacccacgatgggagataccacattcggccacaagagggcgcgtcacattttctccaagagaagctgggccgctgatgaaggacgggctccgggcctcccagagacacttcacctcctgggatcttgctctaaggaagcccggtgcgaaggaggtggctttctcaggtggtcgcgctagatgtccaaggctttatgttcggtcagatgagctgtataataaaatgaaagtgttaactggcatggacgatagctgctgcctccaccgccactagtagtgatggtttttactctggatgtttttcagttggaaaagcaaactccgccttttcctgagccgcttggatctttgtggaagcgggtgggctgcatatatacaggacggattcgtataggcttgcaccctggttccgaattttgcaaatattcgcagtctgggtcactgtcatccggactgggaatccccaagacccgttaagggaggataggtaacgatcatgacaggtgaaacaggtacctttgagttggagaaaagggattggttgaaagctacctagacaactctggaaaggaagggttaaaaggagcctgcaggtgaaggagatgcgagggggtagcaagggaaaggcaggcgtggaagaggaagcgaaagggctggcggggctctgggaaggaaggggttaacccgggcttcgccccgcggaggaaagggaggagtgaacacaggggaggtgggaactcggcgcggcctccccaaaacaacaggccgccccggcaaagcgtgggttaagggggcgggcccgggggaagccacgtgccggggcggaaggctattggttcgcccggagttgtttgtgagtggccattggcgacgtcgaggcgccatgacgagccgattggctgggcgttggaatgcccgccagggcaagggtagggaggaggcggccgaaccgcgtcgctgggccgaaaggtgcgcgagcgctgcccgcgcggggaccacaaccmaagtcgcggccgccgcagccatgcgctgggtgtgggcgctgctgaagaatgcgtccctggcaggggcgcccaagtacatagagcacttcagcaagttctccccgtccccgctgtccatgaagcagtttctggacttcggtacggagtgggcgggaggcggctggcagcggaggccggcggggcgctgggaggggcagccgggggctagggggacggaggagaagaaaggccccgagtgacagagaagggttgtttggaaaggtacaggcaggaaagagttaatggggaagcaggaaccggccggggcctctcgacggggctgctgatgggaatggggggcatttacaaggacggtcccgaggtttcttcgtgggcctcatgaaggrtcttgaagagtaaggggcagtgaagctgtgatgttactgcaggaagggagtagggtggtatccagacgcgaaagggttaatgggagttgtcctcatgactggaggagtaggggcccctcctcccaccagaggaaaccgggggtctgctggtgggagtgaggaggcagggtttagaggtgcagccatctgtagagagacctggactgggcatgaagggtcagacacccctgggcagagggtgagattaagccaggggcagttggggaagggggctctttcagaagatgccattgggagacagtgccctgactggtagacatccacccacagaaggagctggaccctagctgccccagtgggcaaggacacttgaagatcaaatctgttccggcctggcagcctctccccagctgggcaggggccccaggcacygtgatgtggagtcaagccgcctatacctcccttggctgccccagggctgctaggtcaggatcgcccactaccagcaacctgggggtggccctggggcaggagggaggctgtgccaacgtggcrgctgaaatgggcattgtgtgggccctgtctgtctatgtggtatttccatggtgccagctggggactgggggtggggggcagtctctcaagagttgagttgatagtgcctagcttgggttgcagctgcgtcaatgatgggacgggaacagagaggtggcagccgagacataaggcacctgttcctcaggacttgtctgcctgcacccctgccctgcctgagtcttgagcctcccccatgtaggaaagcctcctgggcccacccctagcccccagcagctgtccccacaaactgcaccctaattacagaaacatcacagctgtgaggggctcacagtagagtttggtcaacttgtagtactatgggggaaactgagaccttcaaaaggatgatggcatggcctgggtgacagagttggaagcagagcctgatggactggaacccagggcccctgaccctgggccaaggccatattcggtcccccaccctttccakcttgacaccagacaaggaccgaggcatttggactcctgttctcaggcccgtttgccccatggatgggcattaagacacagcagccccacatgggcattcaggccaggctgggtgaggtgggctggccagagacaacactgggagcctgcagtggtggtctagccatagcccccctcagccagagcccagtcctaggtagggatgggtttcccaggctcctttgccccctggaatcagcccctcaaagtgagtgtgctgggagggaaggaaagagaagtgaggtgactgaggccagaggcagctccaaatgggcccaggagtggccctgtccactgtggttaaaggcaagcagggttcagctggggatgaggagaggatgacacctcctgaagtgttaggcatggggtgtaggtgtttgagccctgcaggggatggggagccttgctgtgtgccccgggcaggtcacttgctctctgagccccctgttaatgaagggtttagctgacctggccgagacatcctttggctttcatagtctgtggctctgtggctcacccctctttctcctgccaggatccagcaatgcctgtgagaaaacctccttcaccttcctcaggcaggagctgcctgtgcgcctggccaacatcatgaaagagatcaacctgcttcccgacmgagtgctgagcacaccctcygtgcagctggtgcagagctggtgagacccctggctcagtccctgcacctcccactccatcgccagtgtccctgggctcagggatggcatctccaagcttttagcagctttgagggtggggtggggacagacaggagacaccaaagccccaagcgcttggagttgcctagggtcacgtgggaatctgaggccagagcaggactgaggtcaagctcctagtctctgtgtctagccctcttcttaccacccacctttctctggaaacacaggatccacctaggaaagcatggttttcacagccaaaaccccaattcaggctgatgtcagcattagccagcagcccagacctggaactccagtaactgttaggcagtatttatttgggggtaactttttgggaagcagaaacaagaagtaagttttcaaatacattatataacccaagctgcaagacagactgttttggatgttggaaaatactcagatacacacaaggatggcacagtaccttcccgaagagctttggaggggcaaagaccaaacgtttattgcgcactgcagcaggaacagagggaaaggctcagcagagttcactcaagaactcaagttaagtaactggatgaaattagccaaaggccagtcacgtgaagaataaacaagggtgtcccttgtcactgggcatgtaaatagctaatcctcattgactttggtggcacccttgcagaaatcttgggctggttcttttggacttgcagtatgatatagttgtgatttccctgtagactgaggagcacgtgcccacatgtattctgagctcaaagccatgcgaagtcacagcagctgccctcagaggcctgtgatcttgagggaaaaataatattcacccaggcagggtgaactgagtccagcatagtgctaggagcagggagctgccaaagagttcgttttatttaaattaggaatccaaacattattttaaaagaacactgatatttttccctcattgtggaagtgtaacaggttcacttgacacttgcaaaatgcacaatagtagatagaagaaaatgccaaccactcccctccaccccctaaccgaacacagttcagtttcgtcagatgtagtggtgcctttccagcgctgttttctatgcatggacctgtggatatggggcttattctaattaaatgagatatggtgaggggcagtgttgtacacacaaggctaggggtgtagtgggtgcaccatgaatgtttgttgaatgacacgttgtggggcagttgctatggacatgcagaggaggtgacttgtcactggaccttacagggtacctaggcaagctgagagctaaaaggaagggaagggcattccaggctaaaggaatagcctgggcaaaggtgtggagacaggaaggggcctggctaagggarytgagaactgactttctggagattgtgctgttagtgtgggctgtgaggaaggggtggaggcatgaggcacagagcctgatcttcatggagcccaaccaggtcaccccttgctgtgccttgcctctcggaggtccaggacctctgagccaaccaacacttcccatcgtgggtggtgtggagtggtgggaaggagacagaaggtaccatctgttctccctggccctcctccggctctatccggctgcctgacctggctgcctctccacctggtccctgactccagggcaggacttctcaggcccctccctggacaccgtgttcctgggagagctgagggatgcaggaggagggcaggggcctgctgagcttcccatgactcccccaggggcccctgcagagtcccttcctgaaactcagtgacacagataagaggttggcctgacttattcttccgcaaagcttgcaagtaatgtcaagtaacagcaggagggaatgaagttagacaagagagaacacttcctcaatgaaggattcagcttaggccgggcgcggtggctcacgcctgtaatcccagcactttgggaggccgaggcgggcggatcacaaggtcaggagatcgagaccatcctggctaacacggtgaaactccatctctactaaaaatataaaaaattagccgggcgcggtggcgggcacctgtagtcccagctactcgggaggctgaggcaggagaatggcgtgaacccgggaggcggagcttgcagtgagctgagattgtgccactgcactccagcctgggcgacagagcgagactccgtctcaaaaatgaaagaaagaaagattcagcttagaggagagcaggccgagggattgctaaagcatcccaacgcrctgaagagacagcctgccaagaatgtttccagagagaatgagcattggctacagcaagagagactgaggtgtgaagacaagaaggacttcccgacagggttgaggtggctgcctgtaagagagtggagacctctttctccaggagcaacagcctgccagctggaatgatggagatgggcaggttctaggtgcctgagaggaggggggagactttaccagggagcttggcaagagggcctctagcctgagtttgatgagtaagaagcaaaccctcctttctggaaaacacaagagccctcggcagatgcagttattagtggtcatggttcatctgtggtcatagaaatggagtttctactcagctggggagaggttctaggcagagtcactgggcaaggtgagaattcctggttctaaataaacctgatacatttcaactggacagacttgtgatagtgggccctgttttggtggagactggacggggagggaaagtcccaggtttggcctcagcatgtgtgactttgaagcttcatcctgggcaagccacatggcatctctgagcctcagcttcctcatgtgtaaaagggggacccattgtgtttgtaagggccaaaggccagtgctagatgtgaaaagtgtgcagaactctaccaatacaaggcatrtccccaggctgccsggcagcaacacctccagcccacagaggatgtaattgtggtgtggcttcttgggcaaggtagtaataaatcatgataataacaaaagcaaacacctccaaaggctggctgtgtcccaggagctgtcctaagtgtctacgcgtattaactcatttcatcttcgcaaccttatgaggtagtctttgctatcatcccattttctagatgagaaactgaggttcagagaggtgaagaaccttatctgagatcacccagggactaggtggtggaattgggattcgaacccagctgttggatttggagactggattcttgaagggaaaggagggagcctgcactctgggcagtgatgtggagtcagagatttccaagttcatggtgcaagtctgtgggagagcagaactcactttacaaaattgttgacagccggtgttgttagagacggaaagggacaaccccggctcctctccaggcgtggagtctgtggggatgtgcttccagaaaatgcagggttaagcaggagctgcagagtagaatcaaatgacaatgactcactgctgtcactaacaggctctttgtgggggctgtaggtgggaggcgatatggccggcaccttcgcacaaacctcccttgcccgtcagcaaggtgtgtggaccccatacagggggtgtggcttgggtgcccaggacctgctaaagccacacgagctctccaaacccgtcagccgctccttgcatgaccgagcaggaccgaccacttactgcgcatgtactcgaggcatcatcttttctgtacacccaggcccaygaggtgcttactcccatgaaccccattttgcaaatggggacccgagggactcggtggcctctttagggcacaatcagcagcggaacccaaacctgcctggctcagaggctccggaggcgggacaccgccacctctcccccaagtgcagcgagcaccctcctccccagcctttgccttgtttacaccctgctccccagcagctgtggatacgagtgcacagggcacaccctcgcacacacccacaggcatgcacatgccacatgcacacaattacacacactcccccgctggctcagcaccccctctgctcccacacagggctgcagggccctcctcccactcactcaccctctcctccygcccccaccgcccattatcagccccacactctcagcaagcctcctggcttctgcctgcatccacccctcctccttctcattcctggggctctggactggctctggagccctggaaagcagggtttgggtggatctccacattaccttgggctgggcttgggagctccggatctcaccaagggactcctgggggccttgattactgcagaggtcagcaggcccagagaccccagcctccctgcaggtccyggggaggggtgggggcaatgcctctcccgcctgttggtgcctgtctgtcactgcaccactgcttcaggcctcccttatataagcccagttctctctctggcctgcaaggggtgggcagcccagaggccagcgccactcgtccccaatctcccttcttaggatcaagaaccggcccaaggttgacatttggtgcaccaggcccctgaggggcttcagggcaaggccagggacctcggggaaaatcctcatcctctcccctccattccaagagtagcctgggccccttgccctggaggagccctggccctgtgagggaggctggcaggcgctgcccgctgtcactccatgccggtgccctttgctccacttcagtggccacgtgaccaggccccattcctgccctctagggttgttgagcagccacaaaaggggtggtgccagcagctggggcactctccctaagtgagactgggactttgaccatgcccacccccacccactgcccagcacagtcaggaagtggcttagcctcccagctcccacccgcttcatccccacctgcctcctgggaaggggcctcaggccccactctgcagtgggtctcctccccctcctctccccacctgcccctagcactgcctgtgtgcgggccctctctcccctaagaatcatatgagcatgaaggtctattttgggtgcgtttagggagcaagggattcggagccacataggcctggatgagagaatctcagctctgtgtgttaacttcctcatctgtaaaatgggtccagcagtagcgcccacctctggggttcttgtggaggtgaaagtggggcaggagggaagcacagggtggacctggctattggtacccagtaaatgccaccatcaccatcagcagcggcatcaccgtcagggcccgtgttggccgttggccacgtggtgtagacttggagtctgcaagagctaggtttgaatcccaacctgctgcttactatgtggcctggggcatatcactaacctctcagtgctggtctcgttgtctgcaaaaacagggaaataccttgtgctcatcaaggctgttggcagatgagagaccctgtgtgggactcggcacaagtgggtgttagtggtcgctatgttcttctccagggagacaggtgaggtcttaggagtgccagcctgattgtctgctggggtggcagggatggtgatgggggctgagagaaaggctgatcttttctgctgttggggcccccagccccatcagcagccrcagctcctcctatcgggctctgtgcagagctctgggtagggaggggtgggcggtgagctctgggcctgagacagcccccttcgtgtggcagtggggcaggtctccagggcacaggggctccaacatgctgtgattcagagcctacaagcagtgggagagtatcagatgctgcctgggggctcagaggatgcatgcagctgttgacagtgtttgagccaccagccataataagagcaagcattagagagtgctcactatgtgctaggcactgtgctaatcatcacatggaattctcaccacaaagcagtcataaatagatataacaatccccattttcctaatgagcaaactcaggcccagagaggttccatgacttacccagagccacacagctccaagtgcttaaagagccaggtctgggtccagagctggttctttcactctcttctctgtcaggcaagagcgagaagagcagcaatactaggtttaaggggaagggcattcctagcagagggcactgtgtgaacagaagcgtggaggtgagagtcgagcagaatcagcactctggagtggcaagagcgctggagactcgggggcttcatcatcccacttactarctatggggctgcttacgcctccctgggggaggctgtgcgtggggctgattcctgcctgtctgcctgttacaggttacagtgaaggccagagcactgtggacatgggaatgagtcctcgtgtggaggggccttttctagaaatactgttgggcccctggggcccttggcactgcagrgctctaggtagcgcccccccttcctcctggttataagtgtttctgccagagagaggctcttcctgccttccccaaaggaacaagccacagactggacatgttagcagggaaacaggtcatggctccccagggcacggggcacagtggctccagcttggtaccatctgccaccacaggtggacctgactcccttgcagaaggaggcctgctgctgtccctgagttcagggcttattttttggggggacagagtcttgctctgtcacccaggctggagtgcaatagagcgatctcggctcactgcaaccattgcctcccaggttcaagcgattctcctacctcagcctcccgagtagctgggattacaggcrtgcaccaccatgccsagctaatttttgcatgtttagtagagacaggtttttgccatgttggccaggctggtcttgaactcctgacctcaggtgattcgcccacctcagcctcccagagtgctgggattacaggtgtgagccaccacacctggctaagttcagggattcttgatgctccttttagagcatcaagctcttctcttagcccagggaaaactggcctccccatcaggcctgtagatgggaggaggtggcagggcatcacccactgctacctggccttttgcagtagagtgagcttctctggactctccatgggccccagccccacctggggacagagccaggcacgcccaccccacctttgggtccttcccacctgccattttagaatccacttgccgaggcaggtgcctggcccagatcaccccagctcaggggtcactctgggaggccccgtgctgtctcctctgccgggggtcactccaggaggccctgtgctggcccttctgccattgtgcccactggatgcaacaacaccccggcggggagaaacattaggagctgtttccacactggggctcagagaagttgatgcacctccctgccttcccccactgcaggcgctaggtccagtctccctgccccatctcagcctcagtctcctgatctgtgagtcctcttagatgggatcatctccaagccccttctgagaggactattctaggattccaaagcaaaggtgctaaacgggggaccagcaaatttgaagttttcttgcataactgactgggttgtcagggagactcacatacaaatgaaatggatggagaaaaatagtgaggcggcttgtcggcagctctgtgtggggcccgcgtaggagcaggacaagagcaaggcccagttgaatgaagtgggtgaggaggggctagccacctgaagctgaggctgtgtcccctcccgcccccacacaggtatgtccagagcctcctggacatcatggagttcctggacaaggatcccgaggaccatcgcaccctgagccagtgagtgggggccctgggtggggcaggaaggcaggtgttggccaggggcatctggggttgcagcccctggggcagaagtacagcaggatggaagaaaagacccctgccttcagaaacatccagtctgagtggggagacagactctgcttcagggagccccaagtttgatgrgagagacatggactccattctcactgttccctgagcccsgtgggcaagacccaggccctgccatggggaggatgagaactctgggctttcragtgggaagcctgccrgcaggcagctaaaagatcagagtgggctttgggaggagcagggagggcactgggagtccatcggattgggaagggtagagcgggtgaagacaccgtggagaggggagtcagaagcggagaagagtctgggggtgtcccatgtgaacatctgccctgccccacaggttcactgacgccctggtcaccatccggaaccggcacaacgacgtggtgcccaccatggcacaaggcgtgcttgagtacaaggacacctacggcgatgaccccgtctccaaccagaacatccagtacttcctggaccgcttctacctcagccgcatctccatccgcatgctcatcaaccagcacagtgggtgccggccacagcggcggggagcgggcggtggdgggggcggtgctggggcccagggccgggctgctgaggggacctagaccactcttcagaaccccacaaagggagtctttgaatagttactccagtaactatggagttaatggctccaacatggaaaaataaaatttttctttctcattgattttccatttcaaaacgttttgttttcagtgtttgcaaaatgtaaaattatgtcacatctttaaaagaatgtttaatttagtatttataaaaactctcattatgttcaaaaacaayttgttgtttagagtttcttattccaggaggattcactatgattttttgagaagttgtagccagtcataaattaaacaagttcctcatgctcaaataatttccaaagcaaggtggtaagagttctcttagaatgttatagtcaaagaaaagaataaatgcaatgtggagatgtgatgtggggagagacctctgaaaagacgtctgtttcaggtttgcaaaggtttaaaaacggcctaagccagggctggaggggtcaggggtcagggaagggaggacagaagcgggggagtggggcagctttaggactggagcctacagaggcattggaggtgaaagtagaaagaggaggaaagcccgggggaagagggagcgctgggacagactgcagcccagccaacagcatcctcccttcctgcctgcagccctcatctttgatggcagcaccaacccagcccatcccaaacacatcggcagcatcgaccccaactgcaacgtctctgaggtggtcaaaggtgagccattcccacggtgcctggcccgcagagaagccccrgggacccctccaagcttacctggccagagggtgactcgttcctcagtaaggggtgccatggatttaatgctggtggtccccagtatcartgtcaggaggactgcctgctgggtgggccacccatgccctgaatgaccccatcttctctcagatgcctacgacatggctaagctcctgtgtgacaagtattacatggcctcacctgacctggagatccaggagatcaatggtgagtgagcggggctgtgtatgtgtctgtcttggggctggggacgtggcagggcaaggtgagacggggagtcaggagatggactgttttctagacaggggagaagcagagttattatattattaattcatttgataaatatttgggctgggcacagtggctcacacctgtaatctcagcactttgggaagctaaggcaggccaatcacttgaggtcaggagtttgagaccggcctsggcaacatggtgaaaccctgtctctactaaaaatacaaaaattagccgggcatgatggcacatgcttataatcccagctacttggaaggctgagacaggagaatcacttgaacccgggaggctgagactgccgtgagctgagatgctaccactgcactccagcctgggtgacagagcgagacttcatctcaaacaaataagaaattgagtgaatgaatgaatgaaagagtaagcaagacagaaatggtccccattctcgtggaccttacatttttggtgctagggagattgcggaatggagccttcagccaattaacaagtaaataaacaagaccatctcagatcatgacaagtgatgggaaggaaataaaatggggtaactcaacaggggtagggaggaggggcatgttagatggtgtatcagcttggctgctttcctagaaccccaataccagtggcttacttaagagggaggtttccctctcgccagccccttgctggacaggtcagggctggctccccacccctgattcagttctagcctggaggaagggaacaagggtgtggaaagcagggcccaagaattgaatgcatcacttccatgagtcaccagctaccccagctcaagggaggctggggatttagtctctcgctgggcagccatgtactcagaactttgtgggagggggtgcctcctttgggtaaggtggttgagcagtgacctcctgacggtttcctgacccttggtcttgacttgccctgtagcagccaactccaaacagccgattcacatggtctacgtcccctcccacctctaccacatgctctttgagctcttcaaggtgaggaggctgggagccggtgctttgcggggagcgtgagtagggctggcttctcccatgcatctcttacctctgcccctccgcagaatgccatgagggcgactgtggaaagccatgagtccagcctcattctcccacccatcaaggtcatggtggccttgggtgaggaagatctgtccatcaaggtatgtgaccctttgaccttggggaccagggagcagtagtgggggcttccctcctgccaggagacgggctttccttttctcctacatggtgggcagatcctgggggtggggaagaccatgagaaggtcaggggtattgggcggggtggggaaaatgagctgtaaagaatccctgacacatcccatctctcccagatgagtgaccgaggtgggggtgttcccttgaggaagattgagcgactcttcagctayatgtactccacagcacccaccccccagcctggcaccgggggaacgccgctggtgagatggcttcaccccagcccctcccacctcctgagggaggcttctctcctcctcactcacttccttatctccctgctcactcagcttctgtgtggccgtctgtgacagtcacctgtcttgaatctgggcccccgcacctcccacatctccccagtctgcacagatctcacctgtcggatgtctctctgtcacctttcctccatcttccctctcttctgtagctcccaaacccccaatttctacctttctcctggtgttgtccaacttgtcagcacctccctgttagaaaacttgagactcaaaggagccgtggggcctgctctgacttcctggcccctgagcggaactcctctctctgcccaagcctccctcccgcattcatgattgccccattcaccccacacacacttcttacctcagtgtcccctcccacatgtcccctcccagctctgggacccctgccatgtgaccccagctccacacccttccctccctgcatcagtccctgcagctccaggaggcccctgccagcctcctcatcctcactgccttcctgccccgctgcaggctggctttggttatgggctccccatttcccgcctctacgccaagtacttccagggagacctgcagctcttctccatggaaggctttgggaccgatgctgtcatctatctcaaggtgagggcccttcccgcagagcccagctggagaagagctttgctgataggacstgggcagccttggccagctgcgagctttcctttccatccccccagtccttccctggccccagactctgagaatccaagcaaagctacagttcctcaacctgaagaaccctcaacccccagacacrcactgcttgtcagggaatttaggggagtctgtggtctatgattaagacccctgtgctgggaacccttgacttgttagacccagaaggaaggggacaccctaggtcttgccattcagttcagaggagaagactgaggcccggagtccgtgacttgctcagggtcacacagcccagcctcctccccctccctctccctcccttagagggagctgcttgcttgaatgggcaggagcgggacacaggagggaccrcccttttgtggtctttccaggcccccgtgtctggcagctgggctgccgctgagctggggtggggtggtctgctgaggagtggacaaggcacagggaggtgggaggggctgaccctgacactccccaggccctgtccacggactcggtggagcgcctgcctgtctacaacaagtcagcctggcgccactaccagaccatccaggaggccggcgactggtgtgtgcccagcacggagcccaagaacacgtccacgtaccgcgtcagctaagggccgccrtgcatctgcacctgagaggacggactgccgcctctgggtccccycaccgtggtgcccctcaccatcctcctggggsagcagggggtgggttctccctgatgaccaggttctgtctctatggaagtcactgcggtgataggtctgtgatggtccctaagtgccagtccatctctgtggagayccctcggtggcctccctrtctctgtgggcgatgcctgagggttagggatgtctccaccctgatggggtgtcccagagacattttcccatggcagtcctcctctctgagaccagggctgtcacttttctgccaggggtactgggtccccctcagcaccctccacagcacaggccttccaagtggatgtcccgttgccttattcccccagcccacaaaggcaccctggccttggyctgctgaagtgttaggaagagggtgggtgccctccagacctggggactgagtggggaaaggagttacacccgtgagtggggaatgaggctggtcctgcagcctctccctccgctcagggcttgaaggtcggtggcggagggggtggctctcacagggcccaactctaaagtggaagaaccttgttagaccgagagcttgccatccagccaagctgctcgaggccctgcagtggccttggcaatgtctgtgccacctcctgagccctcccagcatgtcctcacatgctcatgcccacccgctcctccacaagcctagtccatcctgcctgagctccagcccccagcccccactgtgcccagacatgtgtgctcagggtggctttctccctaggaccttctgtgtatatagttagttttataaccctgaatgcccccacccttcccctaagcacacaggggttaaagctgtgtgtccctcccagtggctgtggcagtgacagtgacacccacacccacagtaaagaggagactgaatgagactggcctggctgcatccctgggggaggggacccacacgtgcgcacgtacacacgcacactgcggtgccctgtgaccaccacatgacgcaccggggacgtccggcccagctcaggactgtgagtaaaacactgggcaaagccatctgttcagaacgccggatggcccagcacctggtgacagacctgttgtcccaccatactcagggcccagcagagtccggccaacccaacaactggagcagacagaaattctggtcactggcacatcataaggatttattgaaataaattgagaactgcctccccttcacatgcaggtgggcacccactakagctactgatggctttaaggatgtgggtgccttccaacctcccatggccctgccaccaggcccagatggtgccagtgtcctcatatctgtttccctccgaagcccctctcccagcacagatagcagaggggggataagggctgagtcccaggtacagggtgctggccgtaagccacagcccctgggcaggaatgagggagccagcatgcattggtgccatctgycgctctgtctgggcagatgggaggagctggaggggtttccaagcrggagcccccaggcctcatcggtaactctgaccagtgtcctggaagcgggactagctgctgaccagcgccacacatgaacacttcctccaaggacatttcctaaaaaggacacatgctgtccccaggctgctggtaaactccacccccatccagggagctggccccagccctcagtgtggcccagggaagcagagcttgcaccgcctgccagttctgagcccactgattccctgacaatgcctggggcagatgggggagggctgatgaacctttccaatctcgtagctgccggggacccccaggttttgcctctctgcctggctggggtgagggctgaccaggtcagcagctcctaggccttggctggtggaagtggtgtcctctgtccctatcagttcctgtttgctcagctcccaaagaggacttaggtgccctctgaggaagcagcaggaagtgaagggagtcctggcttggagaatgggtcaaagaccaggtcttgaatgggccctgagaggcagacctgtgtggtgtcatctcgccccctgggacccacaggacagaggaggggagagggagaaggggatgttcatcctcccctcttgagtcctggcaaagactgcactcgccccaggctgctttctctgcgctcctgttgaggagtttggctgggagtctaccctgagtgcgacttgctgcagcgcccactggcctcttgggggagcaggacagagctctcccaccacacagccccctggaagagtggagaggagccgctcccacatgggctcctgctgaaatgcccagcccagctctgagccctggggcccggcctcagggcctctggcaggcaagcaggcaggcaggcctcctagctcccctccaccccagccccatgatggcctgagggcaatgggacagcctgacccaggctcccagacttgcctcagccctggcctctctgccctctccccttcatctgctcctcccccaggaactctgtgccaaacaagtcctcaaaataggatttattactaggccctctccctggggtctccctttctggggtctctgggtctagaccaagtgacagggtaagagagagcatgtcccccctgagagcgtgggaccaggctagcccaagtgcagcgcccaggtccagcctccctggtgaggcctgtgcccgcggagccagtggctgcccctgccgggtgccagcgcctgtgcaccctcccctagctcttcttggcctcctgctctcggcgccggagcttctcccgctgccgcgcagccttctcctgggccttgcgctccttctcggcagctgctgccatctccttcaacttgcgcttcaccagtgcccggtcatgagagttgctgagccccaggctctggggaggagtccggggtgagggagagagtcccagaaccttcccagtcctggcctcccacgcccaggctccttttgccccaggtgtactctgtggagctccaaatcctccctggagtggagcctccgcctcccacaccgtgacctgcccatggatcagaacccccagagcaagaatttggaatgagtgtggttgggaaagatgagggttgggggtattaggcgcttcctcctcctcccccaccattcctccactcagtatttcagccttggcccggacctgcccaacctcctgaggcccagagatggggagtcacttgcccaaggtcacacagttagtgcccaaggaccctcctcacttccagagacttcctgggggctcttttcaccatccctgccccaagcaactcagcagagagcaggagacaggccaggaacctcccagcttataggtcagaggccaccacccccttcctacagcctccccctgcccactattaccactagcctctgagacagaatcagaccaagctgaccagggggagatgtggcttcccatgataccaggacactcatatgcatcaagggtcatcctagagggcaaggtcagcctggagaccagggctggagcttgaaggtcacactgaagtcatggactagagtttcaagtcaaactagggattcatgctacaactcaaaagattagaccaaggaccttgcctagaggtcagaggtcagggtggtggccacagatggagtgaaaaggtcagcccaggaggctgggctgagggtcaaaggtcaggatgagggacttcaaatccttgaaagtcacctcaagtaactgggctgggtcatggcccttccactctgacccacctttagtttgcttccgtccagctgcagcagctgcggcccgtctacctgccgtgcagcaaactcagcagcatactgttccaggttgaggctctgcagccactggcccacctgctggctggtccagtggtggacaggggggaggggttcatccaggaactgggcagagaccaaggagagtgagggggaggcttggcctgtgacctgagcaccttgcagagtcagaggtcaggactccgtgggcaccctgggccagccttgctcacctcatctgaagactgagacagcgtgtggtaggggtaagaacatttggcctcctgccagggcccactggggatcttggggctgctgctggggggcgtggagtcatcactcagagtggattcctagacagaaaaaggtgcatgccactgaggagagttcacccccaacccaccatccctatctgggtggagccgaagtcctggactaggcaccaggagttgctcagtgcctcctgtgcatgagccaggagctgggcctgcacacaggacatgataactcatgtcaggcatcaggacctgaagcctttgggagagcaggcagccatctggaggacatggggctagaaccaagccaggttagtaggaatggaggcggtctcaggcaaggtgtcacttcctacaggcagaccaccgagattcccccaggctgggtcaggtgtctctgctatgcgcctcccgcctggccttagtaccccagctaataagtgcctgattagaggtctttatcctcactggactgtgagctctaggagggcctgggttgtatcttgttcatcatggtgtcccagtgaccagcataagggaaggaagaaagagaaggaggaaagaaggaagttccaggtccgaagggattctttcttcccagaattcccagcttctgattttctcctctgcccagctgcacgtaagaaacagaaccgtagaacaagtactgggctgggggttgtagagcttggcacctatatctgtgccagtctgtgggcaagccccttctctctgggccttcctttgctcatctgtacaatggagatgagcatgccttccctccctacttcaccgagcctttgtgagagtaaagcagaaacgcatttggggctttgtaaactgtagagggcgctctgaacataagcagttgctcatcattgcttctcttactcgtctcacatcacatagggttgtaagctttcagaccactaggttggggtcctgtttgtctctatatcccccaggcctcaccctaccaagcaggtggcccagctcctcacacaggagtggggttagaacttaaccaggcagaagagttagcaggaatgaaggaagtctccagctgggtgaacagtagggaatcagtgtttagtgatttgttgaatgcatgaagcattgactgaatcaaggaatgaactactcagaatatgaaggagtggaagagtgaacgaatgaattcagagaatgcatgaagtaacggatcactgcatggctccatggatggacaaattgattccaggaatgtctgaatcccagcctgagccaaggtgaagtacgccctcatgtcacctgagactgggggccagtttggggacaagaaaggcatggacttacctgggaagctgacttcttagggctgaagccctcgtgtttaggggagcaggtgggggaggtggtgctacccgaggatgctgagcccttgccgctgtccgtgaaccaggaaaaaggcaggaacggggagccccctgacctgccggacccctccactgactccctgcagagagagtgtccagcatgggtgtgggtacagaggggaggaccagagcacatggggagccaggggcgggagctgtgggtgggccgccatgggcacctctcacctgctgcccatggacagtcggttgctgcctttctccttccggctcttgcccgtggatgctcggcgcagggtgaccctgtggggaggcagcaggaagtggggcagggctgcccactgtgctaccccttaccccagcagctccaagccctgcgatctagccccgcctccactcaccccaggtccaggaactttcggcgagtcttcttatcgaggccgatggtggggctggcgggctcaggaggactggcgtcacggctgtcatctttccagggagagaaggaaggaaactgcctgtttgctgccctgcctgcctccttcggctgccagtgtggggtggtagaaattctcttgacttagaatcaggcatcctggctctggtggccttcactagctgggtgtcctaggataagccactttacctctctggccttcctccattttaaatatggggataataacatctacctgcttcatgggacctaatgggatgcttatgacagccttttacaaactataaaacgttccaaaaaggtaggaatcactaccatttactcaattttatcctggccaacttttttttttttttttttttttgagacagagttttgctcttgttgcccaggctggagtgcaatggcgtgatcttggctcactgcaacttccacctcccgggttcaagcaattctcctgcctcagcctcctgagtagctgggattacaggcgcccgccaccacacccggctaattttttgtgtttttagttcagacagggtttcatcatgttgtccaggctggtctcgaactcctgacctcaggtgatccacccgcctcggcctcccaaagtgctgggattacaagcgtgagccactgcactcggcctatcctggccaacatctaaccaaccttccaaacttggctcaaatgtcatttccaggatgttcctagccaggccaagcatcctggtgtatgctctcccgccatgctgccgcacacatttcccaaatagcacttgttatagtttataactagacatttagttaagggatgatttgattgggtttttgttttgttttgtttttgaggcaaggagtgatcatagctcactgcagctcaaaactcccgggttcaagctatcctcccgcctcagccttccaagtagctggttctacaggtgcataccacgcggggctaattttttaattttttctggagacggtctcgctatgttgcccaggctggtctcgaactcctgggctcaagcgatcctccatctcggcctcccaaggtgttgggattacaggcgtgagccgccagccaggcctgatttgattgtttctccactaaaccactatgatgataaagactgcatgtgtttgctcacctgggtgtcccagagcccacaggatctggcacttagtaggcgctcggtaaagaatgagtgagcggcggcgtttactcttcacctcccccagccaccctgctcagctgccccttccgcggctgcggtgcgcgccgggaccgggagggctgctgcgcccgggagcgaccagcaggaggtgcggcgctggccgcctctcaccttcgctgtgcggctctgcgcgcgggtggcggcgcacgaagctgggggagctgtcggaggagggcgcggagcgcggcggagagcaggaggcggcggccaggccctcgtgcgacgcagcgttgtgcaggggccggtagcgtgtgagcggcgagggcggcggctcgtcctcgtccaggctgcgccgcaaccccggaggatccaggcagaaagagcccccggccggggaccccgggcctgagtgcaaaggcgagcgcagccggtgcagggggctcccgcagccatcggtcacctggacgagggggcagccgctcaccgagaaccctcctcctcccttcccggaggagctgggagactttcaccctgtaaactgcgggccctgagggtccttccggggcctagagggagggtttcctcatgccttaggcagcggggtggctggagagtgagaggtgggaaacaggaactttgagtcacacaggc

SEQ ID NO: 5770 - DNA, 17114 bp, Homo sapiens
aatagaggtcagaggcgggggctttctgccctcaagtgccttttccccctgggcaggtatgtggaggggatcgtccacctcttctaccaaagggatgacatagtgaagggggaccctgagctgcaggcctggtgtcgggagatcacggaggtggggctgtgccaggcccaggaccgaggtaagatccattctagagacagaagaagctcctgggagactctgccagggcgccttcccagccctgcccttctggggacaggaccccagcctctcatcacgcctcccttcctccctccacacgggaaagcatgtgtatcccattcccacctcctccgactcaggacaattctagagacccaaggactgtcctcctcagagaccctggccatcaacccctagtcccactacaccccagtcacagatgcccctgaactgccatatcctggggccccccaggccatatccacagctgggaggggtctgcacagtccctgctgggctcatattctctcctgatggttccgttttcctaactgaggatgtaaatgggaagattttccctccgaagcccacaaggacccaccctggctttccctccctctcttcctgcctgccactgtgcagcacgcacagagggtccaggaataccgcacgcttgctacagtgcaaggtcagctcttgatgcaagctcaatcctatacatgctttgcctcaaacccaaactcagcaccctgatccttggggctcaggtttctttggctaatccaactcttccaccctaaccaccccttggccaaaatctagccactacctttagtcaactctcactccccacatttgaacctctgaggaagaaaaagcctttgctgagctcttaggtttaatcacacaggcaccagcctggactgctgtcactcatccttcggcccctccccctcacacttcagatctaggctgtgaataccatcctctgcctctgtgagacaactacagacatttactggggagcccttatggcgaatcctgggaatgtggcaaacctccttaccctggagggagcctctccctggggaatctgcaccaccctacccttccaggaccaaactctctctagttcttctcagtacagtcccttaggctcctagcagtttgggctactacaacaaaacactagctgggcacagtggctcacgcttgtaatcccagcactttgggaggctgaggtgggtggatcacgagctcaggagttcgagaccagcctggccaacatagtgaaacccgtctctactaaaaatacaaaaattagccaggcgtcgtggcacgcacctgtaatcccagctactcgggaggctgaggcaggagaatcgcttgaacttgggaggcggaggttgcagtgagctgagatcacgccattgcactccagcctgggcaacagagcgaaactccgtctcaaaaaaataaaataaaaaaaaccacacaccatagactgggtggcttataaacaacagaaatgtattcctcacagttctggaggctgaaagttcaagatcaggttctggtgagacccctcttccaggctgcccacagccgatttctccctgtatcctcacacagcagaaagatagcaagctagcactctgtcctctgctcataaaggtatcaaacccattcaggagggctgcaccctcacaccctaattatcatgtggggctccacctccaaataccatcacaataggattagatttcaatataaaaatttttcggagccaaagacattcagttcatgacacatgttaactttaacctccactaaccaccctcccccctgttctctttcagttctcatagctcacttttgtctagttttcccagcagacattttagaggctaaaattaaaaatgccatgggattagcagtcaggaacctgagttcaagatcagcctctgccttttcccaactatgcagtcctgacagtttattctctatgggctttgattttcttacctataaaatgagagtaattatatttattccacttaactgataagattattgggtctcccagcactttaggaggccaaggtgggcagatcacctgaggccaggagttccagaccagcctagccaacacggtgaaactccatctctactaaaaatacaaaaattagctgggcatggtggtgggagcctgtaatcccagctacttgggaggctgaggcaggagaatcacttgaacctgagaggcggaggttacagtgagccgagattgtgccactgcactccagcctgggcaacagagcaagactccgtctcaaaaaaaaaaaaaagattatcgggtctctgagcccccatatccactgcaaaatgagtggactgagataacctttgtgggagcccctctcagctgtgacactggaaatccatgacttattccccacattataacgcagacacttgtaattctgtccgggaataggattacgcattcctaaattatttatttattttttaatttttaaatagagacaggctcttgctctgtcacctgactaccagcaatcctcctgccttggcctcccaaagtgctgggattacaggcatgagtcaccgaccacgcatccctcaattggtttttttttttttttgagacagactctcgttgtgtcgcccaggctggagtgcagtggcgggatctcagctcgctgcaagctctgcctcccgggttcacgccattctcctgcctcagcctcccgagtacctgggactacaggtgcccgccaccacacctggctaacttttcgtatttttagtagagagggggtttcaccgtgttagccaggatggtctcgatctcctgacctcgtgatccgcccatcttggcctccccaagtgctgggactacaggcgtgagccaccgcgcccggccgcatccctcaattcttaaccactttttgaggcaagggatatttggtcactcagaacttttcagcccccaatccttccataacaataattattacttacttattgagcatttattacagaccaggtgattttgatacatcatctcatttataatgtaggtatcgtccatattttacaggtgaaaaaaactgaggttcaaataggttaagctggcctatggtaactaagtgtaagtgactgagccaggacttaaacgcatgtctgatgcaaatacgtctaaataaaataaacaaattcatcaattctaaaatatgggcatcccaaaacaacagcctttgttcctctcctcttatgctgtagcttctaactgctattcctttcctgcccaggtttccctgtctccttccagtcccagagtcaactctgccatttcctcaccatgtgcgtcttcacgtgcactgcccagcatgccgccatcaaccagggccaggtatggacagctgaaagcccaggtccctgaaggcaaggtgacctgagggagagatgggagttcaaaccctaagtaccagggttctagggttacagtttcttcctccagctggactggtatgcctgggtccctaatgctccatgcacaatgcggatgcccccacccaccaccaaggaagatgtgacgatggccacagtgatggggtcactacctgatgtccggcaggcctgtcttcaaatggccatctcatggcatctgagtcgccgccagccagacatggtgagaggggactctcgggagagggaaatgacagttggaaaggaaacatcagagtgaggggctgggctctaggtgcgtttgtctttagaaactgactgatcctttgttctgtctcaggtgcctctggggcaccacaaagaaaaatatttctcaggccccaagcccaaagctgtgctaaaccaattccgaacagatttggaaaagctggaaaaggagattacagcccggaatgagcaacttgactggccctatgaatatctgaagcccagctgcatagagaacagtgtcaccatctgagccctagagtgactctacctgcaagatttcacatcagctttaggactgacatttctatcttgaatttcatgctttcctaaagtctctgctgctaaggctctatttcctcccccagttaaaccccctacattagtatcccactagcccaggggagcagtaaactttctctgcaaagactagatccttttttacgctttgcagaccgcatagtcactgtctcaactactcagctctcctgctgcagcatgaaggcagccacagacaacatggaaatgagtgtgactatgttccaataaaactttatggacactgagatatgaatgttacatcacaaagtagtcttcttttggtttattcaaccatttaaaatgcaaaaaaaatccacaaacaaatgtgctttgtttgagacatgcacagccaggctacagactggatttggcccttgaaccctgcactagcctgaggccctgaccctacttccaaaacatccaagatcatggagcagggggatttcttagaaaaatcagcttacctcagctaactctccattcccaggaactaaccttcatgcctggtggccaatgtacaaattcctgactcagttctttggcaaattccttccacccatatttctcctattcacccatgtaccccaaaagtccctgaataagaatcatgtttttggggcagaatacaaaccactgccccaaaatggcttctttctccaaacagtcccagatgaaaggcacataattcatgtcttaaggctacttttccagcccctttaatactctgggatctatgtgtttcccacattccaagttatctttcacaagccttttaagaacaacatgcacaaaataaatggacaagaactacaaagttattctagccaatgatagtgtttatttgttaggtcctggggtctcaaggtcaaatgatccctctcaattattctgaggtcactgtcctcactagagtgggtacaacttgctcactgcaaaactgtgttcttcaaacatccctacttcttttcttttctttttttttttttttttagaagtagtctctatcgcccaggcgggaatgcagtggcgccatctcagctcactgcaaccttcgcctcccgggttcaagggattatcccgcctcaccatcccgagtggctgggatcacaagctcatgccaccacatccagctaatttttgtaatttttagtagagacagggtttcgccatgttgacctggctggtctcgaactcccgacctcaggtgatccgcccgcctcgacattcctatttctaaataattattacagatctgtcactcaccagttaaacatacaaacggcttttttggaggggatgacctatttatatttttaaatcttatatcctaccttattcaaaagtcctatcagttttcctagtttagagaagcaaagtgacatttttgtgtacatttaacaggactgcttaccttcacaacctgctcagtcggctttccctggacttctcctaaccgcccatttttcctggatttggcaccgagagttacagtatttcacgtgcgatgataaaatgttacttaggagaaacagttccaataccaagaaacttcagcaattttaaagcattttaaagccacaaaaccatgcccgatccccaaaagggggtcctaactcctttacactgtcagaatctcaattttaaaagggaggagtagagaagagatagaaacgctctctgttggtgaaaatctgtcttacttaccatttccccaacacaggagagactaaggaatttcaggtaaaaatcagatggctccaatcctccgatactaagagcccatcgccccagttcccaggagttccgccagttagactttttcccccatggcctcgctaaggctagttcctcgtcacgtgacgtgacaggcttggtcacgtgacataccagctccttccattcccgtgtgcggggggagggggaccaacaaaccggaggccctcgctcttccaatactcacgccctagctacagaggtcaaggaaggtttccccaggagcagttttggtttcagacggcgccgtctcccgcgaaagtcctgagaggagcccagccttttccgcctgccgcccccggatgggatggttgaggccggggccacgccccctctgcccccctgcgagggcatcctgggctttctcccaccgctttccgagcccgcttgcacctcggcgatccccgactcccttctttatggcgtcgctcctgtgctgtgggccgaagctggccgcctgcggcatcgtcctcagcgcctggggagtgatcatgttggtgaggggactccccggcaaggatcggagagggcctgaggggctccgggctgggagggctgggaggcgaggaaactctgggccgcaggcaggccggaggggccggggatctacaggccccggagaaggagacagactgaaattgaaaaatgggaactgttcgagaccagcctgaccaacatggtgaaaccccgtctccaataaaaatacaaaaattagccgggcgtggtggcgcccgcctgtaatcccagctactcaggaggctgaggcaggagaatcgcttgaatccgggaggcggagggtgcagtgagccgagatcgcgccactgcactccagcctgggtgacagagcgagactccgtccccaaagaaaaagaaaaaagggaactggagcggagggccctggagtgggaggagccagggctggtaaaggtggagacccctcaaggtaggagaaacaagagcggggtkcctgagaggtgcttgagttgaatggaggacatgggaggaaaagagagtgcttgttccagaaatgtgtagctgggccttgttttcccagtaatccacccaccgccacttcaagaagaaatgatatgaagaagtgccggttctccctcccctcttccgcactgtcccgtgatgatgacgcctccagagaggacgataatctgggttcctgggagagatggcttggtcactattcccacccttgcctcgaccacttgtctcaatgtcaccacctcacgccctgttccaggtggctgagtccgaatccagtaaccaccacctcgttttggttaatctcaggctcgggtgttgtagcaacattggaaatgggaggggtttacgaagtgaacatgaggtcaggtgcctgaattcaacagtctacccattccccttttccagataatgctcggaatatttttcaatgtccattccgctgtgttgattgaggacgttcccttcacggagaaagattttgagtaagtattcgggtgggggaggcgggctgggagcaggtgggaggtggcgaggcctagggtcagaattacgtctgggaggcccggtgcttagggcccctaggttagaggacttggagaggagagcggctttcttgagaatgtggttaggagccagggagtcagacctcagcggccatcccaaacccaccaccttaggtgtgacctctttaggtattttacttttctgtgcttctcagtmcacctctgcaaaatggctatgacagatctcaccccataggatggtcaagaagattgaataaagtaatacacgtaacagcgcctaaacaggtgtcgggcacatagtgctcagaaaatgttggctcctattaawgtttgacccctttgcttcattcccacccccaggaatggcccccagaacatatacaacctttacgagcaagtcagctacaactgtttcatcgctgcaggcctttacctcctcctcggaggcttctctttctgccaagttcggctcaataagcgcaaggaatacatggtgcgctagggccccggcgcgtttccccgctccagcccctcctctatttaaagactccctgcaccgtgtcacccaggtcgcgtcccacccttgccggcgccctctgygggactgggtttcccgggcgagagactgaatcccttctcccatctctggcatccggcccccgtggagagggctgaggctggggggctgttccgtytctccacccttcgctgtgtcccgtatctcaataaagagaatctgctctcttcagccctgtgtctgtgcttgagtgggggcgagcacggggctgagactagaggtcggcctctgcctggaaagtcccgatctctgagcggaagtggagcgaagtgtggcgcggaagtgaggcgaaggctttccccatcgactgggcgcgccgagcggtctaagcgactgcgtctgatggggcggggagccgccgggttgagcctatccgctgcggggagggcgggacttcctgcgcgggggcccgagccgctcagtctccctgctctccgtggtcccggctcgcgtgtagcggcggcggcggcgtctccgtgaggaggcgcgcggggccatgacgtcagcgtccacaaaggttcgacctccctcgcggacagcgctccctggcggccacgggagggcgggccccccacttggctcgcggctcttccgccccgggcggggggcgggcgggagccgagcctggggtggggctaggggctccgggcgggacggggagggcgggcgccggccccccgtgacgctgccccgcccccaggtcggagagatcttctcggcggccggcgccgccttcacgaagctcggggagctgacgatgcagctgcatcccgtggccgactcttctcctgcggggtacgtgagcccggactgggacgtggacgctgagagcgggcgcttggactcggtcacagacacggaccctctctagcacagggacagacattagtttccctttgtgcstggcacagcacagagtcggtgttaataaatgatcgttgggtgagggaatgaatgacagataaaaatacagacaggcccatagcccagactcctgtttcacagttctccctgctgcgaacgggtcgaccacaaaccaccgccactcccaaccaccccagttcatggaattcccccagacggctgcaggctgtgttggtgggtctgttttgaaaagcccttcctggcgagttggtttcagtgtgctgtgtacagcagccgtttaacgttgatggtggaaaggggtgtctaaggtggaggtggttgtgatttcttgtgattggggtcctcccggttcccgcagggcctcaagagctttccgcctccccttacggaggacctctttatgcatccgtggaaggggtcccagaaatcggaaggaggcggctggttggctgtgggatgcatagcctgtgggcgggctccacaccccccctcccatttttgctatcccccctctccccttctgacagygcgaagtggacggagacggaaatagagatgctgagggctgctgtgaagcgatttggggacgatcttaatcacatcagctgtgtcatcaaggaacggacagtgtgagggagggtggctgccagaaaagggcgggtgggcmgccttcttcctccttacccaaggttccatcgtcctcagaactcctttccagctcagctgcttccctactttgtcactagttttttagaatccccttgaggactgaaagaatagaattgtcacagttggtcagaagttcctaaaatgytgtggtaatccttccaagaatgtgaatttaggttgcctgagatgctgttattgtatttgatgatggaagtcccctggttatttatataaatgtttgaggaccccactgcagtgtttccagggatatggtgaccctgaactagttgatcagtaaatctcaatccacctgtaaatcaccaagctctacctgatgtctctcccagaagagaattaggagatgggcctttcccactactcagttcagggactccactctcyacactccatccatcctgagtgagtgtaaaacttcgagaaagtgagaaccctaccaatgggttggggccccgacctggattcttatgaagggactcccagaaccccttcccctcccgtcccctcttctgttagtctctctgatgactcctttcctaacctcttctctcttttcttcagggcccagataaaggccactgtgaaacgcaaggtatatgaagattctggcatcccccttccagctgagtcacccaagaaagggcccaagaaggtggcatctggtgtcttgtcacctcctccagctgcccctcctcccagcagctccagtgtccctgaggccgggggtcyccccataaagaaacagaaggctggtgagggctgtggagttgctgcctaggggttaaaggtcccatctgaggtttagtgagagaattgggcctgggtcaaagaagggtcagtctctcttcctgtccctgtggaggttcccagagaggggcagaggggaggggagaggaggcacaaagctttgggaagcttggggctgggggagaggctgtcaggggaacctagaacctagcttatgcccccttcccagatgtgacactcagtgctctgaacgactcygatgccaacagtgacgtggtggatattgaagggctaggagaaactcctccagctaagaaactcaacttcgaccagggtaggagtcctcctcctcccacacagctgacggggttggggagaaagggctcacctggatggcagggcacggtctccgcaggggcccctcccttgtataggggtttcagaagagaaggtgctctcatacacagcgcagggcattggatcagtacgtagcagggtgtttcagggaggtgggagtggccttggaagcacactgggggctcgctccatctcggcccattttacttcctgttccagacagcctgaccctggattctggccttctcatgacctctgctgatcctcctctcctctcctgctgagccttccacctctgacctctcactgttcatgccggacctgtggatctcctgggactccgagcaaggcctgcacgagagagggctgaaaggctgctggggctgccacctcgctattcccgcataagcatctgcccccaacccctttgaccttcatctgatggacatttttatacagaaaacaataaagatttccctctcagcttcgtgctgtctgcttaacattattagcaggagaggcctgttccctcttctctcctcggcccatgggggctcagcccctcctcggtagttttcaccaccctgcctggagcagcacagccaatattggcagactcgcttccctgtgccaatatttctgtgctgctagagccagggaagctgggtgtgggcaacaaagactccactttgttctcttgaggcagaacttactcccagggtctctggccatcagtattcttgaaactgccctggagattttagaggggtgcttacataccccaccctctccttgcccacctggcaagaagtttgtcacaaggccccagatgttttttgtgtcacttctccaggatggcctcccagggccaagcctcggcggtgcctcccccaccctcgctctaacaccacagtgtggtttggacgtggccacagtgccgtacaaaccacagtgtgctgctggggcgggagcaggaccggggtgggttgaaaggaagagagcacatagcagtgctgggaagaccccagcaccacctccaggagcggggggatagagaagccttaaaaggcaaacatggcccccaaaaacgtttgggaggaaccagggacgggctgagcaggcaactggaaggcgacggaccatggggatgagctcacagtgtagtaagattggaccatcttccctctgtaggaactcagctcaggggatccctagggtggggtcagaggcagaagaaatagggaatgactggaggggccaacacactgcctcctgtctcagcaagggcagggacccaaggcttcctgtgtccgtccttcctctccctgggtcagaacccaagagaaaagcaaggagagacagagggccaaggccagcagggttgggagttggcagtccagaggtggtggggccggaacatggttgggagaggggggccggaagtcgccctgggccctgggcctgccacaagatggaggccaaaggcaggaaatggagaccagggggaaggggagcagcagagcccaggaagagggccatctggacctggggggccaggtattcaacccccagtgctgttcccactccccagggcccctgaggacccgagccggcccccacagcaacctccatcagcccatccaccaggccagggcaggcgggcccaccccagagagccacgtttaagctgagacaaacatgcctctccccacccccaactccaggccttccctcagcccttttctcctgtccaggacttgattttttaaaaacacccctcagaaagcaaaatccaagggccaaaactccttttgcaaatcaaaatatgaccccctaaaatccagaagttatcttcctatatcccatcgcatcttttaccaccccctcttccgacacaccccccaaaactcttagcaatctgaaagatccaaggtggtgtatgtaagcagtctttttaggcccccgaagatgccagacccctcccggacacccctatctgtcctccatcaaatcttgccaaggcctcctgctcctccaccaccctccatagcccccaaactaacagttgcccccagctcctacctcggcagagcctttgtggggggtgaaagagaaattaaacactatcctaacggctggggatgttggggggctctctggtctcagcctttggtttccgtctggggggctgcagtttaggggtataagagaaagcctctccaatcatccccccaattccaagactgacaaagccaaccccaccccagcacgcacctccaaacctcccccccaaccgccacgtctctcctgaaaacagaggacacttccctccccacttacctcagctactctcccctgagatcctggtcccctattttgaaaagagcaaaatttagggtgcatccctcacatttggggtgcaggagaaaggagccgccccagtcgcatcgctggcctccttcctctcggctggctcagggactggggagtgccctggggagggggcacccccacaagagatctcaggaggggttcctccactcccagtcagaattggggacacccccccaaaacccgtcccagcccatccgtctccaactcggcgggagaggcagctgcaatgccccagtcagattcacccaacactacattcctcaccccatctagaggggtcccggggtccccaaaaaatcccaaaaaaatctaggatgttgggaggacggtcctggactagctccccaaatttggggtcctcagatacccccgttttttcaggaaaattccgtcttttgcctgcctcccgccagccctgctctgtcccgatgccaattttggaagtcactccctccttcctcctccccgtctctccaggccccccccaccgctcgggggctagggtccaggacacctggcttccagaccggggggaatcactcctcaaagggctaggggccaggaggtcaagctcattgcccctgtcttaaggaagcaggaaagcccgttcctcccttcccctcccccctggctggtcaccgtggtggtttaggaaagcctggaggattggaatctgccattgctgttgcacaggcagttttttttcttgggttgggggggtgggcggtgggagggagagaggggaggagggccgaagagagaagggacccaggcgcgaagagctggcctggcttaccctgtagccccggctgccgtggggaacccctcccccccatctcacccacactcccagtcctctgtctgctttctgtttggggctcatcctagaaaatcagggtgcaagaatcacctccttgtaccccaccagcacccctccttgccacagttccaacagcactgccctggtcaggggtgcccacttggccaagggacaccccatttttctccaacttcccccaaactaaggggtgctcccttaagaaattgggattcagagtctgaaaccgccttttctccctctcttctccctcaagccacataataataaaaggagataccacaccctttccaagtttctcccttcaaatcctgggcttatttgggggttcactaaagaaacttctagaatctggggtgagagggcactataagcaaaagacatcccaaaccagggtccaaattaagtgaactcccaaatcagtctcaccttatgattatcccttagcttcaccaaaagcagccagagtgacaaaacacccccaaaataagaacaccccagaactttagtctcctgtcctcgcggccctcaccttgtttctcccctggggaaaaagcttcttgggtatccatggatacacaggaataccccacgtctttccactttgtggaacgtgagtgtccacaagactcaaatataaaagtttgctccccgctcccaggacccccaatcacagaaagcttcgaacttgctcccagcttcctataatgttccacctcaaactaatttttaaaactccaaattgaacttattccccaaatctaatctgagccttgaaacttagatggcaccccaaaatagactgcacccccaaatcagcatgagtactttggttctgctgatagtccaagatgacacaggtgagcacaatctccaaattgtgggtgtcagaacccccagaactaatgtaacttccaagtcagccccatacctgaaacttaccatataggcctcaaaggctgaatgcagccaccggtgctcacaatcaaatcaacaccccataataaacagacaccccacaactgatcaaataatactccatcctgatgccaaagggagagcccctagtctaattctcatctccaagctgggcagagacctaaataaccctcacatgtcaaagccacctcatcgtcctgaatttcccagttcccggtttctcagctgttctttcatgcattcaaataaagacacactccggtctgaaggggagggccccgggcctgatatccagccccgtggaccatggtcggccattcctggccaactgtacactctccccagcccaaatccggggagcttctgccttgcagctggattcagctctagcaccccttctccaaatgagctttgccttgcctgcccgcaatgtctcccgaaacaaaatatgagggtgtgatccatgcccatctctcagatcagggacttcaaattagggtggttaagccccctcctgccctctctccctcctccttgttttcccttctcgtttaccccacccaattttaatgttcaattaaaagtcacctccaaagacatctgggtagcagtgtctagcttaattcgaaaagaaaacccggagttcccaggctcaggtcccgcttcttgtcccacccattcccctggctcctaaagcccgcgatttctcacctcgggtaggaaccccagcctgaggggaaagtcccctcggtctcctaactctagctccctccgcccagccctagtcccctcctaggagacagaggtgcaaaataaacccgcgcaaaggggaggaggctaaaggtttcagccgcccagaccaaatggatcctgcgcccgggtctgagcgcaccccaggccgggtggagacgaggggcgaggcgaggccagtgctcggccgccccctcgtggaaggagccgcacattgccgagccttgcctacttgccgcgctggaccccggcgtcccgccagcctccaagcgtagccgacgggcgggtgcccgaggccctcgtgagctgggattgggggaaagcaagcgggctttgggcgggagtccatctctctggatccctacaaggacccagaagagagtcgggagcgagagaggccggacgcctaggtctcccgagcgtctctcgcccctccacccccacctcggggctttccccacctcctcgaggggaagcagctggcggagccgtccggtcgcaggacaatggaaggaaaccaactagaaatcatatccgccctctccgtaccccgcccggccagagcccccctttttgtaggcccgggtagagtagcctgtcattcacaccacaccctccccgtctgagaccctacgggagcccactgtcgtctgcccaaacctgctgtctcgttgggctcccccttttctcccttaacacagtacaagagagggagagggggttgccgtatgcactttgtcctgcagcaaaggttggctcctggcaaaccctcccaaaagccaacacaccaattttcactggcccaggccttccgacgactcagactcccgtattgccaacctcgatatccctcacctcctccccaattccaatatccccgtcctcgtgtccacttgcagtgacccaagaccccctacgttacgaccaccccttgtttctgaggtcccgccctcgagacggagaccccgccctggactcgccatctggagagcgagggaggaaggaaggatacagacccaggcgttcaccccacctccacccccgcccccgacatcccggccagataaaggagccgaggccaagaggggagagagaccccgccccccttaagaagagaagccgcggcccctgcaggacgggggtaagaacaagagactgagggagccagactcctgggtcccccaagagggtaggagcttgtgtggagcttgccatcagcgagcctgagtcccagaaattgggctaaactagggattggggactagataggagtcgcagaattccgtagttcggggaagggagcctcggctgggatttggaggtgtgtggacggcaggccgtgagatctcgaggcagggttggacacctgagacacaggcgcgcagaggggagtggcggtgctggaggggcactgggggtcgaacccagggcgatgggcgcgggattccccacgctcgccaacgacgccgcggtgtggaaccttcaactggctccaagcgctgtgggatctggaagaggcaagggagcgagggtgtcgtagagggcagaatgaacaagaagaattaggagggaggctgcgtgtgcc

SEQ ID NO: 5771 - DNA, 41309 bp, Homo sapiens
cacccgactattttttttttgtatttttatttttatttaatttttatttatttatattttttaattttttttttgagacggagtctcgctctgtcacccaggctggagtgcaatggcacaatctcagctcgctgcaagctctgcctcctgggttcatgccattctcctgcctcagcctcccgagtagctgggaccactggtgaccaccaccacgcctggctaattttttgtatttttagtagagatggggtttcaccatgttagccaggatggtctcaatctcctgacctcgtgatctgcccgcctcggcctcccaaagtgctgggattacaggcatgagccaccgtgcccagccgttttatttatttatttttgagacggagttttgctctcattgcccaggctggagtgcaatggtgcgatcttggctcaccacaacctccatctcctgggttcaagcaattctcctgcctcagcctcctgagtagctgggattacaggcatgtgccaccatgcccggctaattttgtatttttagtagagacggggtttctccacgttggtcaggctggtctcgaactcccaacctcaggtgatctgcctgccttggcctcccaaagtgctgggattacaggattacaggcatgagccactgcggctgaccttttttttttttttttttttttttgtatttttagtagagatggggtttcactatgttgccaggttggtcttgaactcctgacctcatgatctgctagcctcggcctcccaaagtgctgggattacaggcgtaagccaccacacccagcctgtaatttcttttacaattaggtaagtagcctgtagagtgatactttgatggcatttcccagcaatctttcatctaaaggttttgaagtccattgatagtccttgtctgagtcaattatttcattaaggtttgcatcatggttattgtctaattctatattttattttatacttattagctggcatcctatagtaaagaagagtttttcctcatcaactgggtataaaccacattctttattaaaaaaaaaaagaaaaaaaaagcagggtaggttgggagcagtggcccatgcctgtactcccagcgctttgggaggttgaggtgggagcatcacttgagcccaggagttcaagaccagcctgggcaacatagcaagaccccatctctaaaaaaacaaaaaagcaagcaaaaacacttagccaggtatggtggcaggcacctgtagtcccagcttctgacgaggcacgaggatcacttgagcccaggaggtcaagactgcagtgagccatgtttgtgccactgcactccagcctggatgacagagcaagactctgtcttaaaaacaaaaacaaatgaaacaaaaaacaaacagggtaaatgctatctccctttaataactaattttcagagtatcaaattggtgtaatagacactaccaatgatggaaaaatagtttccctcttctcattctctcttctctgtactagagagtagacttttatttattcagtatttgcaatcaattgtattcattttctttttgacgctaaaattgccctaaatttgccccctgggagatccttcaagctggctcccatgtctctaaaatttatttttgagagactgaaaatacaaatggtaaatggccagaatatacataaaaacagaattctgacccattacctacaacaactagcccagtaaaccaaccacttatttaccataagtgtactctcagcctgaaagccaaacctgctatcaaccagacttgtaggaagtcagactgctatctctggtagcaatccaggaagctaaataataacttctatgacaatcagctcaaaatggccaggacttgattaaaacttgacagcttccctactttttgtcctcacttctagcttatgcccatccagagaaagccaaatatgctcctttaaccaagaccataggatgccaacttgtagttagcttccagcttccccatgccaacagcttccaatcaggcatacctgtgaaacctttccttttgtccactgtaaagctttcccactcctctgcatgcctttgaacctctgctaaaacataagggatggtggctgactcccttgctacagcaagttctcaatcgactttgcttttctcatttggtttgcaataaaatgcattctttacagtgacacaatttgatgaattttgacaaacgtatacattcccactaaccatgacacagaacatttccatcacccccaaaagttctcccattttcctttccagtcaattccttctctcttcccctcctaaccaaccactgatctgctatctaccactatggattagtgttgtttgttctcctaactacagttggcatagcctcattggtctaagcacttcctctgcattcaggcacaacgaaatacctggctcatcttgtacctttcccgtcccagagctggaatcagccagttctccaaaggagctctggatctttttagtgggaaatggaatttagaaaccaagatctcagtgtcagatgtgctcactgttactgtagggtgcccatgcctatacatcctggttcagccaggactgttccagttttaatctgaaagtccagcatccagagaaaacccctctgtttgtggcaaactagaacaactggtcaccctagtgcttctaggccctttcagtccacagaactaggacttttttttgcagttgaaacttttttttctttttgatagggtctgttgcccaagctgtagtgcactggtgagatcacagctcattgtaactttaaactcctgggctcatttgggcctctcgcctcagcctcccaagtagctaggactataggcacaggccaccacccctggctattttattattttgtattttgtagagacaagatctcactgtgttgcccaggctggtcttgaactcctaagccactttggcttcccaaagcactgggattacaggtgtgtgccactgcacccagccctccagtttaaactcaatactacagactttttttttctgaacttcttaaaattctttatattagtttccacccccacccccggatgaatgaacgtcttaaaaattgttttaaattttttaaaaaatggagacagggtcttgctatgttgcccaggctggtctcaaactcctggactctagtgatcctcccgctttggcctatcaaagtgctgggattacaggcatcagccacccggcccttttctgaacttctttgatcttgtgtttgtatctcattctctcatacactgcacatctttgtatatagtaacattaaaatacttatgttatcctaccatatacagtacagagttttaaaaccacagtaacaatgttaccattaatcataaatcagtgaagctgaaagctcctgtgcacttttttcatccttagaatacacagttgacccttgaacaacactggtttggactgccagggtccacctatatgtggatttttttcaccccaacacagatgaaaaatacagtggggcgagggacggtggctcacacctataatcccagcattttgggaggctaggtgggaggatcacttgagcccaggagttcaagaccagcctaggcaacacagctctctactgaaaatagaaaaaaattagctagatgtgctggcacatgcctgtggtcccagctactcgggaggctgagatgggaggattgcttgagcccaggaagtcaaggctgtagtgagccatgatcgtaccactgcactccagcctggacgacagagtcagaccctgttctcaaaaaagaaaaaaaaaaagaaaagcaagagaagggaaggaagggaggggggaagagagggagggagggaagaagggagggaagaagagagggagagaaagaaaaaaagaaaagaaaaagaaaggaaagggaaggaaggaagaaaacaaaacagaagtacagtgggatgcaaaacacacctacacaaagaaccaactttccctatgctcagctccgggactttagtatgcagatttctgtatatgctcgcagaaggtcctaaatccaatctcctgcatataaggaaagactacactatcacaacacagatacactactagagtactgtgttcaaaagctcggaggggccagtggtggtggttcattcctgtaatcccagcactttgggaggccaacctgcaggcggatcacctgaggtcaggagttccagaccagcctggccaacatggtgaaatcccatctctattaaaaatacaaaaatcagcaggggatggtggcgcatgcctgtaatcccagctattcaggaggctgagctgagagaatcgcttgaacccaggagacagaggttgcagtgagctgagattgcaccactgcactccagcctgggcaacacagtgagactgtctcaaaaaaaaaaaaaaaaacccaaagaataattattttttctgtgtatcttagttatattagttaacagttaagttcatttgtttcaatttgctttcaaccttaggatttactttgtttccttttttatttacttttttggctatgtaaaactaaaagttcaaagacagagaaatcttgtctccaccccccactctttataggcaactaaaaatgttaagtttccaggatatccttccaattcctccccgaaaataagcatatacacataaatattcatattaaatataaatatatatttttatgtatttaagtaaatacataaaagcatatatgcttatttttgcttttgaatacagtgaatacttactacacttaaatatttaagtgaatacttaatacaacctgagactcattccaaagcaacacacgattatttcctgaatctttttaatggttgcattgtgttctactgtatggatgcaccattcccaatcagttccctattaacggatatttgggttatccctaacttttgctatgacaaatagcactgcaataaccttgtatacctattgtttccatgtgtggagctgcaccttcagaataaggttagggttagaagtataactgcaaggtataagaataaacacaagtaattttgtactccgtggaacttgaaccatttttccactcccaccaggaaaggtaatttcaacgtgtatttccattgtaagtgaggtggagcgactttctatgtttaaagaccattacggtattttttctgagaatcatctgttcatgtccttccccattttctcctttggcttttgcactttttgttttcaatttttgagagctcttgtgatacgagttgcaaagattttctccagaccgatctgattcactggaaatatactacgaccatctggaatgtactttaatcttatcctaataaatcaccttactacaagacactcctttggggatgaacaggtttgataaagccggctaaggacagaccaatcaaaagaattacgtgctcttctagtaagtgtttagagactgtttcacgttctccaggtaacaccgccattactcggcggtccagatggcagtcttacttcagggagtctactccacttgcaggacctctttgattgagttcactaaacctcacagggccgccttccccgtgttccagttagcaaggggccctcaacgccgcggacacagcgcaacctccgacgccagagaacaatagctcctcgatgcgtctccagagatgtcaaggaggaacgaacccagcggccaggagactgcgcctcacgactgatgagagggaaggcatcggtttctaagttctcaaaacttacaggtgagcttctgctaagagtaaacgcccgcggctcgccgcccacggcctctctcttgaggtggcacctggtcctccgacacgcggaagcatcacggatgagcgtcacgaacacagagcggccaatcacgcgccgccttcgcccagatccctccgcacgaggcagccccgcagccgcaggtggccccggcgagtacttccaccttcccttcccgtgatgccctggggctgacctccgacctcgctggcccgcccctcccctcggccgcttcccttactgagcttgctgagctccggggcccgcggagctcgcgccaggctcctgggaaaggacggggagtgttaccggggagcagctgctccattgtgcctcgaggccccgatcgggctaggccgacggcctccctcccttcacctttcctctcctggcggggttcggcggcgggcgagtgactgcggccacgcctgaaaggcgactctcctgtgagtgggccagaaggcgaacatggcggagcggggaggctggcgggaggcgggaggcgggaggcgggaggcagtggcgctggcctgcggcgcgttcggaccggctgtggggcggggcagggcggagcggagccgtgcggcggggcggggccgggcggcggggcctggtttcctccctcagcgccattttgtggcagcgagacccacaaataaaggggagcgcaggggttgcggcgggactaggagcgcggcggggccggcggcagagctgtccggctgcgcggtggcccggggggcccgggcggcagggcaagcagcgcggcctcggcctatgcgaccggtggcgccggcgcggcttctgcctggagaggtaggygcgggccggctggcgggagcggacgcgggggacctccggggcctgagggctgatgcgcagccgcccccggcgggtaaggggcgggcagggcccgaaaggccacacgggcctggtgcggcaccggtctctcgtgagccgctctaccttcccgcctgcggggaacacttccgccgcttcgaggccattttatctcygtcctccgtccccaaggcccgggttgagaggggtgctctggcggccggagagaccggccactcasggaggccggaggatgccctccccgggctgagcggcggcgctcgttttttcctcgcctcggggtcgcccccttcacctcccttgggcctctcctgaggacctggcggcactaacgagttcagcaaggaaaaaaagaaacattcgttccctacatttcatgtcacgcagtaggatgttactacgttctcttgtagacttccatttttaaatgagtataagcattctgaggaaagaaactgaattattgcagatttttgtgaaatccaagtcttaccttggatccctgtgagacagttactagatttttttttcaccgtttttcataagtctgtgtacacgtaatggaaaagcccgagttcttgttttgataagaaagtcacttggttgtttgatcccaaaggattagcttaacattatcaaggactagcataactgtgattatgtaaaaaaaacaaaacaaaacaaaaaaactattatttagtctggtagggaaatacttctatgagtatgttacaattggaagttgtatttgtgcctattttatctagttttagttaattccattgcttcggaagataagtggacgtcatagatccatcgcaagttctcgttttttggattttaaaattttgaccattaagttttctacgatagataaacatgttgtggacatttaaaaccgtaatttaaaactatgagcgaaaaatcttttcaagatggatacattttaattcattcaagtagcatctgattagccaagtcggggaaagattgcagtccgcaaagctggcttgtgataaggttgaggttacattttaagggtttgggtaggtgtgtttcttacagtgcttttatatgttaaggtatcttaagcagacacatggtttaaaagttcagtatttttagtactttttcattggcagaatttggacaagctaccagaattgctaactcctaaaggataaaagtaataataatagtgtgtcccaggcactgcttatttttacatggctcttttatgtctagcttttccaattcaacgttgagtcatgtttgctgaaaatatttttgtgtattgtttgtcagaaataagctggtagagatgaaacacaatgtgtaaaaagccctgtgatgtggagatgagcattgtcacaatttgtacagtacattaaagcgttcaaggtctcttatggtcttgtatgtagtattgaatccccttgaatatattgtttagcagttttgatcattatgtatttgcttcttgctcctcaaaattgtaygttagttagtaggtccttcagcaaaagaagactgaagatagtattttggttttattcttgtttttaatttttttagttgtctccaacttttctgcctctaaatattttgcttcttgtagttactaagcttaacacagaaaaacttttcagtatctccacaatagtaaacttcattgtgtattgtgtataacaagatgttccatctgactaaaatatattgctgtaaatattttctgcctttgaagatgtagttaatagaatttaatcttttctaagtgcacattgaagttgccttttatgttcatattatgttcatattttatttgaaaaatckatagcatttttattgtgctgaaagcattaatatttgcagcactttgtgagacaggcaaaattatctttttgctgacttggaaactgcaagagttaaaagacttgcttggaatcacacatggcagatagaggataaggaaaagatggcctttcagttcctcatcagtaccttgctactacagtgtctgcagattggtgtcttacattcagctatgatttgttcgccaaggtaccgtgtcttcttactgaagttgttttggctggcgcttgcctccgttcagagggaactgagttacctaactttatgatgctaagagccaggaaggtactgggatctgggatgctaggcacctaaccagtctagactgaactccatactaagctgtttttctgtgttaaggcatcaagagtagatggtggtcctgattttctgagatatattatctctgaattatctacataaataactgaaacttttatgtaattttaaaactagtcaatcatgttaccacccttttgaggggcaccaaatttgagacccttacccccaatttattaattaatagctgttttaatcacctaatagctgatcacctaatgactaacagtcattttcatcctggaaaatgggaactaactttgactttgaaaagtgctgttattaaatgtgtgattcataagaactgaacatattttctttattattttccttcaggattcaactttaattgactccaaatgatgttatggtcattctgtttttctgatacgagaatagattgttctgagaacctagaatattcattgcctttatgaatctagaattgactttaaatttaggttattgtgtttgtcatttgcgctaaaaaaaaaattgccctggggaataccaaacttctcggtacattcgtgtggtgtgaaagtcaaaattgccaattaggttctattttgaccaaatagttgaatgttgtagacagttgtaaattttgaacctgttctaatttgccttttgccagatggcgcatttaactttgtggcatatcatcgactttcaaggaaagatttacttttcatcagattaaagttgaggaaggattttctttctaaatactgaggctctgaatttcccaagttggataccccagacagctagagtgatcttaaaagtgactctgagagttgacttaggaagtgtagacatttatccaaaatctgtatttactcctgacttacattacaaatacagagttttatttttaaagaaaatttcaataaaaagcaccatttaattaaaatctactcaccatcaaactttttaaaaagaacataagccaatgtcaggagttggagaccagcctggccaacatagtgaaacgctgtctctactagaaaaaaaaaagaaatacaaaaattagctgggcatggtggtgcgtgcctgtagttccagctccttgggaggctgaggcagtagaatcgcttgaacccgggaggcggaggttgcagtgagcccagatcatgcccgtgcactccagcctgggcaacagagagagactacgtctcaaaaaaaagaaaaaaagaaaagaaatttcaataattgcaggctgggcatggtggctcacaactgtagtcccagcacttttggaggcccaagcaggaggattcctgagcccaggagttcaagaccagcctgggcaacatagcaagacctcatctctactaccaagaaaaaaaaaacaaattagctgggcgtggtggttcatgcctgtgatcccagctacaaaggaggctgaggcaagaggatcagttgagcccaagagatggaggctgcagtgagctgtgatcgagtcactgcactccagcctgggcgacagagtgagactctgtctcaaaaaaagagaggaaaaaaagaaaatttaagtaacttctgtttagaatcctaaatattggagatgccaaagaattctgcagtaagtgttagaaacagtcgggaggacagtatgattattatcctcaacctgtggattatctcttcaggtttttcaagaaacactgagtctgtgtttttgatggggagaagaaactattaattaaatgcccattttgtgccagttaccatgctaaagattaatgtctgtcttcagaaatagcacagtatttgggccctggttgtggtaattctttttgagatggggaaactgaggtgcagagattttgctacttttgtatttgcaaagttgacaacctgtttcagaataccaaggttatcagaactttcttcatgtgtttctcagtccttttaatgccctttaaaaacagattatcatctcattttttgctaagcttactgttaattttattttagtggaataagaatatggatacctgtctttaagaagagagtaagcaagtaaacctagggaaagtatcaggttgtagaaccacataccgatgatccttgccaaaatcctggcataggaatttgaaccctggtgtatgaaaagtctgccctttgcatactcaggtttcgcatcccgtgaatgctgtatttttgatycgagtactgtattttttaatctgagtttgattgaaaaaaatccaaatataaatggacccatgcagctaaaacctgggttggtcaaggaccaactataataacttttataagctggaatttatattgaacagcatccatgatactttagtattacaactaaagttgtacatactgagtaggtaggatgccttagtaactagataaaasgtataccacctagccatagtgataaatatagctgttttcaaactgtcattcacagatctctaccacagtacctgttacrtgaagttcctggttggttctcaaaattttatgttcgtatatacatagatacagatactgatataccggttaaatatgtacagctcaaatagctaaaattgtctttaagattttttaaattaaaaatattattggccgggygcagtagcttacacctgtaatcccaacactttgggaggccaaagcaggtggattacctgaggtgaggagttcgagaccagcctggtcaacatggtgaaactaaaaatacaaaaattagccgggcgtggtggcaggcacctgtaatctcagctactctggaggctgaggcaggagaatcgcttgaatccaggcggtggaggttgcagtgagccgagatcgcgccattgcactccagcctgggcaacagagaccgggcgcagggggagggggagtgtctctgtctgcttctttctctctctctctctctctctctgtatatatatatagtgtgtgtgtgtgtgtgtgtgtgtgtgtgtgtaaaattgatatttagctccagacaaatgggaaattacaaggaaatgccagatttgatatctgggttctaagactttgcagcctaatgcatgtgtcatgctaaaatagaagtagttagacatgtggagttaaatatggtgatggtttctsagatgattaaaatgactgccaccaggttaaggtagttacaaagcagctttctgtaatggcagcagagataataaactgggcaacaagggaggaaccaatttaaagaaaaagaataatatacattttatatcatagtaatatggtttatgtcttcataggacagagtgacttgctcagtgaaacagactgtatacaattagctcagaaacaaatactgaggtttttatctgtttgctgtatcccttgagaaagattaaagagggaaggcagggtgcagtggctcacgcctgtaatgccagcactttgggaggccaaggcagttggattgcttgcgcccaggagttcgagaccagcctgggcagcatggcgaaaccctgtctctaccaaaaaaaattacaaaaaattaactgggtgtggtggcacatgcctgtagtcccaggtactcgggaggctgaggtgggaggatcacttgagcctgggaggtcaagattgcagtgagccatcatcgcaccactgcactgtggtctaggtgacagagcgagactgtctcaaaaaaaaaaaaaagcccagcacgctggctcatgcctgtagtcccagcacttgggaggctgaggtgggcagatcacctgaggtcgggatttccagaccaccctgaccaacatggagaaaccccgtctctactaaaaatacaaggaagttagccgggcgtggtggcgcatgcctgtaatcccagctacttgggaggctgaggcaggagaattgcttgaacccaggaggcggaggttgcggtgagccgagatcgcgccgttgcactccaccccgggcaacaagagcgaaactccatctccaaaaaaaaagattaaacagagaaagaagcaagccagtaatctaagatcaatttatgatttttcctctaaattctgctttcttcaacacaatttacttaatctgaaaaccagggtttaataacagtatgattagaatgtttcatttataaagtggagttgagattgtacgtagtataaaacatgctgttggaagattatctccttttgaggaatctcaaaatcaagtgggagaaatcaagtagtcttggtgtgtgtgtgttttgtttgtttgttttaatgagagacagggtcttaccacattgcccgggctcggttcaaactcctaggctcaagcagctctcctgcctcagcctcccaaagtgctgggattacaagtgtgagccaccacaccagcctcaagtagttttcgagatgatgccacagcactccagcctggcaacagagtgagactccatctcaaaaaaaaaaaaaaaattcagtttaacataccaagcttttggtcaaatttctagtagtttagaatttataataagtatgggtaattaaaataaaccataaacactttaaagtaagggaagattcatgagtatactattagaaataataactagggctgggcgtgatccttccacaggtagttctagctacttgggaggctgagatgagagtatgacttgagcccaagagttcaagactagcctgggcactatggtgggtccccatctcttaagaaagaaagaataggaaaaactaaattagtataagaactaattacttaatttgtataagttatgaatatgccaaatgcaatttagatgctttttcaaaagagcactggtactcagaaccctgattcaattttttaatcctcatagaatttttatataaagattttatgtttgtcaggttagctcttcatgtcgtatacttttttttccaaccttgtattttaatgtggtgtttatgtttattacacattttttctttgtcttttttttgtgtgtggatttgtagtttaatgaataatacctgctattagcattcgttctaaaaaacagcataataaagtgttccctacttgaattcattaacctatctttgaaacagggttaagtgaattttgtataataaagaagctaattttgagatacaaaatatttggcataaaattaaatactgtaggaatatttttattaaggtgtgacatacatgtgtatgtgagtttttgttgtttgtttgtttgagatggagtctctgttgcccaggctggaatgcagtggcgcgccatctcggctcactgcaacctccgcctcccaggttcaggcgattcctgcctcagtctccctagtagctgggattacaggcgtgtgccactacgccgggctaatttttttaattttttggtagagaccgagtttcaccatgttggccagacttgtcttgaacttctgacctcaagtgatccacccaccagcctcccaaaatgctgagattacagtcgtgagccatcacgcccaaccagtgtaacatatattttaaaatatgtaataggatgggcgtggtggttcattcctgtaatcccagcactttgggaggccaaggcggacgggttgcaatgtcaggagttcgagaccagcctgaccaacacggtgaaaccccgtctctactaaaaatacaaaaattagccaggtgtggtggcacgcacctgtagtcccagctatttagggggctgaggcaggagaattgcttgaaccctggaggcggaggttgcagtgacctgagatcgcgccactgcactccatcctgggcgacagagtgagactgtgtctcaaaaaaaataaaaataaaatatataatatatctaaaaaactattgggcagtagtaaattatggctgtggtaggtactaccttactttaacaacataatgctataaaaggaaagacttaaactggtattacccttttatagtcccttagcaacatgcgtaggatrctacttgaggtcattatatttctcttcaccctttatggcgacatcaaatgatttgaatggctgatcagcttttttacgagggaatttgtaaaaactacccaataactctaatratggaagatgttaacaaaggaagatctgggtacagagtatataggaactctgtaatatctttgccacttttttgtaaatctaaaactattttaaaattgtttatttaaattctaattattcaacagtaatttagttcactaataaattgatttgaaagagtcagtattttttattcctactttcactggaagaaaataaattgaacttgttttccgcaacttttttttttaggattcaagatgaccaacgaagaacctcttcccaagaaggtatgggttttggttttgggtttttttgttttgttttgggttttttgggggcttttttaagcactttaaaaaaaaatagacttgaagggattatcgttgtttgcttatttttcatttctttgcctttataacaataatagcattggagttgtacagtgtgccagatattgtatcttatatccagtatattttttagaatattttcagattttggaaaactttagttataataatattcccatggtctactcttaatgttcattatgtgaatatttccaggtctactcttaatgttcattatgtaaatatttccaggtacatatatacaaataatgtcaaaaatggacattatgagtatattattattcttttcctagtgtaaatccctttgattgtaattaaaaactactttattaaaaaaatggttatagctaattttcaaattctacctttttctctgaagttttgttgtctagtctcaaatctccccctgttgtgcattcctaccttgagtttaattactcttacatacacacacatacacacacacagtggctgttataaaagaggtaacatygtctctaggaggaatttgtgattcaattgggaaagcttactaaacttaatatttaagtgaataatttagatattacagaagtttcctattgtggagtcagattactcattaaatgaataaaggattgtattatgctttcataatctgagaattactgtgtgctccctctggtaccctttgattttcctcccttggaacagggtcttgctctcttgcccaggttggagtgcagtggtgcaatcttggcttactgcagtctccgcctcctgggctcaagcgatcatcccacctcggcctcctgagtatctgggggctacaagtacrtgccaccacgcccagctaatttttgtatttcttgtagagatggggttttaccatgttgcccaggctggtctcgaactcccgggctcaagagatagccacctgcctctgccttccaaagtgctgggataataggcatgagctgcctctggcagcctttcaatatgttacattataatagttccctcgttccattttatggtaatactattttactggttagtattataatttgaaacatttttaaggaaaaaaatttaagtgtcttgtaagggaatactaataaagcctttattttatttttattttttattttctgagacagagtctcactctgttgcccatgctggagtgcagtggtacaatcttggctcattgtggcctcataccccagcttatgcgatcctcccacctytgccccccaaagtagctcagactacaggtgtgccactacgcctggctaatttttgtattttttggtagagatggggttttgccatgttacccaggctgatcttgaactcccgagttcaagatatactcccgcctcagtctcccaaagtgcaggaggcatgagccacaatgcccagccaaagccttaattttatactgaggtaggagaggtatctcacctttacagcctttatttggtgtagtgaatatactgtttctcaatttttgaagcatgttagcttatgcccttctttcagctttttgttttgaaataattatagattcataggaagttgcaaataaatgtacagagaggttctgtgcaactttcactgagcctgcttcattgttaacaycttgcgtgactagcagacatctctaataactgtgaaaatcagggaattgacattggtacaatccacagagcttattcacatttcacgttatactagcactgttattgggggaagtggggaagagctatatgcactattatcatgtctagctttgtgtaaccatcattaatcaagatacatatctgaactatcaccataaagcttcatcgagttattcttttatagccacatctaccccgtccctctccatgcctgacccctggcaaccactaatttatctccatttgtataattgttacttcagagtgttatataaatgtaatcatgtagtatgcatctttttgagactattttttttccttccacttagcacagtttccttaaggcttatacaaattgtttcatgtatcagtagtcctgtttctttttattgcttaaagtgttccatggtgtggctgtatgatagttcaatcatttgcctgttaaaggacatttggatagttttcagttttttagcttttacaagtaaagctgcttgcatgttttcatttctttgagatacatgtttaagagtgcaactgctgagttatatggcacattcatttttagttgtattaataaaaggaactgccwtacttcttcagataccatttttatattctcacctgcagtgtaggaaacttcagtttctctgaatcctcaccagcgtttggtgttgccactaatttttattttagccattctaatcagtgtgtggtgatacctggggttttaatgtgcattttcctaatgatgatgcccattgttaagataccaaatagtttaccttaaaaaaaaaaaacttttgtaataaaatactttttcaaaaaatcataatatgtactgagccgtttaaatctcacacttgggagatgtttcataggtctcattatagaactttgtgtcttcaggaagaacactaaattcatattgtaattctctttataggttcgattgagtgaaacagacttcaaagttatggcaagagatgagttaattctaaggtaaaatgttctctgttcaaaaacaaagtctttctatagaacattatattgtgactctacactgtaattgtctttgtgccagatattgtttttaatgttgttctatcctcaaataatttaatgtactttttgagcatactatgacctatttcttatattaacaccgaggaaaacgtaacactttaaagaactactaggaagctataagtttaacaaatatatggcttgttttgtgtagtttttcctttcgtgtttaacatttgaaaaagaaatgtaatcctaaaagatgcacttatatttatggaagaaatacataatttactaatgaagtgaggttactttttcttattagtgtgaccttcaccagctcatataacttcatactcttcattttctcatctgtaagttgaagaggttgggttaagttattgttaaaggtgacttccagttctgaatttctgcggttatcttgtaaatgtcttacaaaagcagattgtcaagtacaacgtataatctttttagattgtgtaagaaatcaggaagtaggatgttctgtgttttgtaatttaaatatattctttctgtattttattgctatggttagtaagtttcttgataacttagataaaaataaaataagtattttaacaggctgaaagcggaggagagaaaagatgttttgtgagataggctaacacagattttgttgtttcctagagtgtgacaatttcctactttcacctttggacagctactgtattatgaacacactttttacctttttttttttttttttttttttttttttttttgccataatctcatacataggacagtttccattgcatacctttgtctttctgcacataaaatttaaatttttgttattctaaaacacttctgtcttatgctgaagtatatacttaagatacactactactcaatgctgggtttttttttgtttgttttaatgtgcatataaattataatagaggtgaggtgctgctcaggctggtcttgaatgcctggcctgaagtgattctctcaccttggcctcccaaagtgctgggattacaggcatgggccaccatgcctggccatgattttttttttccctgtctctggcattgtatactttttttaatgccttcttacataattgctctggttagtctgtgcagtcatttttttgatttaactgtaggaggggaaaaatcagtaatcttaataaagaatcatagaaatgttttattttaagatacctttaaggtttctaaatcatatgcagtgtatttccttgaggtcagtttaacatctttccttagggaattcatgtaagacttttaggcgagttttttctctttgattcccttggagattttaaaccagctgctacttatttaactagtctgtgccttctatccttgtgatatacatgttcttgcttcagtttttatatttttctgtacttctaaaataaatcgttcttttatagcctccactgaagatctttctctatacatccccaaatatttggtaaactacgtgtcttaggttgtaagtgccgtaaaaataaagcatggccttggctgaacatcagtgtttacatagaaagtggattagtttggtattaggaaggttttttttttttcttttttctttcttttttttttttttaagacagagtctcgctctgtcaccaggctggaatgcagttgcgcgatctcggctcactgcaaccgccgcctcccggtcaagcggttctcctgcctcagcctcccaagtagctgggactacgggcatgcgccaccatgccctgctaatttttttgtattttcagtagagacgggatttcactgtgttggccaggatggtcttgatttcttgacctcatgatctgcccgcctcggcctcccaaagtgctgggattacaggcacgagcctttttgttcattatgttgtaatattaataactcatgacaagcctgtttttaagattataaaatggttttctaaagccaaattttaattaattgtacctgaagagcagcttgaaaacatggctcttaagtatgcaggatagcagacattcagggcagggtgctttccattaggaactgcctaataagactaggaaaaatctttattgctaagaggacctagcagtgtatatattcagggtagagaagtataatgaagaacaacggtccccttgtattctgatagcatatggcatttatgcaggtttctgacagttagatgtgattgttaaattacagtcttgaaaaatgttatattctccccctgtgtttacaggcagaaattgatactaccttgagaagagtcacatggtattttcccaaaagagccaagataaagaaccttcaattctacataatgaggcacatttctaatatgccttttgttctaagtggacaacatatgaaagcagcagtgggatttttttttcagcttctataatccaggattatcctgaacatcagtgatatcaaagtgaatctggggtttgatctcacccagggcatgcttggcatgttctcagcagaaaaaaccttctctatatatctctttttacctgtttcctgtaaaatgggaaggaataatgagggactattttatgatcagttaaactagatttaggctgggtgtggtgactcaggcctgtaatttcagcagtttgggaggccagggtgtgaggatcatttgagctcgggagttcaagaccagcctgggcaacgtagtgagaccccatctctacaaaaaaatgagccatgtgcctttggtcccagctatacaggaagctgaggcagggacatcgcttgagcccagaccctgtttgcgccacgctgcactccagcctgggggacagagcgagactctgtctaaaaaaaactagatttaaaatgaaaaatccagaagaatgctcagtattactaaaatctgtgagtttatagatatcttctagtttatttaataaactattttatcgtaacaactaatgtatggatttttttttattagatggaaacaatatgaagcatatgtacaagctttggagggcaagtacacagatcttaactgtaagtttgagttttagcttcctaaagactgaataatctccttttgattgttaaaatcaaaaggatagttgtttttattaaagcaaatgtaatttttctcgtgttttattataagaactgtacataggcactgtgttgggtgcaagaaaatataaagatgaatgagacacagtctcagtcattggagaagacagaggtgtaatagtcatgtaatggcatgacttagcaaaattatatgcaaggttctgaatatagatgcagtaactcagaactacttgaaacttttcttacttgtccctaaccccttctgcataggaatttgacttgaagcatgagttactagtctagaagagaaataaacagaagcaaccagtaacagatttatgacagcttaaatcaatatatataacttaataatatatacagatttttttaaatctgctgaaaataacgtttatcattttaagccattttagtctcactttttactgtttgaatcacatactatttgttgagtataaaaaccaatatatattgttttgtaacttcagaagggttaataccctgaaattctaattttgcgtgactgtgttacccatagaagtcatgaacattgtgaaagtttaaggctaggcacagtggctcacacctataatcccagcactttgggaggccaaggtgggaagatcacttgagcccaggagtttgagaccagcataggcaacatagggagaccttgtctctacaaaaaaaaaaagagtcaggaggatcactagagcccgggaggtcaaggctgctgcagtgagccctgattgtgccactggactcctgcctgggtaacagaataagatcctgcctcaagtttaaaatacaaattgtccagcagttattactattttatttatttatttgtttgtttgagacagggtctcgcactgttgcccaggctggagtgcagtggcacaatctgggcttagtgcaacctctgcctcccaggttcaagtcattgacctgcctcagcctcccaagtagctgggattacagacatgcatcaccacgactggctaattttgtatttttagtagagacggtgtttcaccgtgttggttaggctggtctgaaactcctgacctcaggtgatctacctgcctcagcctcccaaagtgctgggattacaggcgtgagcctctgtgcccagacagcatttttatattaaataggttaaaacatactaatcaggattttgtgaatactgtataacacagatgttttctgtcttctgttgggagtagatgaaactataaaaacataatttagttagtagtcatggagcactatgacaccattgtctcctaaaggagctctcgtgaccaggaagaaattcgcctgttataaaagtagttaggatggaaactaaagacttgattaattttttgaccctagttcttattgttcttgacagaggtatttagaacttgatcttaaaattgtatttataatttttttttgaatcatcagctaatgatgtaactggcctaagagagtctgaagaaaaactaaagcaacaacagcaggagtctgcacgcagggaaaacatccttgtaatgcgactagcaacyaaggamcaagagatgcaagagtgtactgtaagtatttcaagttatataaatgtctttagttgaggaattggtttttagtccacattattacatgttaattttaaacatttaatgctaaatataagagcttatcttttataggtacgtatgctttgagctttaagaatactagatgaaaaattttgataatgtctcatttagactgttttttgtggccaagaaggcaaagttttaagttttttttgaaattttcatgccttataagtattagttcatcaattccagacatttttcagatatcttggtgtctgaggatgtaatcaataaaagaacatttgctctttattgctttactttcactgattaggaaagccatctgaggactttatctctgttctcttgtcccctctgtgtatagaactgtttttcctagtgtcagcaacctctttagtgtctcctttttaattgttagaactttgatgtgtactgtgtagtatttactatgtctacgtagatctgaaatctagtgacataattgatcatccagctctggtagtttaggctcaatcttacggtgtaattatacaaaataattagaggcagctgtatccttgtttctgattttaaaatctgaatgtttcttcaattctttgtgtactctcccttcatttggtacatatagaagtcttcttatgtgttattaaagtcttctaagatagtattctggtcattggagacaccaaaaatctatgggcacagtcctgttcctgtttyttttgccaatagaatgttccttaaggttcagtcacagtccttttacttcccttacagagattgtttaaatttccacaaaagcacgtatttactcttctttcacttgttactaaatgacttcttcacattttactttgctaaaggctggcttttatcattttctttacttttttttcccactaacccccccgcccttttcttgagacagrgcctctctctcatccaggctggagtgcagtggtgtaatcacacctcacttcagcttcccgagtaactgatttcaggtgtgcgccaccaagcgcagctaatttcttaatttttstagagatgaggtcttccctatgttgcccaggctggtcttgaactgctgtactttggcaatccttactccttggcctcccaaaactgttgggattataggtgtgagccatcgcacctggcccattatcattttctctaccttcttaacacattttgtccttttgtttctatcagttttgttgtaattcttaccaccactgatacttctttctccatagttactaatgaatgttttaacaaatttccctttacacgagaaatggatcttacctttagactgctagcacttgggagatagagtgtgaatagaaggtgttgatggtaatatctcataggatcagaatgtcttgaattccatttctcttccggattcctactcttgacatcatagttgatgtgtgcacatcacaatgtttgtgctattcatgcacatctgattctccatctgtcctatatgcgctggcagttttgatcatattacgcctggtcaaggccttcggtgatacctcatcactcttgtctcctcgacctggattttaaggttatttcaactataatggaacctaaccttttccagcttttttttttttttaaaacagctgtcacctgcatacgccagctgaacaacttcctgttcttccaattataatacaagtgaggttttgcagacagggcagggcagcaggagcaaaatcacaaggaaaggtcaagattatatatggcagatgaggataaagtttcaggtgagagtgaaaaaagatgaggtcagcctggaatcttgggtattctagaagagaggggactactgaagaattcttcagcaagagatgtatgtgatggatcagatttagatttacattttaggtagatcactctgacttgagtatgaaagatagatttgagaggaacaggactttaagcaggaaaaccaattgtgaggctgttaaaatagttcagatgaaatacatgaagccactggtggtagcagacaggacagartaggtgttttggaggcacaatcaataggacttgtttagtttggatgctgttgtggaaggaatgaaaaaaatctagggaggaatcacagcttcaggtttgtcttgtttgactgagtaacgatgctactaggatagatcctacaaagatcaaattttaaaagaagagtagagtgtggtgttaggaaaacaggaaatccagcattccctcctccttccccaaaatacaaagtgattaaaacaaaggcatacataaagttctgtacaatacgaatttaaaattgttcgttagatttggcagttaagaggttgttggccaaggaagccaaaagattggatacccctgctctagaggaactgtcaagtgggaagtgagagaaactaaatttaaagagtagaaagaatgggagtgatgtactataggagtttggagggaataggttaagcgaatggttgaaaggattggccctgagaaggagggtttcttaccctcttgagtgaaaaatagtggaaaggtttgtattaggtacctgtcctttaaaacagagctgctgcatttacccttggtgtttcaaattaagctaagcttagaaaaaataaaatatacatccttaggaatctatttgtgtagatcttttgtttgtccagcatactaactcatccatttgatcttttaataataatgctttatttctttgtctacatgcagtctttgccaagtacatcagtagtcaatttagttagttttgagcgtaaggcataaattagccacgtagttactatattcttaactatatactgtattcttaactatattttattttgttggtaagtaaaatctgtcatttttgttcacctcagtggtatttctgtttttcatttagtcttttgccaatcaactcaaaatagatttaggaataaaactaactttgaaaacactttactcagtgttctcttccctagaacatggaatttattctagtctgattcacctctcttttcatgaatgaaagtgttgactattgggtctttgtaaagctaaatagtaactgagtctcagtcagtgctgtagactgttttaatcagtcctgtcagtacatggagtgcactgtaagtcatggtttattctcgctctgttatcttagcagctggcttcacattgactatgcagttgtactagatttttgctcagtgaaacaaatatattcccaaaccacttagtatatttgttccttttactaaatttatattagaaaattttaactgtaatcctayttaagccttagtatggagttagatcttgggccagatctactttgagtatgaagaaaatgatgaatttaatgctaataactatatttcatattttagaaatgtatttttagtgtgctagtaaatagcacaactgaagtcgaaattgaaggtttcatatgtaagtagaagggttctggtatggtggaaaaagctctagactgggaatcagaaggccggagaactagaattgtagtcccgctatggcactgaactaaacagttgggttatttaatctcaaaataagcagtttggattaggtgagttactttccagctttacaattctatgattcggatctattcagaaggggaaaaatatgaattatactttattttggcttaaggtcctatagagttttgcttttataaagctgtaacagcaactcttgtagctataagtactgtatattttttcctttagaaattcaaatgtgtattttaagttataatcttgcacctgatgtatttttaggggactttacatagaataatttccacaggtaaaaaattaagcaaaccaaagacttcattaactcttaggtaattaatattttaaactttgcttttttccactgggttgtcagcatttttagtaaatataatgttgattttcgtttgttttttggtaatgtttggattgtaaagtaaaatgtatgtagccactttaagtcccagatttggagatgtaatcaaatggcctcaattccwaagtgagtaaccttaaataawgttatttttttaattgacaaataagttttttacatattcaaggactactacatagtgatgtttcaatacatataatgtatagtgatcagatcggggtaattagcatattcatcaaatagtttttagtctgtactttttctagaaagttttaagatttttctagagaatttcaggatcaaagaggggaggagcttaatgaaagagttggtaaatcaagtgaatggagggagttttccccaccttcttatgtatgtttcctttgatttggtcgtaattgtttcttttgctttgcacagactcaaatccagtacctcaagcaagtccagcagccgagcgttgcccaactgagatcaacaatggtagacccagcgatcaacttgtttttcctaaaaatgaaaggtgaactggaacagactaaagacaaactggaacaagcccaaaatgaactgagtgcctggaagtttacgcctgataggtaaacaaatcatactccccagtcaagacttccctgacagtcccactacgagaaagctgtggtgggacagccaagtactcgtttccacaccaagactcagactttttgagccaaaaaaaagccacattcttacactgtccagcttgtaatggttaatgtaaaacttaccagatgaaccttgtgtttcagcttttttcttttccccttccccttgcttcagaggcctgatggcgtcggactattccgaagaagtggccacctccgaaaaattccccttctagaacatgtagacacttgagaaatgtttctgtttgaagaaaatagagggagaaacagaagtcttaagtctgtggcacactgtgtcttcagacagtttgaaggaatgaaaacctagagattttaaatyatgaattgaacatgtaaaattccagtaaaatgtaaaaacggaatatgcatcgctcttaaccttgagcatagtgacttagagacactgtgtatcagttttgccaataagactgtggacttcatgattgttgttgaacttctgggtcaaaactcaaatgaggtgaattttgcctttaaagggtttatttgctgagaaccaactttcaatagtcatgagagaatcaaataatagatgtccgtacaagtagcgcatatatttaaccatttagtttggggctctatattacttgcttgagccttaatcaatgtggttttattcaatggtttgttctttgaatggttgcaaaaactgtagatmatcttactgaggactgtacaaacatgaaggtgtggtatcaaacttcaggttgaaactgtttgaagcattataaacattcatttcacaactagattgtataaggatattagctgtgatgagactcactgcattattttttttagtgaattttatgaaatccccgttccattcaacaggcacatgtttaaaaragctttgtcgttggtgttaatgggggaatgtgttccttcattgtatttgggccttttgtattgcactcttgatattaaattaaatgtgccttgaaatagttggtttttttttttttttaagttcaaagaatattatgatgattttgttgtactctttaacattttaatttggggcggggagggcctgttgagagcagattcattttggaaatactgttgctgtgctcttcaaagtgaaggaaaaggcgctgtgcctcatttttaaaagacctacataaaagacaaggagacttgacacttgttacttttatgacactttgtcccagggtattgcagtagaaagtaatgtgggacagcttcacagggtgtctgccagaagataatgtgttggaactgtgggctggcctaagtaagacattttgtgaattgaaaaaaggtatagtgatcatttctagcaaattcatttaatcatttagataaatgaggcattattttcttcatgcttccatccaatcctggaggtgaattttttccgtcagatcattctataagtcaccaattcaaattttcgcttggtgataatggagtctaagatgagtggaagataaatgttccagcttgtcccaacgtttaagtgcagttttaacaagggtgacttaagttctctcttaatcattcaaatcaattgtaagtatcatatgtttgtgctttagggaactgattgtggggcagagggtgggttgaagaagtggtttgtgtgacttttcagcaagaaatctgcttctaaaattctcactatttgtgagggttggagggtaagtaaccagatctgtttgaaattagcttatgtgcttgcattaaggcttttgtaaatattttatgccatttaagttcacagtagaaatggcctaagtatctttttagtagattttagtagaagagtaatccataaaatgtattattaacatgtactcaaattgagcaggcatctttctttgacacttagataacagtcatgagttctatggtttttttcttgtcattgttaaaattttctcttttaataagataatacatgcttatgtataaaattgaaatactgtagagaaagggggagatgaaaagtgagtgtcactcccggatgtgaccttgacatcctcattctcttctccaagagcagtaactgctattactttttcttgggtatcatcaagataatttctatgcatatacagttattttatgtatattgttttaaacaaatgtgatcataccataaacacagatgagttgcaccttgtttttttttacttggtctctttggcatttttccattttttaatgtatctagacaactacatttttaatgcttacatagtatatttccgttatattaaggaatcataatttatttgaatcacttataaatggatttttttctataaaattggctgtaagccagagtatatcaggtactataaatacatcactaatttgaaacaaataatggctcaggcaatcccctgtctggaatatttccagtggtggaatgggttttgctttgggttgcgtgcacgcgcacgcacgtgtgtgtcttcgctttactgtttttctgttctaattttgaggaagaaagattcccagaaataacctgtccagttcagttaaaatatttcattcatgtgagaatgcacacattttagagtgtttagaggtatatctttcaaagtgctttctattatgtttgtgggttaatcgattttaggaatgggttgatttttttgtttgtaattttaaaaaattatttcaaaaacaactacttgtaattaaattattttttcaaaactgtgattttgttaaaatttattttactaatcactagttttaaacgtgatatgactatcttagcttagacatttatttattaaaaggtatgactttttaaacgaaaccttttttgcattagaatttgtgacatttttatatggggttaagtcaggtcacagattaatgtatcttacagttgtctttttctactctttaaaattcatatagtaagaaggttagttgtaaacaccaatgaaatatatatactttgcaagaagacagttttgagagcataggcagtaaagtggaaggaattccattgtttttgacaatcttgcatatctctcattttcccattgtttaatttctaagtggatgttcagtggaggctaacgcctgagagtgctgatgggaaatggtggaaatctggagctacagtagcagtgaacaagaacaccagctaataaagttatcatatcaaagaataaagcctttaccacatgctcactggtggctttcaccctcgggctcctctgagcagtagtaacccaggttgaactcttcaggtattttctggaagaaagcttaattacaaacttttccttgaattacattaggttagaaaacatgcagccaggcacggtggctcatgcctgtaatcccaacactttggaaggctgaggtaggcagatcacttgagcttaggagtttgagaccagcctgggcaacaaggcgaaaccccatctctactaaaaatccaaaattagctgggggtgctcgtgcacacctatagtccccaggtactccggaggctgaggtgggaggatcacctgagcctggggacgtcaaggctccagtgagctgagatcacgccactgcactccagcctggcaacacagtgagacccccatctcaaaaaaaaaaaaaaaatgctgtaggtgaaagaaccatgcaacacttcaaagattgataaaatatttacaaaatgctctcatttttaaacttataaggcatactgaagtagtgtatcaggcaagtgaaagcctcactagaagaaggaaagactagaatttaaaaaatgttttaacccataaggtcatcctggacttaccccaaggacaagaatgtcacactgtctttatccaagtctcaaaggtaaatatcacaattatttacttagatccctttaaaagtgatcatttctttttttttcttttttcataaataattacaagaacaagcaaataatttctccttttattgctgaggctaaagaaaagcagtaaaattttattgggaaacatttgagcttttcattacatatttgcaattgctatgtatgtgcacataggttcagtagtatgttgcactagcatttggaaactataatctgtggaaagtgtgacactcctagattggcagatatttgcgtgtttgaattgtgatacgtgaccactggtcttatttttgtgtcaaaaggatgatcttttccaataaagtcttaagtctttaaaaaaaaaaccttaactgctgaatgtgcctcaattaatataatagataatattcttgagagttatggaagatggatgtaccagaaaacttccctctctcctcctcttttttgagacagggtccctgtttccgaagctggaatgcagtggcatggtcacagcgtcaaccacttgggcttaagcagtcctctcacctcagcctttccagaggctggcactacaagcatgtgtgcctggctactttttaaaaaattttttgtagagttggagtctatgttgcccatgctggaggacttcctgttaaggaaaatccttattaaatgtttttctagcaagaataaatactctcattcatttttatttgtaggtactgattttcataaatatttgtgattgatgttgcatgtaccttttcaagaacttttctgataaagcgctagattccttagtgtaataatactggtatagccaaggtgtgtgttaattaactggctctgtttccatttcaaatgataatttgagatgaaaatagatggatttcagaattgattattgatgtaatagaaacaaggtgtagctgtttgggcactttttgtttagggtttatttttrctgctgtgttggcaaaatactgaaatgcagaagatggatgtgtcccagaaaagaagatggtaattatggggaagcatctgctgtgatatagttatgtttgtatgtgttacatctatcactgtaataattgtaagcaaagacagagagttttgkcttcattttgtgatggatggctctttcctttgcagccaaacagggaaaaagttaatggcgaagtgtcgaatgcttatccaggaraatcaagagcttggaaggcagctgtcccagggacgtattgcacaacttgaagcagagttggctttacagaagaaatacagtgaggagcttaaaagcagtcaggatggtaaggggtttgtttctttttggaacgttgtctcaactttgcattggctttttaaaactgccagtcatgaatattataggttagattctgtacattgttaacctctgccctatgattgtatattattgtgagtgaagcatttttagttgagtccgcaaacaaagccatataattttagtttgtttatccccaccctcctaattctttattgttcaaaatttcttacatttttgtttttagttgggggtaggatttggtaaaagataaaagggtgttgtattacttaacaagatggacaaatttgtattcattgtttgaaagggagaataagcatttctcgttaagtgtaaatcttagaaacatgggcagttttcagcgatctgaaagtaataaagttgattgtatctgtgaaggttttattagtgaataagagatttaatctttaaatttgctgagataaaacttgtcagcctccatcctttttagtgcaagtgtagctgtatctctgtttctcttctttgtaaggtgcattattaataaggaaaatatccaaattctttgaaattttaaattgaaaattagtgtctctggttaattgcaaagatgatcagtagccaagtaatttcttctgaactacctaccttttcaaaatcttcaggaattatttcctgtgacttttgtccttttatrtgtaacagtccttggttgagaacatgggcctctttggagtgttatagaggaccacactatccttaaggatcagacttgctatggaactaaggcactggatcaggaataaggggattggccatagtgggcccataggtaaacgtgagtcaaactttggggctgtaatcaggcatatggcaagatggatcaaaacaattttaacttggttgcttaatacagttgccctcggtatccatggtggattggtgtcaggacctcccacagtaagcccctcatataaaatgatgtcatatttacatataaacctatgtacatcttcccctttgagccatctctagattaacagtacctaatacaatataaatgctaggaaaatagttattttactgtattgtttgggggataatgacaagaaaaaaaatctgtacatgttcagtatagacccagttttttcttccttgaatattttccttctacagttgsttgaattcattgttgcatgtggagggccaactgtatattattttaagtatctgacttcccccaaaacaaactcagtcatattttaagattccaagcaaaatttttaaatgtagtgtgattttagaattgtatttgtttacttgagcgtttattgactcccttgctttgtggcaggcactaaagaaacatttttcaatgttataaacgatattaaagttggtctgactctcctttgcacagaactgaatgacttcatcatccagcttgatgaagaagtagagggtatgcagagtaccattctagttctgcagcagcagctgaaggagacacgccagcagttggctcagtaccagcagcagcagtctcaggcctctgccccaagtaccagcaggactacagcttctgaacctgtagaacagtcagaggccacaagtaaagactgcagtcgtctgacaaacggaccaagtaatggtagctcctcccgccagaggacgtctgggtctggatttcacagggagggcaacacaaccgaagatgactttccttcttctccagggaatggtaataagtcctccaacagctcagaggagagaactggcagaggaggtagtggttacgtaaatcaactcagtgcggggtatgaaagtgtagactctcccacgggcagkgaaaactctctcacacaccaatcaaatgacacagactccagtcatgaccctcaagaggagaaagcagtgagtgggaaaggtaatcgaactgtgggttcccgccacgttcagaatggcttggactcaagtgtaaatgtacagggttcagttttgtaatattttttcagcaaatttttatacagtgtcatttaatttgggagaggatactgtccagaaaattaatgcatacttttgtcacaatttgcctttttgtgggtgtacgttttggtttttttttgttgttttttttctttgttttttttttcttttctttttttttttttttttttttttttgcttcaatacttctgccgctttggaaattgtaacagttaattactttgaatgttgctaaaaggacattttgtgtagggtcaagttatttttatatgagttaatgtgaaattgtaaatggaaatttttccttaaaatacaacacaatgatgtctgtataaatctgtctgtttaraatctgtgctgtgtaagggcattcgtactcatgctgttactgtacttatgcaccattcagacttgttagagtagatgtgggtttatgactgccaagtttgcccagtacagtagttttttatcactaaaagttggactcattgatggagtcctgtagtagtttcagtgttagatacagttttttccaccatacatctgtgcattttctctttaggtgactgtttaagaaatttgtgtgcatagttactcagtttttatgaactgttgtatcctgttaatgcatattgctctgtgactccagtatatcttacctgtactgaccaaacctaaataaagatttttattgtaactccttaattagcttttttgttttgttttgggtgtatgtttagcatttgtcattttcattgagtcattgaatttctactcattatccttcaagtaccacaacagtcaaacttaagaccaagcatcgattacgattttgcacacaatttttaatttatgccttattttgcaaaacggagctggagtttagggctacacttaaaattttttcttgacttataattgttacaaaatattttaaaatacagaaaagtataaagaaaatagtcatctatttcttaggctttttttttttttttttttttttaattgagacagggtcttgctttgtcacttaggctcaagtgcagtggtgcagtcatggctcactgcagcctcaaagtcctcgactcaagtgatcctcccacttcaggcttccgagtacctgagactataggcatatactaccacacccagctacatttattttaattttagtagagacaaggcctcgctatgttgcacaggctggcctcaaactcctggccccaagggatccttctgccttggcttcccaacgtgttgggattgcaggagtgagctacagctcctggccctttttgagttttaattgaaaagcagcgttggttttttgtgacctgatttcaagtagagtatctttgtagtcagtgatgtttgttttaaaacgctggccagcactactgatttttactaacaacatatctggtaatattatatgagtaaggggtgttagaatgtaggtaggagaaaatgtttttaaggtggaagaatgtcaaaatttgctccattttctcagaggtaattaagtataaaagtatgatattgaatggccttcaaatgtgtagctttcatatatggttgaaatgaaattccatttctgttaaaagcaaagtattgttttagacataacttgtaatacaatcaaggaaccttgggagtggagttataatactcgaaaactgaggtacaacttatttgaaagtaattgctgcttttgcttgtttagctgatacaggtatatccggtcttcagcagtatgttaaatactgcactgtctcttgattaaccttttcttttttttctttttctcttttttttttttgccgagagtctcgctctgccacccaggctggagtgcagtggcaccatcgtggctcactgcaacctccacctcccggattcaagtaattctcctgcctcagactcctgagtagctgggattacaggcgtgcgccaccatgcccggcttatttttgtatttttagaagagatgaggtttcactgtgttggccaggctggtctcgaactcctgaccttgtgatccacccacctcggcctcccaaagtgctgggattacaggtgtgagccaccgcgcccaaccttgattaaccttttctacagtctgctcaagtgagtaaaaaatcctatacgatttttaatttgcatgtgattaaacattttggtgtttgatatatcagatactgtgtttggcttttgttatgtacatccttcaacttgaccaatttaaacaaaaatgtaatttctctgtcctgttggtgtaatgtaatcaagagtttgtgataggaaattaatttttcaaccagtgatacaattttatgactgaatttaatatggacctgttaatgtgacattttcatgtttctgttgagtctgccttgatgaataactcagagcacttattctgtggtacacagagtcagtatttctcatttctggaattggatgctttattttctggtatgcctgtgataagagaggtgatagagtggcttctgcatctaattggtttgaatcctggtattacacttaactgatttgggcaaatgtatcctcgaggctcgatattttgttttgtttttctcccctgtaagagcactcactgctgtcttagcttgggctgctgtgaaaaaaaaaaaaaaccacagactgggtggctttacacgcgcattcctcactgtttttggaggctgggaagtctaaagatcacagtgccccctgattggtgccccagtttggttcctggtagtcctcatacagagagcgcaatagatgtcagtttccttggctcctcaggtgtattggatacaactgactactccagtttttgagacacttttgcaaaacaatgtaaagccattccttctgacaactttctttctcagatgttccctctttcatgagtagttatgccctgtactcaaatcattgcctgctgctctacgtcactgtcttgggagttcacctatccctgtggttatagtgaacactttcataatcccaggtaatgtcattaactgatctggacccatcatggggtggctgtgctgagggagtgttgagctagcccctagtggtaaggagtacactgctgaccttcatcctatggcaattccactttggtgattcactgttcccctcatggagaccaaggaggaatttgctgcatggtaggttggtgaatccagcctgtagcaaagacctggcttggactcctgcaactctttatgaaacttaaccaagaatgattgcatcttccagcgggggaagatgctgagaaggccccttcaggataaactggctccatagcactgctgtaatgatggctcctcatgagtaagcacttggagatttttgtggcttcctgcccactcaccctgctcaccagtccaggtagtttatgatttgagatctagatgtaattttattttatttctttttttttttttgagatggagtttcgctcttgttgcccaggctggagtacaatggtgcaatctcggcccaccacaacctccgcctcccaggttcaagcaattctcctgcctcagcctccctagtagctgggatttacaggcatgtggcaccacgcccagctaattttgtatttttagtagagacagagtttctgcatgttggtcaggcaggtcttgaactcccgacctcaggtgatctgcccgcctcggcctcccaaagtgctgggattacaggcatgagccaccgcggccggccaagacataattttaaaaattatcttccagctggccgggcgcggtggctcacgcctgtaatcccagcactttgggaggccgaggtgggcggatcacaaggtcaggagttcgagatcagcctgactaacatggtgaaaccccgtctttactaaaaatataaaaattagctgggcatgatggcacgggcctgtaatcccagctactcaggactctgaggcagaagaatcgcttgaacccgggaggtggaggttgtggtgagccgagatagcgccactgcactccagcctgggtgacagagcgagctccgtctcaaaaaaaaaaaaaaaattcctcttctttccttcattcattattcttagtctctgtctgtctcatatgagtagataatcatatgagtagctataatgaggactcctcaggggacagattctgtttggccactcagcagaagcatgcaattaccttctcaagattggctcctaaacttactctagatagagccttcaggcaggaaactctatatcccttggctccagaagaatatattcatactcattcaaatgtgctaggcactggccataaagaatattggtgttcattcataactgcctataatgtgctaggagctgtgcataaagcagtgtaacaggatcatcttggaaagcttatgtagtcagtagaggagacagataaactaggaattacatggtaagttgaaagaggaagttaggggtaagatgctgcaccaaatgcaggagattggaaggtttttctggaagaagtgatgtttagggggagtttcagaggtaaatttctggtttggttaacagaagatagtttcactgctcactgagattacagaagaaacaggctggaagagtttggtttcaatatgtcaaatttgatgtgcttataggaaattttatttatttgagacagtttctctctgtcgctcaggctggagtgcagtggtgtgatctcggctcactgaaacctctgcctcctaggttcaagcgattttcccatgtcagcctccccagtagctgggattacaggcgcacggcaccacgcccggctaatttttctattttatggtagaaacgggatatcaccatgttggccaggctggtgtcaaactgctgacctcaaatgatccgccctcctcggcctcccaaagtgctgggattacaggtgtgagccaaggtgcccgacctgatgtgcttgtaagaatttaaatgaagagggtcagtcagcttaggagacgaggttagatgtaaggatttcagacttgtcagtatacaggtggtgattgatgccgtaggaatgactggtattacccagggagctggtgcaaagtaggagccttggggaacatgttaaggggatgtgagagtaagcccacaaagactcagaagtggccagggagtaaggggaaaatgggatagaatagagcaaaagccacgggaggcattccttgaattccttggactcagatatgttaggggacaggaaacacattgaagacaactgaagagacttcagtgtgctgctgagttcttagcagagtagacagctgatttcaccactattccagaccctaaagatttctcctgaaattgcactgttatgcaatttttttccttctctattgccccacctctggggcctacactctttaccttctctgatttatctgacccatccgcatatctctgcaaagtcttaatgtaggtttccaggatttaatgattctttcaatcaactttaaagttcttcaggaagattctccaggtccgtcaacagttttccccttcatgactttgtgacaaagctttcttgttccactatccaggtgttcccaacaagttgctgtaacggtggcccctcataagcttgcctggaaaccctagaaagctcagaaaaattatgaactttgcccagtaagaggctgggaagtcagaaagggttttaaacaaaactgaccccacttgttacatgctcctttcactgtccaaacgtcaaccaaaggaacttttgtgacgctaagacgctcccggcgtcctcacccgttcacagccagagttgatcttagaaggcagggggctcgcaccgagacgctcctagcaagcccctcacgcgagcgaatgactggcgccaggagaaacgcataggacctcccgaagccgccgagagcaaaaggacccatcagagctgtgctgagacccgccgcgggccgggctcgcactcgagattctcgcccgtgggattccagtcctgagctgaacgagagataagtctttgtcaccccccagtctttactgtttcgagaaaccctaagattttttaaaaaaaagcccaagacgtcaagtcggggaactccaacattggggtgtccagaaacactggggtttcaggcgctctgtaaatgcgtccgaggtccgcggttctgcccgcaagcccagaccccggcctcacttccgccccgcgccccgcgccccggcctcacttccgccccgcgccccgcgccccgcgccccgcgcgcctccgcccgcccctgctccggccttgcgcctgcgcacagtgggatgcgcggggaggtggtgcgcggggaggtggagggcgaggggcggggctacctcaggtcccgcccgcggcaggcctgtgggctgcgaggaggagctttgcctagcttgcaggcagcgcagggcagacggcggcaggagaagcaagatgaatgcaggctcagatcctgtggtcatcgtctcggcggcgcggaccatcataggtgagtggccggcgggagccgcgcagagtccgaggcgcctgctgcttcggcaggagcgccgagggccggacttgtgtaggagaggggcgtatgtggaggaagccggtcaggccaagccgcgaggagccgcgggatccctggaaccctgcggctcccgcgttccctgacctggt

SEQ ID NO: 5772 - DNA, 20991 bp, Homo sapiens
cttaaaaggccaaaaataatctctcaacatacctctgtctaatttggtccagtttttcagggtctgtaatgaccacctgtacaccaagcttcatttttgttttttgcaggctgaagtcaaggcaagcaatttttgcatttacgattctcttgggcatgcctacaattgaacataagattaagttaatacgtctatccttaaaagcataataaagagtacctataatcgattgtatgtaaacacacaaatttagactaattcattgcattttatcttagaaaaattttatggcattaaatgcacgtaatttcttttaattcacattccttctaccatgttgtatgtgctttaaattacaaaaagatgtactgcacataatccacaaaaaaacattttttatttttttttttttttgagacggagtctcactctgtagcccaggctggagtgcagtggtgtgatcttggctcactgcaatctccgcctcccaggttccagtgattctccttcctcagcctcccaagtagctgggactacaggcaggtgccaccatgcccagctaatttttgtattttttagtagagatgaggtttcaccatattggacaggctgctctcaaactcctgccctcgtgatccacctgactcagcctcccaaagtgctgggattacaggcatgagccaccgcgcccagccaaaagaaaagctagttttaatctgtagcaatctcattctataaaccaaatcccaaaccttaccctgggatcccaccacacagttgagtgcatagccactgatgagcatactctccatttgacttctcccatgggctttcaaaatattaacagagttgactggatagcgtggctggcctcttatgtctgtgtatttaatagcaagtacagcatctactaccatgttagcaaagaaatcaccatttctacgccaaaagttaaggacagtaacaggtttggaatggacaaagggtacacacgtgaaaaatcaagggtaatttcaagggacttccttttagtaatctaatctattaaagcagcaagcattacttgtcaccaaaatgttacaacattatcactatctgcaattcatatcacttttagacatgctttttattaccttttcaccctaaaaaagcagggaaggcaacaggtaatttcaatacagcattactcctctctattgatatcaatttgcataaaattggttattcaaaattttattgcacaaaattgatactgctgctactacgcacgcgtgcgcgcaacacatgcgcacacacgcacccactcccgagacagggtcttgctatgttgcccacattggactggcactcctgggttcaattaatactcctacctcagcctccttagtagctgggactacaggcacataccaccatgcccatctcaaagtcttatgctttaaaaagtctaaattttatctgacaaccacaaggatacattccaatgattttggaagacatggatgtcttagcagcattaatcaggcaatctcttcccagttcatctgtgttaacaattaggttttcattgatataacgcactgcttccctgtttaaaagtgtgggggagaaaaacgcttataaagtcactactcaaactctttgcattcatcatgcttaacacagagccaaaatgtcgtaagtaataatacccgttcagccatttcatataggaggaggacatgaaaaaaccctccctcttcagatcatggcaagtttaatctatcccataagcatagccactaaaatctattattaggagaaaatgtggtagtcaaatgagaaaaaagatactggtccaagtttttaacttcaaatattactacttaaatgctaaaacatttaaattgaaggttttcaaattaaaatttagttattaatcaaaacgttaagacaacacagtttacaactattacatcaaaaaaaatttctctgaatgcaaacaatcttacttgcaagcaagtcgatagccactaataactgatgtgggatgaattttctgtttgactaattcatctgcattttttaggagttctgctgcaataataacctgttgagaaaacattcaccggtctgagtgtgccggatattcaacatgtgcaatacatatggaatgacactaaaatggccatatattattaaccaaaatggtagtgatgaaatgaattaactggttattagaaacctgggcgtgaagggagaagaacgctacaaaacactccaagtcctccacgttactcataaattcttggaaactgccactttaagcaaaacaatggacagcaatttctcaaatacagttgtttattgtaacgctgatggggggaggaaaacttgtttttttatacatcatctttcctcttaaagtcagtttccatgaagccactgtggatgttcagtgaggtcttattgtattataaatgcaaatggccaaaactgggtaggagccagaaaaatgttctaagaaactagttcagcaataagaaactagttcatcaatacaaccgtaaaagacaacacatctattacctttagaaaaaatgctcaacagaagctaaaccgagtgtgactattcatatgacctatattaggctattattttatttaaaaaagatagttcttcaagttgataaaacactaagaaatatttttaaagcaaaaagactgtcagcttcttatggaaggaaaactacatttgttaaatcacattatcgtaagttagacaaagatcatattcatattttaggagtagattccattctttcatggctaaagtttaatctagaaatacattttccccacaaactatctagtttctccagaattaacatctttctcaccaaacaatagtgtttctactataccagcatgctggatgatctatgaagagtttatactgtgtatcacatttactgactcggtaagatcacactgtcatatcatgatgtatttattaatttctcacactcccattttgaattcctgagattacctgtcaggatttaaaaaatagaacaggctgagtgcagctcatgcgtgtaatcccagcactacagaggccgagaagggaggatcacttgaggccaggagttcaagaccagcctgggcaacatagcgagaccctgtctcttaaaaaaaaaaaaaagaggtttttaattagttgcttgtggtggcacatgcctgcaatcccaagcactctgggaggctaaggcaggaggattgcttgaacccaggagttccaggctgcagtgagatatgacagcactgcagcacttcagactgtgctacagatggtctcttaaaaataataatataaaaacattgtttctcccccagattggtaacattttatcctccaaataatcagaaaagttgagagctttccaagtctcaaggggtgatgggggaggaaacaagacttttgagagaccataaaaaaatctgtgtgatgtctgaatactgccataaaaggaaaaataagccctcaaaacttgtgaataccaacatttaaaacaatggggctatgtcaaatgaactcaaattctttcctacttaaactgtacaaactagctgtaactatcaacttacaaattttgtttctgaatctgtacctaagaagcttatttcccctcttaaatgtgtaacttcttttgttttttcttcttgctcaatcttctgggcattcagaatatgtaacttatttctgacacagcacaaatgacccacttatggcttcaactttctgaaagtcggtcgtttttagaaaaatgatcattctttagccagtctacctaccactgaagtagttccatctccaacttctttgtcttgcagatcagccagctcacaaagaactttagctgcaggatgttctacctccagtaacttcaggatggttgcaccatcgttagtaatggttacatcctaagaaattcgcaggaaaaaatatgaaccacttatagaaatcaacacagccccattataatacacgttcacctttaatatcaccttccagtacgtggattctgataaagtcaaagaaagaacatagcaaaacactgaagatagttttactttaaggaaactaacacaacagttatgtgtacttacaccaatatcatccaccaacattttatccaagccaactggaccaagagaactttttacaatattggcaatcgaagctgcagccataactgtagacaatcaattaaaaataaaaaagaaatgaggataagccacaactctgaaagacagtaatttcagcctaaaggtaaatgacatccaacagcccccgtatttcccaaatctacaaatctgtgttaattatttaaaaaccacctactaagagtgtaaatggggccagacactgtggctcacaggtgtaatcccaacactgcgaggccgaggcaggaggatcgcttgatgccaggagtttgagacccctttgggcaacatagcgaaacccatttctacaaaaaataaaaacaaagccggatgcggcggcgcggacctgtgcttggagaatgcagtgagctatgatggcactctcgtctgggcgacaggtgggaccctgtccctaaacaaagcgagcctatttggcacagctttgatgcggggtggaatctgatggcggggaaaaaaaaaaaaagtaataaccaccaatttcatgctctgccacttcgtacagctataccagccttttccttcagattctgcaagttttttgctcattaaaactctctttatctgtgaggagagaaatcggtagtcaacggggaaggtggtgactttcagatttgtttacgaaaaaaattaggaatctatcaagaaacagtaagctctgtaggtatccaaaggcctgacagcaaacgctctgctaagttagcgctgccgtctcctggggtcaatgcactcgagtggcgtttcctgggctaactctactgtaagaagctgtcaacccggatacggctggacgccggacgcccgacctcgactgcagctgcgggcggacagggcaccgggctcatccgagggcgcgcggatggacctactctttttctggtaaatggtcctaaaataaaacctggcgtttaacatggacactcagggggtcgccctgaaacaaaagggggtgcgaggcgtggcccgcacgtgcgagcccgggaggcccgctttcccgcggagggcgcgtttccaacgccgccccggacaccacatccacgcgttgccggtctcaaaaccctgccgcgcgcggcggggctcctcctcgctgtgggaaaagtggggccacagcgccctgccccagagaacggcgggtgggctgggtccggctgcggggccccgaggccctttctgcggaggtaaaggagagaaacgagggcagccggggtccggtcgcggtgggactcggccctccccggccgcaaacccgacccaggcccggcccgcccttaccgttttgggagcggatcgtttccccagtgctgcggtcaccgaacacggacaaaggcccctccatcttgacggcagcgatacacgtcgaattctgcttacaccgcgggcaaccagtatcgcggcccctcggccgaccggcgaccacagcagtggctgcgacggcgtggagcgtacccgagcgatgtcccaggagctactgggtaacacaccaccccacccgcttcccggctgccccggcccggccgcggggcacggcgggaaggaaaaagaggcagggacaacagggagagaaacaggactgtgacggaagtgaggctccggggaaggggcggggtcggcatttttgtccaattagatagccgatgggaagggcgcgaaagcggagaacggaagtcggatgttggaccgctgggaagaggttgaaccttcgcctcaaacgatgttgcgcagacgcagtgggccattctagtgccttctagaaaaggttgtaagaagggtggagcttggagctggggtgtaactggaggggcgggcccttctccaagttagagttggggttctgagcgagtcgtgcgttttaggtttagtgtcttttccttgtccctgctcggggagcgtgaggcagatcggccggctttgctccaggcctcaggagtgtaagtttaagggcgcgaacctgggtgggacggggcagtttttccagcgggccatacgggaaaatttttggttcgaggaagacaaccaccctttttaaggagaaaactgcatcttgccctgccttattcctacgcggtgcccaggtggggtgtgtgtggaccagtcaatgaccgcccaagctctccgagtagaaaacccaaacatggttttgtggggtgtgtgcctttgaccccggacttaagcaamaagcgtggtcttgggcgtagctacgaggtggttggtgggctccagggcctgcgtgcccctcgacgtgagcgatgattggcgrtgmaggataacagatcgccttctyggccactcagtggcaggggacttgctacttccgggtcggyggcgtctggcgtggagagtttggggatctacagcagccaaaggcttgtccctgactttatatggctgckcctggcgagcgactgagtcgtccgtgagraaaaagaggcgaggcttttccgagatcgtctcagcgatggcgcttcggtcgcrgttttgggggttctcggtttgcaggaaccctggtaattagtcttgccccccttctcccagctcactcgcctgggcttgcacagtacattggaacgtgcgggttctattttgtattcgacgtgccggatcgaaatagagctcgcggcactgcgaagaccacagtaggaagttaaggacggggtcagtgctgactccaccctgtgggcatacgtatttttcgtcccctcgggcctaaagattgggggtgtaaaagcggatagacgttagagcgggttcgtgcgctgtccatatccgtcatttttaagccctgtgcggtttttcccgttgcccagggtgcaggttcgcagccctgtcaaccagctccgagccggcagcgaaacctgaagtggaccctgtggaaaatgaagctgtcgccccagaattcaccaaccggaacccccggaacctggagcttttatctgtagccaggaaagagcggggctggcggacggtgtttccctcccgtgagttctggcacaggtaattaaatctgcttgtgattgacaagggcagtgcaccctacagactattttcattcattcaactccaggcactctcccaggtagctgccatgcggcgggtagaggcarggttcgcggaggggctggaacaaacaacaaataggtgtgatgggggctatttaaagaggatgttacagtagcggacaggatacctgcctgtctgaggtgacatttaagaaggtgagatctgaaagaggaagaagcctagtcatctgccagaaagagcagtcctagcaaaggaaactgctggggtgaggaactgaagggcttgtggatctgaagctcaatgggcagaggatgaatggcccaagatgaacatggaggggtaaggaggcgacagatgattagctttgtaagtcaagatgagcactttagactttcttttcattatagtgggaaactacgagaggatttaaagcttgagcccgaattggtttttcaagatcattctggctgggcgcattgtctcatgcctgtaatcccagcactttagggagccagccgaagaagscggatcatctgaggtcaggagtttgagaccaacctggccaacatggtgaaaccccgtctctactaaaaatataaaaattagaggggcgtggtggtgcacgcctgtaatcccagctactccagtggctgaggcaygagaatcacttgaacccaggaggcggaggttgcagtgagctgagcgcctgggcgacagagcaaaattctgtctcaaaaaaaaaaaaatcattttagctgctttttggaagattaaatttttgagggagcaggacttgaagaaagaccagttaggagtctagtatgacttgagatactttgttataaaggtggttgtttaatgaacacttayatttgccaggaattatgctacttgctttatatgttttttctcatttaatccttaaaattacatcatgaagcagttataatttcccccattttacaggatcaaagaaattgaggtttagggagacatgattagtaagtgccagagctaagatttacatatgttttaactgacctcagagccaggacrctaggttattaccactatactacagcatgtaagtgtttatcaggtttatctgctgcttatctgcttggtgaggattttttagaatttcttaaggacttcttaagtactatgtaaagttgtaagagtaaattggaaatcattactgtgtgatgtattatttatttattgaacaagcatcatacctgtatcacttgmtaggcattgcgttagaggcaggagttacaaagataaagtagatgttatccctgtcatcaaaagtcttaagtttcatagtggaaagtggaatggggataatgatgtgttacagttgctgtaatacatttttactcatagaggagggagtccaagaaagggagtaggcagttcactttttaaataatctggatcttaaggctaaaaatcttttgaaacacccaacctattactttcttttttctttgtttttgagacagggtctgggtctgttgcccaggctagaatgcagtggtatgatatctgcttactgcatccttgacttccctgggctccagcaatcttcccacctcagcctcctgagtggctgggactagaggcgcatgccattactcccagctaatttgttttgttttgtttgagacaagctctggctctatcacccaggctggagtgcagtggtacagtatcagctggctgcaacctctgcctcccaggctcaaacgattctcccatctcagcttcctgagcatctgggactgcaggcacacactaccatggccggctaatttttttctttttctttttttttttttctggtattttttgtagagatggggttttgctgctgcccaggctggtctcgagctcttgagctcragagatctgcctgattcagcctcccaaggtgctgggattacagrcgtgrgccactgcactcggccccaacgcattactttgatttaatatttggatcattaaaaataactaaagatgtatttcctcattttttctctgtctgccttactcgcaatattaaaagtagagaatttcagaatattatagtaggaaatgacctttgacataatgaatcgggcccttcattgaacaaatggttcaagtgtcagcaaactacggcccgtgggccaaaggtagattgtgagctaaaaacttgtttttactttttttaagttaaaaaaaaaatcaaaagaatattttgtggcttgggaaaattaaatgaaaatcaaatttcgttgcccaggttcttagaacmtagctgtacctactctcatttgtttacgcatcacctggctgttctagcactacaatggctgagtcgaacagtttcaacagaagctattggacctagaaagcctaaaatatttactatctggcactttgtggaaaaagattgttgactcctggtttaacagattgtgatttttggccgggcgcggtggctcacgtttgtaatcccagcactttgggaggtcgaggcgggcggatcacgaggtcaggagatcaagaccatcctggctaacacggtgaaaccccgtctctactaaaaatacacaaaaaaattagccaggcgtggtggcaggcrcctgtagtcccagctactagggaggctgagacaggagagtggcgtgaacctgggaggcggagcttgcagtgagccgagatcgcgccactgcactccagcctgggcaacagastgagactccgtctcaaaaaaaaaaaaagagattgtgattttttactagagccaccaggaaaaccaggagtagactccatatttccaaatctaatgcctcttctatttcacattgagaatcctagtgagaatctaatgatttgggtgtgttttctttaacttaaacttgactttttaaagggtaacatatacgtatgttataaaatccaaagggagtacagtttcttgtgtgtccttctaaagattgtctatgcatataagcaaaaactgttaaaaacaataaatcttagcatacgataaacacttccgcatctttcttcaccaccaccctcaaccaccccaagcacgcacttaaaaatacatcttggagattcttcatggtagttaagagcattgactctggagccagacactgggacttaaaccatggctccattacttactagttttaatctttttcaagttacttaacstttctgtgttagtttctgcagctaaaaaaaaatatagaaaaaataatagaattgagacataagctttatctataaaccgttaagacaggcctggcatatactaagtgctcagtaaatgttaactattatcttcatcattataaagcattatttcattcatttcagtaactgtatggaatactattgcatggattttacttaactcgctcctagagggtgattatcttttatgattacagtgttgcatcgaattgtcttgtccatgcattttgttagtgagattgagcatatttttgtgaatttgagtcattaatatttttcttttctgtgaacagtctgttyggataatgctttgcctattaagttatgaaggggtgggttgcccctcctcacctgtgggtgtttctygttaggtggaacgagagacttggaaaagaaaaagacacaaagtatagagaaagaaataaggggacccagggaaccagcgttcagcatatggaggatcccgccagcctctgagttcccttagtatttattgatcattcgtgggtgtttctctgagagggggatgtgtcagggtcacaagacaatagtggggagaggattagcagacaaacatgtgaacaaaggtctttgcatcatagacaaagtaaagaatcaagtgctgtgcttttagatatgcatacacataaacatctcaatgctttacaaagcagtattgctgcccgcatgtcccacctccagccctaaggcggtttttccctaactcagtagatggaacgtacaatcgggttttataccgagacagtgcattgcccagggacaggcaggagacagatgctttcctcttgtctcaagtgcaagaggcatgccttcctcttatactaatcctcctcagcacagaccctttacgggtgtcaggctgggggacggtcaggtctttcccttcccacgaggccatatttcagtctatcacatggggagaaaccttggacaatacctggctttcctaggcagaggtccctgcggccttccgcagtgtttgtgtccctgggtacttgagattagggagtggtgatgactcttaacgagcatgctgccttcaagcatctgtttaacaaagcacatcttgcacaacccttaatccatttaaccctgagtttgacacagcacgtrtttcagagagcagggggttgggggtaaggtcatagattaacagaatctcaaggcagaagaatttttcttagtacagaacaaaatggagtctcctatgtctacttctttctacacagacagtaacaatctgatctcttgcttttccccacaagttattgatcattttcttgttaattataggaggcttttaacatattgtgtaaattagctctttgaacaatatatgagtttaaaatattttttctttttatatttttgtgacagggtttcactctgtcacccaggctggagtgcagggcattatcacggctcactgcagccacaacctcctgggctcaaacaatcttcccacctcagcctcccaagtagctgggactacaggtgcacaccatcacgcctggctgattttttctattttttgtagagacagagtgtcactgtgttgcctgggctggtcttgaactccttggctctagcagtcctcctgcctcagccttccaaagtgctgggattacaagcttgagtcacatgcccagcctaaaatattttttgtttcattgcttttcttttgacttcattttactttttttttttttttttttttaaccatgcagcaaattttgtccatcatttcttttttatgccatatgaggggctgggcatggtggctcagcctgtaaccccagcacattaggaggctgaggtgggtagactgcttgagcttaggagtttgagacgagcctgggcaatatggcaaaccctgtctctacaaaaaaatacaaaaattagctgggtgcagtggcatgcgcctgtagtcccagccacttgggaggttgaggtggaaggatgacttgawcccaggaggcagaggctgctgtgagccaagttcgtgcctctgtactctagcctgagagacagaggcagaccctgtctcaaaaaaaaaaaaaaatggccatatgaagctggacacagtggctcatgcctgtaatcccagtgctttgggaggttgagaagggtgggtcgcttgaggccaggagtttgacaccagccttggcaacatagggagaccctgtctctacaaaataaaaattatcttggtgcagtggcatgcacctgtaatgccaactacttgggagactaaggcaggagagttgcttgagcctaggggtttgaggctacagtgagctgtggttgcactgctgtactccgagctgggtgacagtgagaccctgtttctgaaaaataataaaagccatatgacatggtttgatgtcatatttaaatatgcataccttgagattataaaaaaawttctcatgttttcttctagtactgttatgatttcagtttttgcatttaaatttttgttccgtcttatatttattttggtgctagctataaataaaagcaaagagtaagtatatccatrtcatgcatatgttcagtaacttagctctgtctcttcaaatctctttgaagtagatctgtaaataaaactcagctcttcagaaacaaatttcttcatgatacttgaactatttagtttgttattattgaggatattctcataaaggcggaggaaaaatacttttcccaagcaaaatccaagttaaatatgtdaaatkaaccaaacactggattgttgraaaatatttagtcatttattcacctcaattaatgtaactttaggatacagattcttctgtgattttattatcttctcaccccatttaggttgcgagttataaggactcagcatcatgtagaagcacttgtggagcatcagaatggcaaggttgtggtttcggcctccactcgtgagtgggctattaaaaagcacctttatagtaccagaaatgtggtggcttgtgagagtataggacgagtgctggcacagagatgcttagaggcgggaatcaacttcatggtctaccaaccaaccccgtgggaggcagcctcagactcggtatttttgttttcatgtayttattgaaaaggtattgtgttaattcttggcattrgataacttacataataataacagtttttacttaccaaatactttccatgtgtcagaccctttggtgagtactcaacagtgttacttcatttaatcctcacatcagtccatagggtagggactagtactctcattctatacagaaataaactgaggcttacttgcccagagtcagtgtatggtggatttcaaacccagggtgactgattctgtagtccatgatgtcagccactgtatttcctgttcatatattgacatcttgtccatataatattttgaaatgctgctgaaccttgacatctctacatttcctttttacttacatcattattaagatcactttctgaaaaacygttgtaggctgggaagttagcaagaacaaatcaatttatttctgtcttttggaaggtgaaagtattttcagcctactygtgctgctgacttaatcttttccttttttwtctgattttcaaaaccagatgaaacgactacaaagtgccatgacagaaggtggtgtggttctacgggaacctcagagaatctatgaataaatggaagcattaattgttttgaacatgtaaatataaatctgtcagccactacagccatcaaaagagagcatctggaagaacagccagcttggaagttttacagcaataatgttgcagtggaatattatttgtagttaaggtcatcctcctcccctttctgtttttttaaatcaagaactacrttctgcccctctcttgggcttcagaagcatctaagaaaagcagtcatcaattataattaactttcaaagggcaagtcagaagttgtttataaattacaaaataaaggcatattatgaactcttattttctggttatatgacattgtctgagctcactgtggcagtggagcacatatgaggttgatgtaaagcacttattactgtgtctagttcatggcgagtgatctcagtgaatgacagttgtttgctgctcggagtgtgggktgttttttaaaataggaaatgtcagtatcaatctaatattatagaacagtcagwatgtgaaaatgaaaggaccaaatgccaacctcacttggactcttggttcccaacagtaagagaaacaaatttgaaagaggaaggaggtggcatcaggagctgaaagcagaggtggaaatggttggggttagtgggcgctcaatttgccatgaagtgaacattttattagataggagatgaaacttgaaatgcatgcaagttaatctaaaatttgagcttgggtagatgggaatcatggcagttctctgaaaggagctgattaaggtgttaatttttggctatttgataaatgtgagaaaaaacctgtaggcagttaaggtggcttctagagcattgttttccagtttttttaatgtataccccaattaaatgtttgtttagaagtgaaatatgttacttctgccaatttgagtattcaatgtgttattttaaatggaacacatctgtatgaagtatgatttgttctgagaggtcttcagaatcaaatggcttaatagtccccttttgcttaattaatgtcccggagaggcatttaaaagtataattgaagatcggatgcagtgcctcacacctctaatcccaccactttaggaggctgaagcaggtggatcacttgaggccaggaattcgagaccagcctggccaatacggtttaaccctatctctactaaaaacaaaaatgagttgggcgtggtggtgcatgcctgtaatcccagctgttcagaggctgaggcgggagaatcgcttgaactcaggaggtggagattgcagagagccgagatggcaccactgcactccagcctgggtgacagagtgagactgtctcaaaaggaaaaaataaaaaagtataacggtaatgttttctccgctaaccttaaagattgatttgagcacctcactttgaggaccatagttccaaaacgctgttcaagtagaagcctagaattcaagggaggacactgtaaggaagaccatggactagttgcactggaaacagtaacaaaagtaaaaattaagctcacatgtatgtgatggtgtaggtagggatttccgcaaggagtgagtgcacgagataatccctggggaccaaggattccttcaatttaatgggcagttcttgaggctttgcaaagtttgattgcaggtgtgaagacagtggtaaggtggacagcagaatgaggaaaaagatgtccaggggcgtgggagagggaatggggacagacatactggcagtgatggagaagttgggaagaggtgatttagaagaccgtgagccgcagcaaaggatctgcttattgcagttgcgtccggtgttgttcctgctccgcttttctgatttcaccctttctggactctgtcttcgtctcctgccacgcctcttaacattctaagtccatgtaaatgacattctcacgttaagggctgcaaagaaattgctgaggagccaggtaaacaggctttgattgcaattgcaatcaaacctctgtagcaaatcgtacaattaaaacacccgcaggcaggtgtgggcgacgccagcagcacacggggaagctgggcacgtggggcggaggcagctgcctggtttccatgtgtgcgccctttaagacccggcggcgcgacggaagcgcgtgggcagcacgtgggcagcacgtgatagcgctgggcgactccgcggagctgcacggccatggacgtgggcgccgacgagttcgaggagagcctccctctgctgcaggagctcgtccaggaggccgacttcgtgggtgaagagcctgggattcgcggctgtgccggacagagccccttgccccgggcgagcttggggagggggtggcgggacggttgccaggccacagggcctcagagagggcctcgggaaggacaggggggcttccttctccagccccggggcggtgggactttgagcagcaagtacactccgagccccacgtcccttgttggccagagccccgtgcgcccaggtgcctggctgctccttgccttggttcctccattttcccttcctgacctcacttggcttgagcgcagaggtgagcgcgggtgccttggccgcctgcagatctacagtgtgaggagtgctggcgatgttctgcacccgaggactgctattttttgccttcctggcaggtctggacatagagttcacgggccttcgttctaacctgtctgggccccagcagatcaggtaaaactaaagctgtgtcccctctgtataagagcctggccagaccagcactgtttctggccagcagcctgttggcatttggggggcaggacgttttgtgtggcttgctcctacgtgttggaggaccttgcttttttctgtccactaaatgatggtagtgctccctagttgttgtaacaaggaaaaaatcctccccggttgcgagtggtggtcctgccgcggaggccatagtgccgggatgggatgtcattgctcgtggaatgagatgcctgtttgttcacagtctttttgatttgccatcggagtggtatctaaagacccgtcagagtgttcagcaatttacagtctgtcagattggtgagtttaatatcagctgttagagtttttcaagaaggtatttttattgtccttggatttcctactgtaaaaacagctctgagatttttcaaggatattgagtatcgttttgtatgcttgttttgtgttgggccattgtatacatatggaaatcaacacttcggagcaaaccaaatttagcagcattgtttccgtgcttaaataagtcagtattaaggaacactcactgttactctttcaagtaaaactgtgtgtgtgcgatttttattttattttttgagacagggtcttgctctgtcaccaagactggagtgcagtagcatagtcttagctcactgcagcctagacttcctgggctcaagtgatactagcacgtcagcctcctgagtaaactgggactacaggctcaccaccacacctagctaatttttaaattttttgttcagatgggttttcgtcatgttgcccaggctggtcttgacttcctgggctcgagcaatctttctgcctctgcctctcaaagtgatggaattataagcgtgagcaaccacacctggcctgtgatttttttttcttaagaaaatttacacacaaaaataatttttttaaggtcatctcagtttcagaaactttttttttttccttgatgggatttggagatctttctgtatcggttcatacagatctatttgttgatttagttattagtttattttctgagatggagtctcgctctgttgcccaggctggagtgcagtagcgcgatgtgggctcaccgcaacctccaccacccaggttcgggtgattctcctgcctcagcctccagagcagctgggattacaggcaattgccaccaggcctggctaatttttgtatttttagtagcgatggggtttcaccatgttggccaggctggtcaagacagagctgttaacggttgcgtaatgctgtttcttttacagctactcaatcctgcttttgtaatgtgaaattagctgtagagaatacatgaacaaatgagcatggctccattccagtaaaatgttattgtatttacagaaacagaccctgggccagattttacttttctgggtttgtctgtgccctctcccgcaccattgggtttttgctgtgttgcccaggctgggctcaaacttttgggctctggagatcctccagtctcagcttctgaagtagctgggagtgctgccacgcccagcccctgcttttactatgaatgatgctgaacgtgtgtgtgttttcctctctatcctgatcctttgctacttttctgttatggttttttttttgttcgtttgtttgtttttaattataagacctctttgagaagtataggaaacagttgtagttatgtttccattgttgtacccaaatttggttggggggaagggggacagagtcttgctctgttgcccaggctggagtgcaggggcacgatcttggctccctgcaacacccttgcctcccaggcccaagcaattctcctgcctcagcctcctgagtagctgggattacaggtgcgcgccaccacacctagctaatttttgtatttttagtagagacagggtttcaccatgttggtcaggctggtctcgaattcctgacctcaagtgatccacctgcctaggtctcccaaagtgttgggattacaggcataagccaccgcacctggcctgaagtcttttttttttttaactttgcatatggttttctttgaggggggaggaatagacattttaaatgagttaaatatataaatcttaatggtttttggtattttctgtggatagttttaaaactatgagaatgtcattttaatatttacttctgtatttgaagaacaggccacaattagattttagcaaattcagtgtgaattacaatttgacatttctcatgcttccagtctgtcttttcttttttgtcattaaagatgttatcctgttgtacagcccacatagtatctgtgggcgcaaagtactgtttgagttgtttttgtctttgtagtgaaattcaggttgcttttccttggcattcattccctctacggtcattcttccaggattgtctgtgttttccgctattgaaggagaggcaaacaagtacgtatcaagagcttctgcaaacataggtgcttcccacctatgttccacagctgccaccttcaaattctgcctcaggtgccccgatcacttttgccctggatcttccgtattctctcctgtgtctgttcctccactcactctgccctctgcggattccagcttgtctttgatgtctctctggaagcagtacctttcccgccagccttgctctgtaccttaagtgctcctttccccatttccattgtctccagtgtgcacctatattaataaaagcgcctgacacagtgtggtgtaatgaaagtgatgtttaaactacctgacacagtaggcagaaaggatgccccaactatcaggatgcctccccaccccccatgagcagttgagggtgccagcctgcacgccctaacctggcatccctgggcagcttgtggaggggctgtctctgtggtatacgctggccctgaaggcaggctctctgcctttttcatttagcacccccagtgccaatcatagctcctgaaacacagcagacactcgggcacactcagattcttcttgcctaaaagaaagagcccaccctgaagccagccctgggagccagagttttttaaatggttgtggctttttctctgtatgtttgttttattataggtatatagcccattcttgtaacttctatctcttccctacaacgtttgggattttggactcagaattctccttccaggcttccagtgttcagtttttgaatcagtatggcttcaactataacaaggtatggcattggaggaggggaacgggaatgtcttttgtttgtttctgagatggagtctcgctctgttgcccaggctggagtgcagtggtgcaatcttcgcctcccgggttcaagtgattttcctgcttcagcctcccaagtagctgggattacaggcacccgccaccatgcccagctaattctttttgtatttttagtagagacggggtttcaccatgttggtcaggctggtcttgaactcctagcctcaggcaatccacctgcctcggcctcccaaagtgctggggttataggcatgagccaccgcacccggcctgggaatgtcttacaagtgatctagacgaactggcttatacagcccgtctcctttcccctttctacctgtcctcgtgaaatcaggcacagaggatccctctgacttgtctccttgttctgtttgttgttctgtttctgtcttaagtttctcaaaaacggaatcccatatatgaatgaagaacaggagaagaaaattagacacgatatcctgactgggaactggagagttcgcaggtatggcctgtttctccaggtgcctttttgtttccttgttgctgttgtctgcatttcccgtgggcgggcgtgccgtttccaggagtgtggtgacctccatccatgcttggcggggatggcttcagctgcctgtgcagctggcgctgctctccctgtgccccaactgagaatggctttcacctgtctccatcatgttccactccctaatgaacctctcactgcgttgagtgtgagtttcagtgtttaaaaagaaaaagaaactgactcctaatt

SEQ ID NO: 5773 - DNA, 19564 bp, Homo sapiens
ggtcagcaagataagcagggccagtctcagggcccggagacgaacacggggacaattgtcaaaggagcgggggagggcaaattcaccagcaggggctaggaatttagaaaatatactgtaattcagacactcagcttctgatctgagtatagggtgaattgatggaggggcatagctagtgagacagagctcgcctcctacaaggaggagaatgttgcaaaccgttttccccttcccaacctgggactatatgatttcttacccccagggattatgatagaaatatgaagccaccaagtctagacttgatggtgttcaagaataaataatactgattgcctccctagtccttgtccagctaactcagctgtttataattgaagggattcaacaaaattatctctagcatcaggtgctagacatggttagaatctcaccatggtttagtgactggtagatagctattaggtaggtagataaataaatgatgctagaggcaacaggtctagggttaaggattaaggcctgggaattggagtctcaccatggctccccttccttgtctggggcctggacacactgaggacaatgcggctatagcagatggccatggcagtcagtggcagcagaaagaggcagcagaaggtgaagaggttataggtggtctcttgccattgagccttgaagctgcctttggtgacacactgagtgaaagggactgggccagctcagtggaccgtgtggaacaggaacagctggagtggagttgaggactattagaactggttcccctcaccacccaacctacccacctatgtcatactgtctcctcccaattcatccttaattccaagtgaagcagcacagtgctgagaaacagttcatccatggtgccatgttaaagaagttggaaatatatcttgaaaatcctatcttccttttaggcttgaatatgatgctgaacagtaagtttgttaaatcttggaacttaaaacaatcctgctttctcaagtactattctaacattgcgctttataagggatgatatttctaccacctcactcatatttttagctgaaatgattttcctggtatgtctgttattttgtggaaaaagaaatattgtgtaaaatgggtgctgccaaaattccaggccattttgcagggactctgaagtgacctttagtagtaatagtcttatgtgcagtaactataatggtaaagaatgttaaataataaaatttaacattttccaaatgctattgggctgcccctccccctttttgttaaattgctgggttttccaactgaatcagtaaaaactatttctgtttagagctacaaggttaaagtgcctgctttccagtaatggagattgagtcactattaatttgataaaaggtaagctcagtaggcatcagattcctagatacaaggcatttgggaaagtgattttagcagacatgagggacatttaggaaagatgaatagtttcagcctaagagaattttgtgaactgtttggagttacgatcaggctactctgagctagttgggaaatggtctttcctcttcccatctcttgcattcatatatttctaagtttttttttttgtttttgtttttgtgctctgcctaagaagtgcttgagaattgtgaggagtataaaaatagtcaaagctggctgggcgcggtggctcacgcctgtaatcccagcactttgggaggctgaggcgggcggatcacgaggttaggagatggagaccatcctggctaacacagtgaaaccctgtctgtactaaagatacaaaaaactagccgggcgtggtggtaggtgcctgtagtcccagctacttgggaactcgggaggctgaggcaggagaatgacctgaacccaggaggcggagcttgcagtgagcagagattgcgccattgcactccagcctgggcgacagagtaagactgtctccaaaaaaaaaaaaaataataatcaaagctcttggatttatagtttggtccacagccttgttttgatctttcctttatcctgttttattgccatttaccacgtactgtagaaacatccctttcaactgctgataacttggaaacaagcctacaaaaataagtaatttctaactactcctaatactacctataactacccctaagcccttaccactctaacgtgacattattaaattttttattttattaacactaatattttaactacaattacagcatatgggcaatacagaatttacctaaaaggatactaatttggaacaaaaaaaatcacctttcgcacatgtatcatgtcacaaccagtttgccattgaaacaaatagaggttgcaaatattgtcagattgtcaggctgtaagaaaggatgaaattcatttcccattgcatcatcttgtggcccatggatttcaagtgccttagccaaaatcatatagctagttagcagtagagccgagactcagaaaaaaacaaagtaaaacaggcagactgaaacaaaaagtcttctaattcccagtccacatgtaaaatttgcttcatataaacaaacctaattgtaaatggcactgtagcaacaggcttctttttaacacttggattggtaaaggtcttgtttgcaacatattagaagtattatttttctctttcccccccaccccacccccaacagagtctggctctgccgcccacgccggagtgcagtggtgcagtcttggctcactgcagcctccacttcccaggttcaagcaattctcgtgcctcagcctcctgagtagttgggattacaggtgctcaccactatacccggctaatttttgtatttttagtagagatggggtttcgtcatgttggccaggttggtcttaaactcctgacctcaagtgatccacccaccttggccttccaaaatgctgggattacaggcttgagccaccaggcctttctttgttcttaggagtatagtcagactaacttctagtagttatatttctaataattgaggatgtaagtaaggatcaaatcttaaatcagtataatgcattgtcattccagagataaatcctagacccttcttggcctccttctgacataattctaatcctacagtctcagagatgctgttgtatcctgccccccaaccccatgatagtgatagtggtttttgccttgaaggaattgctttgtatttagcttttccccctctagatttctagttccttttcagtattggattggatttgagatttgattaacctagtactcaggttcagatgctcgcctctttgcaattttaacactcattcgacaataaagtcagtaaaaaacacaaatttggttatgtcactctctttttactttagtgtctctccactgcactcagaataaagtacaattttattatttgtgatctggcttgctcttcccctctcagttcattactcaccattttctagtcctcagctttagtagcattgagatcctctatcctccatcctccctagcatttctcctattttaattggtctaacacctatctctgaagaatcaaattttaacatctggaaagcttttcctgactgcacggctgtgtcagacacccctatccactccccacccccattgtcttctttagctcctttagcataacacttttgaatacactatattgtaattgcctaatttctttgtttcttgcagtagtctatacatttcttgaaggcaggattttgctgccctgtccttagcaaaatttgagtggcgctggagatgcatattactttttgaatggataaatgaaatgtaccacaaagttttacccaaaccactgacttcactctcttaatagatccccatgtatgtttttcttccctgccccaatctgaaggaggtgagattgggaggatgcaaagaggtagaaaccacgtgtaataaaacagatgtaatggaagaggcacagatagaggatactgtttttacaaggcaggctcttttattattattattattattatactttaagttttagggtacatgtgcacaatgtgcaggttagttacatatgtatacctgtgccgtgctggtgtgctgcacccattaactcgtcatttagcattaggtatatctcctaatgctatccctcccccctccccccaccccccaacagtccccagagtgtgatgttccccttcctgtgtccatgtgttctcattgttcaattcccatctatgagtgagaacatgcggtgtttggttttttgtccttgcaatagtttactgagaatgatgatttccaatttcatccatgtccctacaaaggacatgaactcatcattttttacggctgcatagtattccatggtgtatatgtgccacattttcttaatccagtctatcattattagacatttgggttggttccaagtctttgctgttgtgaatagtgccgcaataaacatgtgtgcatgtgtctttatagcagcatgatttatagtcctttgggtatatacccagtaatgggatggctgggtcaaatggtatttctagttctagatccctgaggaatcgaaaaggcaggctcttaacagatgtaaattaacatacaaataatcttacagaagagagagcagaggtagcagggtgcggtggctcacgcctgtaatctcagcactttgggaggctgagacaggtggatcatgaggtcaagagatggagaccacctggccaacatggtgaaacctcgcctctactaaaaatacaaaaattagccgggcatggtagcgggcgcctgtagcttctcgggaggctgagggaggagaattgcttgaacccgggaggcggaggttgcagtgagccggcaaaaaaaaaaaaaagcaagcagaggcttactccctgagaattaatggctaatggcccccaagcgcaccctttaactcatgctatggacccaaatccctgtcctgcccggtcctgagtcctaggtcactcacctgggggaaggcaagcaggaaactaagtccccaggctgcccccagaagtttccttacacctgaacgggatccaagcgggttgagtactgctgcctggcggtccaatccaatgaccacaggcaggaaagctgcagaatacgtggccattagtttcaggaacatcagtgtccgacatgcgatgtccacagccagccattgaacagtgatattccaggtggcatctaggggcataaccacaaaagtgactagtaagtcggcggctgctaaatggatgaagagtctcctgaccggagaggggcggagctggctgggttcccgccgtgtcactgaccacaggactgccaggttccctccagccgaagaaacaaacagcacaatggtcactcccactcggaccttggctgctgccgagaaggtgggcagctctgagccctccacctccactcctgatccagcccagacctcctcccccgctgctgaccccaaggggtgccgttgcctgcagacatggtggcctggagagaaactgaggaggatgaagtgtgggtatgaagcggttagctttggccactgattcttcgccctccttttcaggatctggagctgattattgcgaatttcgttcactaaagcctctgcttctggagactctccatctgttctggaggaggtcacttgttcaactgtcaaggttctgcagggaacgaagatctggtaccaatcacgctcctttttccttggacagaccagcctgggcttcaggcctctactgacctagacctctttagcccctacagccctggattcagtcggggcctgcgtgcatgtgtatttgtgaggttctgccaggcgcacacctatgccggcggcctccaagacgtggagatcactgcggcgctttctcgccccgccccggcccctgcaggccccgcccttggtcatgaatatttaaagaagaaggtgccgctggaggcgtgctagggagtaggggtcgtctgataaggggaagctgtgacgcagacacgcacagtaatacacagatggaggctcaaaagacacgagtttcgcgtcctgaaattccgcttccagggccaagctttcttttctgatactgtttgtccctcgcgaggcaccgttgggtcgcgcagtaggcgtgactaggggcgggaagtggggcgggagcagggccgcggagcctgggctgcggctgtcatggacgcctgggtccgcttcagtgctcagagccaagcccgggagcggctgtgtaggtgcggcccgaataggaatgggggtggggcgggggagggatggacagaggaagactctagtgaggcgaagtcagtttaggctacaggggggtcaagaagggtcaactccggctacgggggcccgaacggaccgtgaggcgcagatttgagccgctgttgagatgattcctttccgttcgcggaagagatggggaaactgaggcatgagtgggccagcggggaggccgctcagggttgctgtgtccacataagaccgacagtgtcctcactgggcggtgatggaatgaggagcattcgccccacggtggatagccccagactctgcccccagagctgaggaggcactcccagtttccgtgtccccacaccgtgctgccattcgggaactcccctgcctccgccctggcgtttggtctccattcagctagagggccttgaaatctctcagttcacctattctgaggaataaaatgccctccaactgtctgcctccccctcatcgatcacgtacatgctcacgctgatgtgcttgtgatggacccctgcggcctgcactggccccttcaggcctcatcattgtcaaatctctaatttgctcaacattcaatagtgctccccacccctttctagactcttttttctccttatgcctttcccttcctctggcctggagaaatggtgagatatgggcatggaggaggaaggggagtgttctcaaactgggaaagggggaartctgtctgtgccttttggaagatagttttgagcggaaggttagggaggtctccaccttacyttgcctgccctctcctctagggccgcccagtatgcttgctctcttcttggccatgcgctgcagaggcatggagccagtcctgagttacagaaacagattcgacaactggagagccacctgagccttggaagaaagcgtaagtaactctgtctttccttttatcccccaacctttcctccatccccagctcacyttcctttgtccctccttcctgtaccctctctgttcttctttctcatttggctctgcacttaccctctgcatgagtccagttgagataagagagcaggggtatggaagtaattaggyggactggagagaatgggtcaagtttgagaaaactaaactggcacaaaaattaaatttgaaattgaaaaatggactgtttctgctctttattttttatttttttgagacagagtctctcgtccaggtcagagtgcagtggcgcaatcttggctcactgcaacctctgcctcccaggttcaagcaattctcctgtctcagcctcctgagcagctgggactacaggtgcccaccaccatgccgggctaatttttgtatttttagtagagatggggttacaccatgttggccaggctggtctcaaactcgtgacctcaggtgatccacccacctcggcctcccaaaatgttgggattacaggcttgagccaccatgcccagcctgtttctgctctttaaaaaaattgtcattattattgctcaacttttgccctcttgctttctctgtttctgtttcttgttatctgcctctccacttacaaatccttgctttccctttctaatctccacaagttctacgcctgggtaactcagcagatgcccttgagtcagccaaaagagctgttcacctatcagatgttgtcctgagattctgcatcactgttagtcacctcaatcgagccttgtacttcgcctgtgacaatgtcctgtgggctggaaagtctggactggctccccgtgtggatcaggagaagtgggcccagcgttcattcaggtttgatatcctgttctcctttaagatttttttttgtagcctctatattgcatagcttgtcttatatgagggaaagatatcttaggatctttccagagtatataagtcttgatcagtcacttggcttccaatcacttagatcttaaactatcggagaatatcaaatggggagagatggaagacagatgctcttccataatgaatgactaatattgtgcaaggtaagatattatatcactttaattgtgcttctataccacaggttattccccctcactacctgcttactcattcattccaaagatatttattagatgcttactgtggcgcaggggataaagcaaagagctaaacagataatgtgcctgctcccatgaagcttctagtttagtgagggagttagatactacaatgaataacttctcatatatatttgtggaaaagtatgcggtattatgaaagaatatcacaaggggagctaatttagattggaaaatcaggaaaaaactctttgagaaagtaatattttagctcagacctgatgtctgagtaggaggagttagacaaagccaacagtagcagaaaagacatttccaaacagagaaaattgcacattctaagtaaggctttgaactaagaaagacttaagggaattagagaaatagaaagaaagccagtgtgattgacagtattgagtccatcagttcaaatttgagagatagacaggcaccagatctttcatacagggccttttaggcaatgttaatgtttgttttattttatcctacaatgggacattattgaaggattctgagcagggaaatgacatgattcaaattgtgtttaaaggacatctctttttgagatgttgaaaatggattgcaggccgggcgcagtggctcacgcctgtaatcccagcactttgggaggccgaggttggggggatcacgaggtcaggacttcaagaccagcctggccaacgtggcaaaaccccgtctctactaaaattacaaaaattagccaggtgtggtggcgggcacctgtaatcccagctactcgggaggctgaggcaggagactcgcttgaacccgggaggcaaaggttgcagtgagccgagatcgtgctattgcactccagcctaggtgacaagagcaagactccatctcaaaaaaaaaaaaaaaagaaaagaaaagaaaagaaaatggattgcagtgggtcaagagaggaggagatgccctaatacgagcaagagatgacgttggcttggacaaaggaggtagctgacaataaaggtagagagaaatatgatgtgggagtaaaattctctaacatattatctgtattgtttttcgttttcctatgattgtactttttcattatattaaccttgcttttcccttcatctttctcagtgatttacaactttaacatggcttatgatgtatgaggggtgggagcagaggcatggctggagcagtatggaaaagcaactccctaaaggagtctatatgttatatttattcatttcatccaacagatacttactgagctcttactatatggtaggcaccagtgtacatacagggatacagtggttaaagataaacaaggccggccaggtgcggtggctcatgcctgtaatcccagcactttgggaggccaaggcgggcggatcacctgaggtcaggagttttgagaccagcctgaccggcatggagaaaccccgtctctactaaaaatacaaaattagccgggtgtggtggcgcatgcctgtaatcccagctactcgggaggttgaggcaggagaatcgcttgaacccgggaggcagagtttgtggtgagccgagatcgtgccattgtactctagcctgggcaacaacagtgaaataccgtctcaaaaaaaaagaaaagacaaacaaggcctctgctcctctggaacttaccttgtaatgggatgagataaacataaataaacaataaattaaaatatcagatactggtaaatgttatgcaggaaattaaaacagtgttatggagtagagagtaactgactcagtgctttagatttagggataagggaaggcgtctccgaagaggtgatacttaagctcatacctgaagagcaagaaagagctagctatgtgagggttttggagggagaatattccaggtggagggagaatattccaggtagagggaataggtagtgcaaaggtcctaaggcaagaacaagcttgatgggattaaaatgtagaaggaaaccaacatggttggagcataatgattgcaggaaagaatgatacaaggtaaagttagaggggtagggaccagatgttgagtctgtaagcctctctaaggtatttatattttattatgaatgtgacaggaagaaaaccatggagagctgtggtttgtttatttgtttttggttttttttttttttgagatggagtcttgctctgtcgcccaggctggagcgcaatggtgcaatctcagctcactgcaacgtccatctcttgggttcaagtgattctgctgcctcagcctcctgagtagctgggattacaggcacgcgccaccacacccagctaatttttgtatttttagtagagacagggtttcaccacgttggtcaggctagtctccaactcctgacctcatgatccacttgcctccacctcccgaagtgctgggattataggcgtgagccaccacgcctggccaaccatggagagttttaagaagggaagtaatgatgtgatttatgtttatgctagctattatatgaaaatagattgttgggggtgggggcaacaatggccacagtgagaccagttaaaacattaaagcagaagtccagacaagagatgttagtggcttagagtatggcagtgcggtgtgatagagagatgtggttggttgggttcaggatatactttgaaggtagtacaagttattgagtacagaccaccattgtcagattggattacaaataaaaaacatggattttttactgaagaaatttataatttaacacatttggcaattacttaaacctctgggcctctaaaggaatagggattggatttagatcacctttaatatgtttgagtctctgagacatctgaaatttgttctttcaaaacaagtttgccttgttataggtcaagttgagagagagatggagagtgtgtgtgtgtgtgtgtgtgtgtgtgtgtgtgtgtgttgccaagtggaaaatgaaatttgagattgaccttggaagatttcatgatgctcatggagtttaaaccaggatcttaaggtgcacataaacatgtattagttacagaatgttgggaggactttgtttcttcatttttattgggacataattgacaaatagaaattacatatatttaaggagttatagctcgatgtttgtacatgtacgttgtgacatgatcaccacagtcaagctaattaacatatccatcacctcacataattaccttttttcttttatggtaagaacacttaagatctaccttcctggcagatttcaaatatacaatacagtattgttaactatagtcacaatgtagtacattagatctccagaacttactcatcttgcataactgaaacttatacgctttgaccagtatcttcccatttccctcactccccaacccctggcaacccccattctattctgtgcccctatgagttagccttttttttttttttttgagacagagtcttgctttgttgcccaggccggagtgcagtggtgagatctcggctcactgcaacctctgcttcctgggttcaagcaattctcatgcctcagcctcccaagtagctgggattacaggtgctggccaccacaactggccaatttttgtatttttagtagggacggggtttcaccatgttggccaggctggtcttaaactcctgacctcaggtgatccacctgccttggcctcccaaagtgctgggattacaggcatgagccaccacgcccggccttattttagcttccacctataagtgagattatgcagtatttgtctttctgtgtctggcttattttgcttagcatagtgtcctcgatggaggacatttctaataggggtaatagcattcactttacttctgatctaatgtgtaatctctttgctacaggaaaagaaaatgttaaaatgtgatgttggatatgttaagtaggtatacatgcccttactgacccttttgctctgtgtatcaggtactatttgttttccctcatcatgaatttgagccgtgatgcttatgagattcgcctactgatggagcaagagtcttctgcttgtagccggcgactgaaaggttctggaggaggagtcccaggaggaagtgaaactgggggacttgggggaccagggactccaggaggaggtctgccccaactggctctgaaacttcggctgcaagtcctgctcctggctcgagtccttagaggtcatcccccacttctgctagacgtggtcagaaatgcctgtgatctcttcattcctctggacaaactaggcctctggcgctgtggccctgggattgtggggctttgtggcctcgtgtcctccatcctgtctattctcaccctaatctatccctggctacgactcaagccctgaccttccggtacaggataaggaggggacctgaattggtgagatggaatcttagatcgtcccccatgtgccagcctcattcgaattctactctttggttaaagttagaaattcagagatttaggggtggaggaagagctttggggaagatgaggtaaggaaagatgactcgtgaagttaataggatgtctctaatttctagatgtgcctgagcttctgttcttttcctctttctttgtgtctctcttgaatatatttactttgtgtctcttaactctgtttaaggttctgtgtctatgcatctctctctttcttttttcaaccttctcattctcctatccagggatttaatcagcagaattacttkttgataggggaggtataaggtttggcctgtaaggttctaactgccttcttttttctcacagaggtggcttatggcagatttttcctccttcaaactccaaacataatttttaagactatgtgccagtggactcttyccttatatctctgcaccacaagttgttggatgtttcctcttcctcccttatgtctacctcaccaacctcgctcatcatttggcccttatccttccttgtacacctaccttcagatttctgcttacactttgatttcagagctttattcccyagtctgttcttactcctttgtcgcttatccagaatgatgctatgtgtagcatcttgctgtaaatcctgtacaatgattctgtgtaaatagctgtggcctatgccaataatgaagagcaagcctttcaggtaagcaaattaaagttcagtttgctcatcgacatttggtctggtccctcattttttggtaatttgaggcccctattcctgtcactgtggtttgggtttttctcgggattagccactaacatcacccacattatttttcttgagcacctacagtatgtaaagcaacatacttagtgggcatccaaaaatctaagaagctccacactcccaactttaagaagtttataacctagctgaggagttggggtggcagaggagtggtctaatactaaagttattgtcctggctccacaaagcacatctcataccagttcagatataatccctctaagaagcagaatgccatatgacagcataggctaagagccaaggacagaaccaagtggagtggggctggtaaggatttggagctgtgtcttcacaagttgagactcccctgggtgggtagggaaatgataccactgctatcagctctttcattttccatattccaggttgagataaataaggttaggaagtgaatctatcggccaggcgtggtggctcacgccggtaatcccagcactttgggaggccgaggcaggtggatctcttaaggtcaggagttcaagaccagcctggccaacatggtgaaaccctgcctctactaaaaataaaaaattagccaggcatggtggcatgtgcctgtagtcccagctacctgggaggctgaggcatgagaaatgcttgaacgtgggagacagaggttgcagtgagccaagattgtgccactgcactccagcctgggtgacagagtgagactctgccttaaaaaagaaaaaaaaaaatctgaatctatctcctatctcccagctgggtgcagtggctcactttgggaggctgaggtgggaggattccttgagttcaggagttcaagaccagcctgggtaacatagtgaaaccctgtctgtattctcaatataaataatttgtctaaaacttttaaacaaaagtttaagattcttttcttataaaaaagaatccatctcccactcctgttccaaatttgaggaaagcattattgacctggcaacaataaacagtagaaaaaaagaaatagcagaaatgggcaaaaaaatatgttctctggatatagagatgaggcctccagggggcagcaccaaggcagagaaatagactaagatcgctcagtgttttccttggtctggggctccccacagttccccaccatcactcctcccattccttccaactttatttttagctgccattgggagggggcaggatgggagggaaagtgaagaaaacagaaaaggagagggacagaggccagaggacttctcatactggacagaaaccgatcaggcatggaactccccttcgtcactcacctgttcttgcccctggtgttcctgacaggtgagggaagttaacttcttggtttctggtggggatggaagatacatagattgtttggaattgggaccattatagttaaaattctttgggatttaggttaggaagcgaacactggttgtacatttcttgtatgtgtgtctgtgtccttgtgcatttttatgccctcacatatgactgtttgaatattgagactggcaggggctaaagctgcctaggaccttgtgtaagatttgtatctaataattatataatatataattgtataattatatattatatataatatacatataatatataacaattatatattatatataatatacatataatatataacataattatatattatatataatatacatataatatgtaacataattatatattatatataatatacatataatatataacataattatatattatatataatatacatataatatataacataattatatattatatataatatacatataatatataacataattatatattatatagttatatattgtatataataattattattattttttaaagatagggtctcactttgttgtctaggctggagtgcagtggtgcaaccacagctcagtagttgggactactaggtacgcgccaccacgcacagctaatttttttttttgaaacagggtctcactctgtcattcaagctggagtgcagtggcatgatcatggctcactctagcctcaacctcccaggctgaggtgatccttccaccttagcctcccgagtagctgggactataggcgtgtgctaccacgcctggctaatttttttttttttagagacagagttttgctatgttggccaggctggtctttaactcctggactcaagcaatccgcccccgacagccacccaaagtgccgggattataggcatgagccaccatgcttggctgagatttgtatctaaatatataaaatcttcatcctaagccctataggggtaaggagacaaaaaagaaatgtgatgtgaccttccacgtggctagtctgattcctattatcccctccctaacttcttacccttggtggtccctggggcctgaggcataactgactaactatgtggtcagaactctgggtttatctaaccaatgagctgcagtttctggtcatacagccctgccagttttctggatgcaaaactgctcacatactaaacacctttctgaaaatgagcatggtttgggataaagctatagccattggtaatggtgagggggtagcctgagagggggttgcttagaagtacagagcaagacatagttggggaaaggaccatgggaaggacaagaggcctggaatttttccttggcagtgccctgtaatcattgtttcctaaaataccagctctgattttaaaggcattggggtcaaaagggaagattagctagggtcgggcacctttagaatgggctgaaggctgaggaaaccatggaggtaggtaggggaccagttgggagagtagattagttaaaaaggaagcaggttgtgggaaacttcaggatgatgggacccttggaaaggatggatggcaaactatgtgtgtgggcaggcgagtggccccacccagttaattaccactgagatttccaaggctggaatcaaccagggacctagacattggaaaaagacagtgagagtgtgacaatgacactggaagtcaggaagagatagagaaggagagagccagacatgcagtgctccttagcttcctttcattccccctattttggggagaattggaagcaatggttgttctggggatacagaaaggccctctccctcttttgaccctcacagtttgttgaggagagtgtgtggaaggaatgttgtggaaaagagtagccaggcgcggtggctcacgcctgtaatcccagcactttgggaggccgaggcgggcggatcatgaggtcaggagatcgagaccatcctggctaacacggtgaaactccgtctctactaaaaataagaaaaattagccgggcgaggtggcaggcgcctgtagtgccagctacacgggaggctgaggcaggagaatggcgtgaacccaggggggcggagcctgcagtaagccgagatcacgccactgcactccagcctgggcgacagagagactccgtctcaaaaaaaaaaaaaaaaaaaaaaaaaaaaaagtaacttgaccttttcagacatgtctgtgaatgaaatttcaggggtgggaatggaaatacagctgtacatcagcatggcagagggccacagtttaggcatctggacacaaacacaggaagggaatcatctttgcctggagctctgagtacatgacactgagagaggccagaaaagcttatgagtgaaaaagcaggcaggcagactgagattaagacgcttcctcacagcttctctcgggctgtgcctctagccattcactacctcatactaacattatgatcctgaccccacaggtctctgctccccctttaacctggatgaacatcacccacgcctattcccagggccaccagaagctgaatttggatacagtgtcttacaacatgttgggggtggacagcgatggtgaggaagaaaccggagtgccaggggattgggactgcagtagtgctaacaaaggggaggcaagatagatgggactctaaactaatctggtcttttgaaagtggctggggctctaaacttaccacctccatgctctttccctttggcctatgtcaagggtcatgtttgccctgtgcttacttacattcacatcctcttcccaggatgctggtgggcgccccctgggatgggccttcaggcgaccggaggggggacgtttatcgctgccctgtagggggggcccacaatgccccatgtgccaagggccacttaggtgagaagatgcctgacccttctcctcctaacccctgactttgatactctagaagcttcaactccctatacctcagctttttcacccctaaaatccgcatactccctgtccccaatctgataccaatccctgctcattctcctccaaaatcacatgaattcaagcaccccatctatgaccccatgatctcattctcttccacctccttccaaccaggtgactaccaactgggaaattcatctcatcctgctgtgaatatgcacctggggatgtctctgttagagacagatggtgatgggggattcatggtgagctaaggagagggtggtggcagtgtctctgaaggtccataaaagaaaaaagagaagtgtggtaagggaaaatggtctgtgtggaggggtcaaggagttaaaaaccctagaaagcaaaaggtaggtaatgtcagggagtagtcttcatgcctccttcaactgggagcatgttctgagggtgccctcccaagcctgggagtaactatttcccccatccccaggcctgtgcccctctctggtctcgtgcttgtggcagctctgtcttcagttctgggatatgtgcccgtgtggatgcttcattccagcctcagggaagcctggcacccactgcccaacgtgagccagaggaaggctgagtacttggttcccagaaggagatactgggtgggaaaaagatggggcaaagcggtatgatgcctggcaaagggcctgcatggctatcctcattgctacctaatgtgcttgcaaaagctccatgtttcctaacagattcagactcctggccaggtgtggtggcccacacctgtaattctagcactttgggaggccaaggtgggcagatcacttgaggtcaggagttcaagaccagcctggccaacatggtgaaactccatctctactaaaaaaaaaaaatacaaaaattagctgggtgcgctagtgcatgcctgtaatctcatctactcgggaggctaagacaggagactctcacttcaacccaggaggtggaggttgcggtgagccaagattgtgcctctgcactctagcgtgggtgacagagtaagcgagactccatctcaaaaataataataataataattcagactccttatcaggagtccatgatctggcctggcacagtaactcatgcctgtaatcccaacattttgggaggccaacgcaggaggattgcttgaggtctggaggtttgagaccagcctgggcaacatagagagaccccatctctacaaaaataaaaaataaaaaaattagctgggtatggtggtgcatgcctgtggtcccagctactcaggaggccaaggtgggaggatcacttgagcccaggtggtccaggctgcagtgagccatgattatgccactacactccagcctgggcgacagagtgagactctgtctcaaaaacaaacaaaatgggccaggcgtggtggctcacgcctgtaatcccagcactttgggaggccgaggccagtggatcacgaggtcaggagatcgagaccatcctggctaacagagtaaaaccctgtctctgctaaaaacacaaaaaattagccgggtgtcgtggcgggcgcctgtagtcccagctactcgggaggccgaggcaggagaatggcgtgaacccaggaggcagagcttgcagtgagcc

SEQ ID NO: 5774 - DNA, 40394 bp, Homo sapiens
gatcagagtttttaaagatagtttggtgctgggtgtggtggctcacgcttgtaatcccggcactttgggaggctgaggcaggcggatcacctgaggtcaggagttcaagaccagcctggccaacatggcgaaaccccatctgtactaaaaatacaaaaaattagctgggcgtggtggcacttgcctgtaaacccaggtactcgggagattgaggctggagactcacttgaacccaggaggcggaggttgcagtgagctgagattgtgccactgcactccagcctgggcaacagagtgagactccatcacaaacaaacaaacaaacataatttggcaggtaggggctcaggaagcagagtgctgattggtcaaggttggagatggaatcctaggggggtcgaactgaggttttcttgctgttttctactcctagatgggatggcagaactgattggcccagattaccggtctggatggtgtcagctgatccatccagtataggatctacaaaatatctcaaacactgatcttaggttttacaatagtgatgctatccccaaaagcaatttggggcggttcagactcttggagccagaggctgcatgacccctaaaccgtaatttctaatcttgtagctaacttgttagtcctgcaaaggcagactggtccccaggcaagaagggagtcttttcgggaaagcgctattattaattttgtttcagagtcaaactatgaactgaattccttcccaaatgcccagcaatgaacaaggacagcttaaaggttagaagcaagatggagtcggttaggtctgatctctttcactgttataatttcttcagttataatttttgcaaaggcagttgaaactgtgtctttgaaaagacacagcagaaacatctgttacataaacaacagaaatgaggaagaaagtatctgactcagtagcaaaggaaatccacagaaagaatgttctgagaacggaagcaatgatcagaccaggtagggatatgatagaaagaaaattctcatctaattcaaattctggccagtccttttggtgatttccatactaatactaggcactttaaaatgtgagttctggtaacacatggaacctcaaagtagaaatgtctgttgttcatttttaaaagactatttgcagagttttgatgtttatcaatgaaaagagttttttttttaaatttatgaagaatagggaatcctatatgggcatggggcaaataatcaaactgttttaatgcagaaaaaaatgtgcaacagaaagagatagctcatggagggataaagactttattctggaccctctagattctgtggggcctgcagtagcttcaagatgccccagcatgtcctgcgcccacacccctgtcaagatcactgtggtcagggcgtcttgcccatggccagtgtattagtctgcttgggttgccacaacaaaataccacagactgaggttgaaaacatttattttctcacagttttggaggctagaagtcctagatcaaggtgccagcagcgttgcttcctctgaggcagctcttcttggcctgtaggtggcgccttcttgctgtgtcttcacatgggcggcccctcagtctgtgtgtctaggtcctaatcttctcttataaacacaccagtcatactggattagggtccatcattttaccttaacggcctatttaaaggccttatctccaaatacagatgcattttgaaatactaagggttagtacctcaacatctgaattctggggggacacacttcaacccataacatgcaggcagacctcaatgctgcttgcagacccaaggcgaactgcacaacaatcaagcctggctcttaggacaaaaacatctgccagagtcaaccaaactgaattctctgggaaggacgagatgcctggtgtcataaaaagaccatagtcttttttaagtgtgatgcatgcgcacacaggcacgcatacacacacgcgcacacacgcgcacacactgcactgctgccctgtccttggcagacattcctgtggggtcatgttcgaaatatgcacttctgtggagtagcttgggttttcttggaagtctctttttctaaacttgtacctaagctgatggcctgtgcctgcttgggcatgaggggtcggagtggggatgggtcaagactgactcctgttcactgtgaagtagaggaaggcagtgatagccagacagggacgtgtgtttagggaagtcctctgtgttttcagttctgtttttgttttgtttttatgatgggagagatgagcaaatataaaggctgcttctaggagcaggagtgaggagaggttgcctatatgagagaaacgggatggtcaatactgtaggtttttttgagaaggtgaaatatggaattcattttttaaattttttaaatttttttttttttgagacagagtctcgctctgtcacccaggctggagtgcagtgatgtgatctctgctcattgcaacttctgcctcctgtttatataaacaggccaaaccctgtatgtatgtatgtatttatttatttttgagatggagtttcgctcttgttccacttgttgcccaggctggagtgcaatggcacgatcttggctcactgcaacctgcaactcccgggttcaagcgattctcctgcctcagcctcccaagtagctgggattaccagcactcaccaccacagccggctaatttttttgtatttttagtagagacggggtttcaccatgttggccaggctggtctcgaactcttgacctcaggtgatccacctgcctcagcttcccaaagtgctaggattacaggcatgagccactgcacccagccgaaagatggaattcaaagaagtgctggtaagtcactgtggtatttgtgaaaaaataaaaataaagagggtttgggctaggcgcggtggctcatgcctgtaatctcagcactttgggaggccaaggggggtggatcacctgaggttgggagttcgagaccagcctgaccaacatggagaaaccctgtctctactgaaaatacaaaattagccgggtgtggtggcgcatgcctgtaatcccagctactcgggaggctgaggcaggagaatcacttgaaccgagaggtagaggttgcagtgagccaagattgtgccactgcactccagcctgggcaacaagaggaacaagagcaaaactccatcaaataaataaataaataaataaataaaaacagggtttggccttgggcaggatggaccgttttctagaaggacagccgtggtgcgctgcacaactggtatgaagcccagtttccatctgaagtcctcgatgttcatggaaataggggcgagacagtctgaggagtgtgaagaaggcctgaaaatatccttgcagagaacaggagagacaatgactgggacagccaggcagggctgagggcccatttgaatttcccgcagtgccctctgtcctgttgtgtgacccctccagcagtaggtactgggaaagcaggtggctgagttcatccaggactgaggctctgccagacaagaacagtgcagcaaggatgttgaaggtaatggcaaaaaataactggaatgcagagaaatgaaatcaaagctgatgaggagggaagggaagagaggagagggcagatagacttgggtagagaggacagaacaatgacagggcaaactggtgatgttgaggaagagtcacagggagcagctaaacaagccagctgcagggatggcactgtgtggctggagagcagggttctggagttatcggtttttccatgtgtgacatgggcctgggtgggtgaggctgagtgtagaagtcttacatttccagtcttgtcactcctctgatgagtttcagaccaatatatccatctgcctagatgtcatttctccttggattcacatgctccaaaccaaactcctgggctcagacatcaaagccactcaaaaatagctctctgagaaatagaactaccatatgatccagtaatccaacttttgggtatagacccaaaagaattaaaaacagaatattgaacagatatttgcatagctttattcacaacagccaaaggtgggaacaacccacatgcccatcaacagacgaatggataaacaaaatgtgctatatacataaaatggaatctttttcggccttaatgaaggaaggaaatcctgacacatgctacatggatgaaccttgaggatattttgctaagcaaaagaagccagacactaatggacaaatactataaaatccacttatatgagatacttagagtagtcaaatttagggacagaatcagatttgcaagataaaaagtttctggaaacgtatttcacaataatgtgaatatgcctgatactactgaacacctcaaaaagggttaacacggggccgggcgcggtggctcatgcctgtaatctcatcactgtgggaggccaaggtgggcagatcacctgaggttaggagttggagaccagcctggccaacatggtgaaacccggtctctgctaaaaatacacacaaaaaaattagctgggcatggtggcaggtgcctgtaatcccagctacttgggaggctgatgcgggagaatcgcttgaacccgggaggtggaggttgcagtgaaccgagacagggccattgcactccagcctgggcaacaagaacgaaattccgtctcaaaataaaataaaataaacaataaaaataaagggttaacatgggggctgagcacggtcagcgagagaatcacttgaggccaggagtctgagaccagcctgggcaacagagaacgctgtctctacaaagcataataataaaaaaatgagccaggtgtggtggcatgcacccgtggtcccagctacttgtgaggctgagatgggaggttgagactgcagtgagccgtgttcgcatcactgctctccagcctgggcacagagacactctgtctctgaaacaaacaaaaaaagaggggctaacatggtaaatttcatgtttcttatcaagtaaaaaggcttgctgacccacaatctatattaggtttccctgttactagcaaggagtgaaggatgtgctatcccaaaatatgtccaaaaattggtatattattttgagctaaaaacaccggagaaattgtagtttcagaaagggctagatgacctgtcgtttcctacagggaataagcagtaaagattcctctgggagtggcaccctctctgtacccgggtcagaaaatagcccttatcaccagagactgggagttggggctgcaatggacctgaataaatgaacttcccaagtaacacttaccttccactaattttacaccctccccaatatttctcctagtgactctcttagaaatgtatcgccccagccagatgccttttgtgctttcttctcaaatgcatcattctttgtctaaaaagtataaaagcatcttgctgtggccacttcttcagacctcactctcttttgaaggtccccatgaaaaactaataaagtgtgtatgcttttcttttgtttatctgcctcttgtcaattcggtttctggctccagcggaagagcccgcagaagcgctgaggggactggagacggtctctggcgcccctacacctgctcagtgagccttcagccccttctccctgacgaagctcccagaggctggaactctggcgcgggaggcacttgggaaatcctcccgaaagcaaggaggagcctttcctagaccgggagcggtcccacgcgggggtacaggttggggcaggggcgaccgagccgggcacaggaactcgcagcagggtagggttggcggctacgccgccctcggtccgcggggaaccacgcgggcttccgggtcacgccgccgcgttccgaccgccctcggggagaggggaggagcctccagcgccgggcggggcgtggttaaggccggtgggccccaccgcagccagacgctgcccgtttaagcgcagagggccgcgggtcacgtggtgggcggggtgggggcgtggcaccaggaagcggcgtccgcgccgggcccagagccgcagccgcagccgccgctacagtccgggccgggctccaccgcgcatcctgctccactctggcgaccgcccccggggcccccgccgcgggcgcggcgcccgccatgggcgaggaggactactatctggagctgtgcgagcggccggtgcagttcgagaaggcgaaccctgtcaactgcgtcttcttcgatgaggccaacaagcaggtccggcgcgcccgcgcttcctcccccgcgcggccctgccggggtcgtgggcgygccaaggccggtcccgcgcgaccaggcccgagcgtcccctcctgtcctgtcccgtcccgtcccagcgcgggaggcggcgcgcgctccttccttgttgggtgggctcagccgcggccaggtgtcctcgcaggtgacctcggggctggacccccgagccagctgcgcggatgcagtggccccgtggccagtgtctcaattgttggcgcgcccgtcttatctaggcttcttttgttgtgtttgtcattagttacactcgtagtcaagggtttagacgtcgagattttcattttccttgaaattttgtaaagggggaaaagactgtacttcaggcgtatcagcggcgccgatgcgcgaaccggygttagaacttggagcctcgggaacccgacccggtgtcacggtggcatccttttcgctctctgctcttggtttttaaaattcacctgagcagccaaacatctgtaccttgatatgtgccgtgttactttagttgaacccagggtggtgtataacagaaataatcgcttgcgggttggcttctgagtttagatcctttcagagttcaggctgttaaccttgctgcttttccctctcaggtttttgctgttcgatctggtggagctactggcgtggtagttaaaggcccagatgataggaatcccatctcatttaggtaatggtatagacactttcagatcattttgtcatgtaaacagaatgatgtttttctaattcaaatggttttttataattttgtcatttggtctgccctaagaggcctgaagtctgtgtgcgcacatggaattcctgtctgtagggagggtcttcgtggcacttactagcacctcttgtcagagtggaatatctggagcagttgatttgggagccaaatacttcaaaagtggggcagccacttcctagcactggaaattaacaagtcagcgtgatgatgtgcccatttctggtttgttcacagaggagggcgttcatttctttagcccaggtctttccagagtggcaggtggaggagattcattgtttctcatgtaataatacaagaaaatcatggcttccactatacttaaggtgactgcatagtcccagttcgcactgttgaacaggtttaatgatcaacagcagggcctttcactttcagaagtgtctcgatttggatgataagctatctggccacygtaacactggtgcttacagaaggtgaaagtataatgtaggccctcaattcagtagtgacttaaaaaattttactgttggtctgtgttaatgagaaactgtccttttttgagagggagcctccctctgttccccagggtggagtgcagtggtgcgatcttggctgactgcaacctccgcctcccaggttcaagtgattctcctgcttcagcttcccaagtagctgggattagaggcgcccaccaccacgcccggctaattttttttgtatttttagtagagatggggtttcaccgtgttggccaggctggtttcgaactcctgacctcaaaacgatccgcccgcctcagactcccacagtgctaggattacaggcatgagccgctgcacccggcctgagcaaggttttaaagtatggatggggtkcgagcatggtgttttggggaactctgggtctgtgtaactgaaggttacatagggtgtctccacagggaaggggaaatggtggtggtgtggccactggcaggggccagcttgaaccttacatattctcctatgaaattagagctttatcttcttattgaaacttatcaggtggggtgtgggatgatcatgtcagtgtttggcaagatcatgctgttcacagcacggaggctggcttagttgggagcctgtcagagttagggatgctatggagagtagcaatcagcgagccatgtgtggtgaagagcagcgctctggtggtgtagagtggcattgcataggcaatcaagggatacttaggaagatgggtctctcgtaagacccgggggtcggttgggtgtggaaaacgagtgagcccgtgataatctagattgggggctctaagaagtttgtgggtggggggaaggtactgaatttaacttaaaaagagtttttagactgggcrcggtggctcatgcctgtaatcccagcactttgggaggccgaggcgggtggatcacttgagatcaggagttcgagaccagcctggccagcatggtgaaaccctgtctctactaaaaatacaaaaattagccaggtgtggtggcacgtgcctgtaatcccagctactcggaacgctgaggcaggagaatcacgtgaacccgagaggcagaggttgcagtgagccgagatcatgccactgcactgtagcctgggcaacagagcaagactcygtctcaaaaaaaaaaaaaaaaagatttttaaaagcagctttattgaggcatagttgacacataataaactgtacacacttaatattatgcmatatgtgagttttgacatgtatacacccatgaaaccatcaccacaatcaaggcaatgaacatgttcagaccccgaaaagtttccttgggcccttctgtaatccatcccttgagttttttttttttaaatgaatttttaatttaaaaaatgtatgtattggaatagagacrgggtctcactgtgttgctgaggctggtctcgaattcctgtgatcctcctgcttcatcctctcacagtgctgggattacaggtgtaggccgctgtgcccagctgagttcactttttaacatctgtctgaggcggtcatgagacactgtagtggagccatctgggttgcataatgaatgtgctgtgagatgcacaagtagatagttctttccagaagctttgctgtgagagagaaacagcagttacggagaaggctcctgagcgggtctatagttatttatgttggaacaattctcaggtgatatgtgtgtgtgatctgaattcttcaatcacttgttacccataatactgtaagtttcccagcaagttctttccagttggatttggtagtttgaaaagaggtcctactgatggcttccgaaacataattttaattttagactagaatttgctgcctcctgaatatagattgtgtcttttgccttttcaataaatggtagtagctagaattcggttatttaactactaacacaatctttcttcttaaagaatggatgacaaaggagaagtgaagtgcattaagttttccttagaaaataagatattggctgttcagaggacctcaaagactgtggtaagacttatctttaaaatacagcattaaagggcattagaaatacatttggaagagaaggaatcgcaaattttcagtgttaaaggaaacttttattatcttactgttgtgaaaggtatagttatgttgcattgtattagagccttcaaaaacgaaaaagacatttgagtgggttaaaaaaatgaccttagtttgatttttaaattaaattaaaaatttttttttgagccagtcttcctttgttgcccaggctggagtgcagtgatgtgatctcggctcactgcagcctcgatctctcaggctcaagtgattctctcgcctcagtctcccttaaaaattgttaaaaaataatttggaacttcatgtgtcttttgtattgcttgatagcagcatagaatatgtgaggtatttttggctactttgtgaattagccttttcatctctcatttctgagtgctagatctgataggagcagatattccaagttgaagcagcctacaggcactttagccygtgtaaatgttcaccattgccgtttgtagagtagagggaaggctgttagaaacaggcagaatcctctgttagtttcttccatcagttttaagtgttaaagtcttggggaagcctcttagtgcagcaacacatttctctgacatcagctgcttgaggaatgaatttttgaaaggagttactaaactgtaactgaatatttgtattaacttaaaaaaaawtgaatcgtaagcctgctgctgttgagacagatgatccgaattggtctttttatctttcctgtgttttggttgtcttcagttattttctggtcaytttttaagttaatatttatttttcttgtcttgtagtatgccaacgtaggttggcagtatgctgcctaatccaaatttgtgtgtgtctgtgtgtttttcctttcaggatttttgtaattttatccctgataattcccagctggaatacacacaggagtgcaaggtatgaccccaggccctttctcagctgctggtgtcagtggtgttgagctgggttatgtagtggagagcggggcatyggggtcgcagggagcacagacttgaagtcagactgtccctcatgttgattcccaaactggagtcaggcggggtgtttgctttgtgacactgaacagttttctaagtttgaaagcttgttcctttggagggggagggttcaatggatgatgcgtggtgaacacccagtagtgctagcccttggggctgtcgtctgtcttgccctttttctcctcactgggctgacagcacatctgggtctgggccctgggatgcctcacagccacctggagtggaggtttctggtgaggagtttctttttctgtttcctgaagtttcctttcctcaatttgttgtctttgtcttgtccttactctttctttcttctcctaggtgttgattctaatccacattaatgagatttgctgggtgtagtaaactaggctagagggagctgagctaaaattggcagtgtggcaccttgggcgctgacagaagctgctagtggttggggtagggctttctgcatttttgtgactgttttgctcaatggagttcagggcggactctttggtgaggagaggtgcatccccaccactgtcctgcctgccctgcagtggccccgtgtgaagagaccctcagcccggcccttctcaaacctgtctgccctcaagcgagtcgggtgtgtgtctcagggtcctcaacccattttagtcaacactcactaaagacccttaggcctttgtacatttttaataaccatttttataacgtgggtgactaagaatgttggcagtatggtgattcctgcaggtagaagctgctgtctgtgagctctggtcagttacttttctacaaaacacagacttctcctgttctgtttagtagaaggaattaggattcaggttcttgaatgaagagttatgggcaaaaatcagggaacattgtatttaaaagaaaatttgttttgttaattagtaaacattccggggaacgttcattaaagaatgacaaacygcagagtttgtgaagcttttgaagagagttatatgtgttttttcttattaattaaaaatatttttaaaaaatttttcttagactaagaatgccaacattctaggattctgctggactagttcaactgaaattgtcttcataacagatcaaggaatcgaattttaccaggtattatgtttatcatttatgtttgttggttaaagttcagtgatagcattctggcagccttttgaattcagtactgaatatatatatatatattttaaacattttctagagatggagtcttgctctgttgcccaggctgcagtgcagtggcaccatcatggctcactgtaatctcaaactcctgggctcaagcaatcctcctgcctcagtctcctgagtaggtgggactacaggcatgtaccaccatgcctggctaatttttctttttattattttattttattttattttatttttgagacggagtttcgctcttgttgcccaggctggtggagtgcaatggcgcgatctcggctcaccgcaacctccgcctcccaggttcaagcgattctcctgtctcagcctcgtgagtagatgggattacaggcatgcatcaccatgcccgggtaattttgtatttttagtagagacgggatttctccatgttgagactggtctcgaactcccgacctcaggtgatccacccgcctcggcctcccaaagtgctgggattacaggcgtgagccactgcgcccggccctggctaatttttaaacttttttgtagagacgaagtcttgctatgttgcccaggctggtgtcaaactcctaacctcaactcctgccttggccactcagctttagtctcttgctggggattttattctttttttttttttttataattgcaagtaataaattaaaaaaaaaaaaaagaaaagaaaaagggcttggtggcccrtgcctgtaattccagctctttggaaggccaaggtgggtggatggcttgagtccaggagtctgagaccagccaggccaacatgatgaaatcccatctctataaaaaatacaaaatgttagtcaggcatggtggtgtgcgcctgtagtcccagctacttgggaggctgaagtgggaggattgcttgagcctgggaggcaggaggttgcagtgagccaagatcacagcactgcactccagcctggatgacagtgagaccccatctcaaaaaaaaaaacaaaaacacaacaacattaaaaagtgggcaaaggccaggtacagtggctcacacctgtaatcccagcactttgggagaccgaggtgggcagatcacctgaggtcaggagttcgagaccagcatggccaacatgacgaaaccctgtctctattaaaaatacaaaaattagccaggttggtggcaggcacctgtaatcccagctactagggaggctgaggccagggaattgcttgaacctggaaggcggagcttgtagtgagctgagatggtgccactgcactccagcctgggcaacagagcgagactccgtctcaaaaaaaaaaaagtgggcaaaggacatgagcagacactttttaaaagaagacacacatgcgaccaacaaacataaaagagctcaacatcactgatcattagagaaatgcaaatcaaaaccacaatgagaaactatctcacactagtcagcatagccattataaaaaagtcaaagaataacagatactggcaaggttgtggagaaaagggaacccttatgcactattgctgggagtgtaaattagttcaacctttgtggaaaacagtatggcgattcctcagagagctaaaagcagaactactgtttgacctagcagccccattactgggtgtaatatgcagaggaatataaattattctaccataaaggcacatgcacgtgaatgttcattgcagcactgttcacaatggcaaagacatggaatcatcctaaatgcccatcagtgacagattggataaagaaaatgtggtacatatataccatggaatactatgcagccataaaaatgaayaagatcatgtcttttgtgggaacatggatggagctggaggccatcatccttagcaaactaacacaggaacagaaaaccaaataccacatgttctcacttctaagtgggagctaaatgtaagttatgaatgcaaagaaggaaacaacagacacggggggctacttgagcaggggagggtgggaggagggagaggagcagaaaagataactattgggtactggacttaatacctgggtgatgaaataatctgtaccacaaaccccgtgacatgagtttacgtatgtaacaaaccttcacatctatccctgaacctaaaagttaaaacaaaaaacattcaaacattgcaagatatgtaatatggaaagcaaatgttccctataatcccgataaataattattatgaacagtttggtgcatattcctctatttttaaaaataaatacaaacttctttttaacaaaaaggggaatgttgtatataaacttttgcagctagctttttttttttttgtccaaagtgtatcttggacatctttctatattttattctgactgggtagtatyccactgtatggatggactgcagtttaaaaattttcttgttatkggacattggctggttttccatttttttgtgattacaaataacccttcagtaacatgcttgtacacacttctttatattagagggagagttgcagtataggtacgaacatctgaaaagctgaaccagtatcgccaaatttcttctagacatgtgtattttcactagcaatataggaacttctgcttttcatacctttaggaggactggatattatcagtctatagacatttgccaacctgagaggtagaaagacttttttttttttttttttttctgagacagagtctcactccgtcgcccaggctggagtgcaatggtgcgatctcggctcacggcaacctccacctcctgggttcaagcaattctcctgcctcagcctcccaagtagctgggtctacaggcgcccagcaccacgcctggctaatttttgtatttttagaagaggtggggtttcaccatgttggccaggctggtcttgaacccctggcctcaaataatccacctatctcggccccctaaagtgctgggattacaggcgtgagccaccatgcctggccgaaagacattttaatttgcattttacattactagggaagtaagcatcttttcatttgtatattgtccatttgtattttgttaacttcctcttaaaatttttttattttgtaataattattttgagacaggatctctgtcacccaggctggagtacagtggcacaatcacggctcactgcagcctcgacctcctagcctcacgtagtcctcccacctcagcttcctgagtagctggaactacaggtgtgtgccagcacgcccaacttaatttttttttcctttttttttttttgtagagatgaggtcttgctgtgttgcctagactggtcttgaactcctaggttcaagccattcttctgccttggcctcccagagtgctgggatttatgggcatgagccactgtgtgtggtcaaaaatattttttttactgtggtaaaaaaacatacaacatttattatcttaactgtttttaagtgttcagttcagtagtgttaagtatattcattcacattgttatgaaatagctccagaacttttttcatcttgtgaaaccaaaactatccagtaaacaactccccttatcccttccctgcagccccagcaatctctattttactttctgtttctatgaatttgactcctttttttttaagatggagtcttgctctgttgcccaggctggagtgcagtggcgtgatctcagctcactgcaacctctgtctcctgggttcaggcgattctcctgtctcagcttcctgaatagctgggattacaggtgtgcgccaccacgcctggctaatttttgtatttttggtagagatggggtttcaccatgttggccaagctggtcttgaactcctgacttcaggtgatccactcacctcagcctcccaaagtgctgggattacaggcgtgagccactgtgtccggccgaatttgattaccttttatacttcatataagtgaaattatacagtatttgtccctttgtgactggcttatttcatctaccataatttcctacaggttcccccatgccatagcatgtgatagggtttcctttttaagactgataataccgcactgagcgtatacaccacattttgcttatccattcatctgttgagggacatttgggttgcttctgcctcttggccattgtgaatagtgctgctgtcaatacaggtatgcagataccgcttcaagatcccgttttcagttcttttagatttatacccagagtgagattgctggagcagatggtagttctgtttctgaatattttagggaaccgctatactgttttccatagcagttacaccattttgcaatccctccaagtgtacaagggtcccagtttctccatatcctcaccaacacttgctgttttgttttgttttgtttttgatactagccatcttaattgtggttttgatttgcgctctttgttgattagtgatgttgagcacttttgtgtgtgtgttttggccactttgtgtatcatctttggagaaatgactaattcgggtcattgtgcctatttttaaaatcaaattactattatttgttgaattgtagttctttatatattctgatattarcaccttcttagagatacaatttgcaagtattttctccgaatccggaggttgcctttccactctgtggattgtgtcctttgatgtacctgcctgtttcttttcatctgttccagcttcctgacctattaagcatgcttctgagatctctaaggggaactaatttagagggtgttaagagttctttcaggttttaattttgttgacctaatgaaagtcatataatttagaatgtatggttagagaaaatacacctgtgtgttaatgccatggtgctttgctgtaaggccatcatcgaaatcttagtaatgactggctgggcayggtggctcatgcctgtaatcctagcactttgggaggccgaggtgggcgatcatctgaggtcaggagttcgagaccagcctggccgccatggcgaaaccccgtctctattaaactccatctttactaagtgccgtctctactgtctcaaaataaaaatacaaaaattagctgggtgtggtggtgggcgcctataatcccagttacttgggaggctgaggcagaagaatcccttgaacgtgggaggtggaggttgcggtgagccgagattgtgccactgcactccagcctgggcaacaagagtgaaactccgtctcaaaaaaaaaaaaaatttgtaatgaccaataggagaactttaaacaaactttagacaaattccatacacacagaaatagaattttgtacatgtgattgcatgggaaggatggcttgctttctgggggagttccctatggtaatcatttaaaagtctgtctttctgttctctgcagtgggaaagtataccttaaggttacctagatggcttcagatcttcaagaaaaaagttaaaaagaaagaagactctagcacatcctaattattatagttcttaagaagcttacggctcctgcccctgacttgcgcagcagttcttcagtgcagtgtaccatgagcattaatgtcttgggggctctgtacagtgttctgtaatatcggaatatttagggtacattgaaaatgtgcctggattataaagtactgcatttgtatggagtcttatgaacacatctgctagaagaagggagctcctcccaggcccagtgtagactggagtcgaggtggaggccaagcagaaggcagatctgccatggtctgggaggtggccgagttaacacatggggtcctggaggtgtcagtttcttttggccgtttcctggatgaggagaaatttgttgtaaattgctcttaggtgtatccatgtgctccacatgcccaggcatgtggaggcacagataaggattttggagggaaacagcctacccaggctataattgctttgttaaggggcaggttccctaatccactcttggagccttgtttctcatctggctaatagggccagtgatgcctgcctctcagtcgtggcaaagagtaaatgagttaggaggctctgtaaagcaccaagcatagggctggttaagtagtagctgtaataagtacaagtgagaatgttcatttcacttagtgggtttcttctgctttttattctcagagcgcactgtaaggatcttctgacagtttgctgttattgatttatttattaattgagactgaatctcgctctgtcactcacgctggagtgtgatggtgcaatcttgactcactgcaacctctgcctcctgggttcattcaagcaattcttgtgcctcagccttctgagtagctggaattacaggcatgtgccaccacgcctggctaatttttgtatttttagtagagatggggttttaccattttgtccaggctggtctcgaactcctgacctcaggtgatccgcccaccttagcctcccaaagtgctgggattagtttgccgttttttaaatgaagatcctgtttcttaaactctgcttcaggtattaccagagaaacggagtctgaaactcttgaagagccacaatctcaatgtgaattggtacatgtactgccccgagagcgccgtgatcttgctgtctaccacggtcctggagaatgtcctgcagccttttcactttagggtaagaggaagcctcccctgaaaaaaacacctttccccagttgtcccctgttcctgtagcatcctaatgtgtcaggcacgttagggacaggttcctctagccgtaacgtcaccgctctgaccactagagggcactctgtatacccgtcagctcctggagccattcattctatgctgggcagacaggctgtgagaggacatgggggacggtggaaaggatccaaagacgaagtctgtgtttatccttgttggttttacacagggaatgatgaaacattgaaggggtttaataagcttttcctaaaacattttccccctaaacaggctggcactatgtcgaagctgcccaaatttgagattgaattaccagctgcgcctaagtcaactaaacccagcctttccgaaagagacatcgcaatggctaccatgtatgtccgtgtcagagagaattccatcctgtgattgctttcagtaatataaataatagaaggagtgtgttacaagcaccacgtgatgccctgacccctagaacacataaggaggactccccttgttctgggtattcagtgtataggtcctgtgaacatagaaaacctgcagtgtttttggcattcctttttgatttttatcagctttgtgatgctaaggaattcctttacctttctagcctgataaaacaagaacattgaaccaatttatttcttagtatctttgttttagaatttcttcttctttttttttttttttcgagacagagtcttgttctgtcccctaggctggagtgcagtggtgcagtgtcggctcactgcagcctccacctcccaggctcaaacgattcttctgcttcagcctcccaagtagctgggattacaagtgtgcgtcacctcgcccggctagtctttgtatttttggtagagacagggcttcaccatgttggccaggctggtctcgaactcctgacctcaagtgatccacctgccttggcttcccaaagtgctgggattacaggcatgagccactgtgcctggccaagtttattttttttaaaagctcagttaaataataattgttctaaataagaaaatagattaagattttatgtaacagacatggaactaaattacgtatatatagaggtatattttcttttactttttttttttgtttgtttttgtgatggagtcttgctctgttgccaggctggagtacagtggcacgatcttggctcactgcaacctccgcctcccaggttcaagcgattctcctgcctcagcctcccgagtagctgggactacaggtgcgtgccaccatgcccaactaatttttgtatttttagtagagacagggtttcaccatgttggccagggtggtctcggtctcttgacctcttgatctgccctcctcagcctcccaaagtgttgggattacaggcgtgagccaccacgcctggcagtacggaggtatattttcatttgaaaaagtggatatctcagtttttaartttgtaatgaaaattttaaacacacaatagagactaataaaaaagaacccctgtatgcctgtatctgattcgacaatagtcaaaattttgcttctaagttacttctgattcttctgtggcctaaaacagtggcccaaactttcaaactttatggtagttagtataatgttctttcatttcttcttcctttttttttaaacrtactcttctgtggcattcctgtttatttttaaattttttttggagagtgtcgctctgttgcccaggctggagtgcagtgttacaatctcagctcaccacaacctccgccttctaggttcaagtgattttcctgccacagtctcccaagtagctgggactacaggcgcatgccaccacatctggataatttttgtattttctgaagagatggagtttcaccatgttgcccaggctggtcttgaactcctgggctcgggtgatcctcccgcctcatcctcccaaagtgctgggtttataggcatgagccgccgtgcccagccagcattcctgtttagacaatagataaagtgagagcagtcctggctgaagtggaggtggggacctgttccctcccaccttggtctcctccttgtccctgggcaggcccagcacagagtttaccactggactagaatatgcattcaggaactgttcacagcaacatttattagatggcacttaaatagaaaaggctgagcatggtggcacacacctgtaataccagtgactggggaggccaaggcagggggatcgccttgaggccaggagttcaagaccagcccgggcaacatagtgagaccctgtttctacaaaaaaatttaaaaattagccaggcacggtggcacgtgcatgtagtcctagctactggggaggctgaggtgagggaagatcgccaaagcctaggaggtggaggttgcagtgagctgtggttgcaccactgcattccagcctgggtgacagagggagaccctgtctctgaaaaatgaaaaaaaaaaatagtgattatattttcctgttattaaggaatatacattcattatacaaaacttggaaaacagagaagaaaatgaacttagcatatcactcaagtataactattacatgtgtttctttccaatcattttagactctatgcttaggtttggggttttcttttaaaatattatgatcaagctgtgtttagtgtgtgttctcttttccacttaactttataataggctttgagtaactgcatgtttctttgtaaacacttgttggcagcaaaatactccattaagtgaatatcttataatttacttaaccgtgatgccatttagaacaaaggaattttgaatggccagatgtgatttatgtctgtttgttccctaattagatacgggcagctgtatgttctcttcttgaggcatcattctcggacctccaacagcacaggagcggaggtggtcctctatcatctaccacggtagatttcatgctttgttttccctctctctctgattttaaaatgtgaactgyagcttgttgatctgttttttgctttctatcctacagagaaggtgcctgtaaaaagatgcacatattgaagttaaataggacgggaaagtttgccctgaacgtggtggacaacctggtagtcgtgcatcatcaggatacagaggtacaagctgtctgcgtttctaccaaagttaaggttgcttaaaagccttgtgaaaattggtggctgggcacggtggatcacgcctgtaatcccagcactttgggaggccaaggcggacagattgcttgagcccaggagttcgagaccagcctgagcagcatggcaaaaccccacctatataaaaaatacaaaaattagccgggcgtggtagtgcacgcctatagtcccagctacttgtggggctaaggctggaggatggcttgagcccaggaggtcggggcttcagtgagtggagatcgcgccactgcactccagcctgggtgatggagcaagatcctgtctccgaaaaaaaaaaaaaattggcaaaatgtctgaataagactagaaagtgcatttttatgctaagagttttggtcttccagatggaaatgggtttggtagtctyaagtagtttagaaaaaagtgattgtgtcagttgattaaagataattcaaaactatttcagaaactaacgcttgagatttgaccttggaagaaggtgggaatccgctccattccacgagtacttgaactctstgttgcaattgtgagcatggatgacagtgctgggggataatggttttgaggccgtgtggaccaggacaactagaatgggtcctgtgggctgggcctctgatataaagaagctgcttmcctcctctaccctcccagagggtggtgacgctaactctgtgacacgtgaggatgtttccagttgaaatgacagagatctgcttaggtcactttgagtgagctcatcaaaggaagcatgtcataaatgcaggaaatacttgtgagaggagataaaaatattaaaagagagttgtgatgttaatsacaaattccttctcaagtaagagctagcctgtagggwggaaatgcaaacacaggcttttaaactgatttaaacagcaagatgggatggaatgaaagcaactgggcaaaccatgattgattttggcctcagtcttgtctttttcccccccagacatcggtaatattcgatatcaagttacggggagagtttgacggctccgttaccttccaccaccccgtgcttccygctcgatcgatccagccctatcagatccccatcacaggtaacacgggttctgtagaggagtctgtgctgccctttcaccatgtggctgtgttctcaccatgatctttgggagtcacgttaaaagtggagtgaggaataaacagagattcccagatctgtctgattttgccaggggccatttgttccagttttgttgttgttttgagacagtctcactgagtcacccaggctggtaggtagtgtcgtgatcttggctcactacartctccacctcctgggttcaagtgattatcctgcctcagcctcccaagtagtggggattacaggtgtgtgccaccgtgcccagctaatttttatatttttttaaatttatttttttgacagagcctcactttgttgcccaggctggagtgcagtggcatgatctcggctcactgcaacctccacctgtctgtcacaaggttcaagcttgtgaggtattcaagcaattgaaccaagtattcaatcgcttaaatacttgtgagaggagataaggttcaagtgattctcctgcctcagcctcccaagtagctgggattacaggcgtgcaccaccacgcccagctaatttttttgtatttttagtagagatggggtttcaccatgttggccaggctggtcttgaacttctggcctcaagtgatctgcccaccttggcctctcaaagtggtgggattacaggcatgagccaccacgcctggcccaaatttttatatttttggtagagatgggatttcaccatgttggccagactggtcttgaactcctgacctcaggtgatccgcctgcctcgctctcccaaagtgctaggattacaagtgtgagccaccatgcccagcctgttctagttttttaaaaaatgcaactactactgatcctataagctaaaattatgttgtgaaaaaagcattttctaagatagatgaatctcccttgggaggaaatagaataatttatcttccctgagctttagaatggatagttttgattagccgttgatggtgaaatatgttttaatattgaatacacccgtaacgttttctgtttgccttagctctgtaaygctgaaattaactttggctgtaggtttgttactgtaacctgggatcacttttctctttctcacattccgtgtgacagtgatgatgaatattgcattctttgggactgacagtcamagtaagtgcttcggctgtggctcttaggcttacccaaatcagtcctccttctgtctggagaggtggggttgggaagtcagaagagtggaggtcaggaattcaggaaaagggaaagaagtcatttatttgcttcgttttgcctttttccagtgtaattgattttaagatagaactgaaagaatattcaacacacactctctctcttttttttttttccttaaacagaactttattttctcacagttctggaggctagaagttcaagatcaagatgtctgcaggtttgctttcttctgaggcctccctcctggcaggcctctttgcagatggccaccttctcactgtgttctcacagggtctttcttctgtgcctgtccctcgcagcagtctctcccggctctcttttgaaggagattggagtgcagaattggctagtctgaggtttcagtgtgcaagacgtagtcagatggctcacatttggaaccctrgtagtaatgttttattctttgtccgatggcattgggcgggttgacccagcctgcagtcaggatttccttgtaccgttcacccgggagttcagaatcgcactctggctgaaagttcagcaagagcaccattgtcagcctgactgccctgtcttgctggaccagccaaaagcttagttactttctggcacagttggaggaaggagctggttcttaacagacgttcaattaggtcttttkgctttctgtgttctttcaagcttcttccttttcctttgtaaataatgttagtattgaaagaatagattttgccaagtgattgtcttgtgtctgctgcccacttggcatgaaggtaactgctggtgaattgggggaaaaaaactaaacatttagaacaagcctgtccaacccacggtctgtgggccacatgtggcccaggacagctttgaatgcagcccaacacaaattcttaaactttcttaaaacattatgagatttttttaatgatattttttaagctcatcagctattgttagtgttagtgtattttatgygtggcccaagaccattcttcttcttcctcttaaggcccagggaagccaaaacattggacacccctggcttagaaccttcagctctgttccggtggtacaggaccagttaggaggcatcaggttctaaccatctggtcataagggaacagatgcgaggcctggtcacagtaacagcccgtgcagagatcaataggaggaaatcaggaatccactgagggtctggggatctaggtagtgtgggctgcaaagcattttcagaggttagtgactctccttttgtttcctgctgggctgtgagccctggcggcttgatgcatccgtgtgtcttgcccactgtgctgccactgggtgggcgtgctcaggaattgaatgggcctgttgagaaagatataaccagcacttttgggaagagtcagccaccctttttctttttgttttgggcctgttagaacagtgggtctcaatctgactacatattaggatcatctggggggccttaaaaatgaaagctctcacctgacagtgtgtaggtcagccacccaaaggtgagggctrtgcactcggcgcagaccttgacacttaggtccaaagcgcgagtgctcttcgccaaagcttgtctgcctgggctctttcctacctttgggtggtctgttcacaatgaccctttctctgaccagctgattgaaacctgccttctgattgtacctgggtaattggaacagaaccaggagtcatggttagcttgtagggctgcctgcatggctcatgagcagtataactggttgttaacggtccctgtcatgtgaggttttgggggtctgcttcccagacgagctcactgtgcttggacctactctatgcaatggataatcgaactaattatttagataattaagtggctgggcacagtggctcatgcctgtaatcgcagcatgttgggaggctgaggtgggcagatcacttaagcccaggagttggagaccagcctaggtaacatagaccttgtcttcacaaaaaaaaaaaaaaaaaaaaaaaaaaagaaaaaaagttagggcatggtcacatgcctgtagtcctagctactctgaaggctgaggcaggaggaccacttgagccaaggagttcgtggttatagtgggctatgatcaactactgcactcaagcctggacagcagagcaacaccctctcttaaagaaaaaaaaagataattaagctacaagccacatttatttgaaacattctccgtggatgatctgggtatttgattttgaatccttcaagtaaatttctcagttccttaacgtgcatatgtaaacgatcatgagtcatctttggttattaaaaataacccaaaccacagtgattgaagccttgacatgctttctttttcttggtgagattttcctggattgtyagctccttcccccttcctccccgtacgtgctttcagtgagacggaacagttcatttcttccktgactacaattgaataaacatttcgtaatgacattaaaaagtattgacttttgtgtcataagtaccagcatttgcagcattttctgactgcatcgttgcacttatgttttctcaatttgtaggtcctgctgccgtgaccagccagtctcctgttccatgtaaactctgtatcctttactraggtgtggcaccgtgcacaacagggcaagtggtcaccctcagagagtggtcctgaagtcctcctccgggcagctgtgaataamactccgagagccaccccgcaggcagcttccctgactgtccaggggcctygcgtttagcgtggactcagtacatggtgggcaggggcgagtgctagcggaaactgggtttgctttttgtttycatcttttcctggtttagaatttcctataacatgtggattcttcatcttggattgtctttcaacctgacatcattatcagcgcaagccaaggtaggtcagcggggacagttgtcgtgttacaacatggtgcttgttgactttggatcccagttgtagccagggacgttttcaaggtgaatctcttagaaatgacccctcctttcaagcgtgggaatgggatttttttttttcactttatamgttttttactatatgtgcattttatcaagaacatatactacttttaataattaaagcaacaactaagaatgccattctcctgcttaagcccattctggaaaagccagactccaccccagggtggatggaaagccggactccaccccagggtgtctccctcatttctcccatcraccttcccaccggtgtccgtgcccttttctgttctgcatgagcccgggaggtgtgctcctctttctggccttgctgaggaagcctcctcagtctgttaattgtctcttcctgggtaatytctttattagagaaatcttttttttttttttttttttttttgagacggagttttgctcgttgcccaggctggagtgcaatggcgtgatcttggctcactgcaacctccgcctcccgggttcaagcgattctcctgcctcagcctcctgaatagctgggattacaggcatgtgccaccacgcccagctaattttgtatttttagtagagacgaggtttttccatgttggtcaggctggtctcaaactcccaacctcaggtgatccgcctgcctcggcctcccaaagtgctgggattacaggcatgagccactgtgcccggcctaaagaaatcttatttttttaaggcagggtcttgctccgtcacccagcctggagtgcagtagtgctatctcagcttactgcagccttgagctcctgggctcaggcgatcctcctgcttcagcctcccaagtagctgggcctacaggcgcacatcaccacgcccagttaatttattataataataataataattattttgagacggaatctcgctttgtcaccaggctggagtgcartggtgccatctcggctcactgcaacctccaactcctgggtttaagcgattctcctgcctcagcctccccagtagctgggattacaggcatgcgccaccacacccagctaatttttgtatttttagtagatacggggtttcaccatgttggccaggatggtctcgatctcctgacctcgtgatctgcccacctcagcctcccaaagtgctgggattacaggtgtgagccaccacagccggcctataattttttttttgtagagacagggtcttgccatgttgcccctgtgtctctaatacctcgccaggctggttattagagaatctcctatgttactctttaatcctctgtgtattttcctgcctttcctctggaattcctaagaactcttgaggagagaattagccctgatgctgtaggcatccactgtatgtaatgcattgttgtgccttgtctgtaacccatagcctcatgtgacatccactgtatgtatgtaatgaagtcatttctctcctgtgcatctcgctggtgttttcctgtacagctgctctgtacctgccttgggccaactgaaaagggggtcacccagatgattttttatgtggcacttcattctcctgtggcatcccaattgggaaaggccacaccagatgctggcagtgtgggtgatcagtacatttatgggtcgatgaatggatgagttatgatgttccattgagagcctctggagttaccttttaaactaatgagctgttgtaggagaaaccaaagcacaggactgaagttgatgccacgtgttgacatctttttctattttaaacgttaaaagaggggctaggtctagggaagtccccgtttggaatgaaggactaggagctacacctttgatgtgcccctgaatgcagaggttacttggaaaagagtcagccaggtgtgcggtggttgggctgtcatcctcctgtggtagacacgctcctgaattgctcctgaatggctcagctctgctttggttaggaaggaaaagctacactgactgtactttgcggctttttatcaccacctgccacccgccccgcagatgtttaggggaaccacttttgggcttttgttacggtttgcatcatactgttttatttgctgcctcttaaaatccaggttacctctggaacctccaagtgaaacttgagcccatagtaaatctcttaccagacaaaggaagactcatggactttctcctccagagaaaggaatgcaagatggtcatcctgtctgtctgttcacagagtaagttgaatccttcccccttgctctgattccagtgtgaggcctgtgctgcccaacactttttatcgggatgtgggctacattgttgtgtcttgtctgtgacccacagcctcattctttatgtgaggggtggctatgtgaccccctaggaaaggctgctaaatggaaagatgatttgtagagatactggtagaaaagaacaataaatgggatggttctgaatgaaagtgggcacacaggaggggagtgggccaccacccctggccttcacacacacctctttcaaaatccaagccactcactgcatatgtgtcttctttaagaatcccctactgaggccaggcatggtggctcatgcttataatcccagcactctgggaggctgaagcaggaggattgcctgagcctaggagttcgagaccagcctggacgacaacatggcaaaaccctgtctctmcaaaaaaaaaaaaaaaaaaaaaaaaaattagctgagtttggtggtatacacctgtggccccagctactccagaggctgccgagggaggattccttgagcccgggaggacgaggctgcagcgagccgtttgtgtcagtgtacctccagcctgggcgacagagcaagaccctgtatccaaaaaaaaataataataataatcccctaccaatatgtgctgttggtgtttgtttttgttttggtatagatggggtcttgccttgttgcccaggctggtctcaaactcccagcgttaagtgatccttctgcctcggcctacccaaagtgctgggattataggcatgtgccactgagcctggcctgctatagcttttttttttttttttttttttaaccgtaaccagaaaggggttgcgaatgacatctagctgtcaggtctttaaagtattgtatttcttaragtgtcctttaaaggtacttttgcattggtaaccttttgagattagtttttatcatagcaacgtgtggaaattctgaagctgacatgaagttggtttgatccgtgtgtgaacattgtgcctttccagtgttaagtgagtcagacagagcatcgctgcccgtgatagccactgtttttgataaactcaaccatgagtataaaaagtacctggatgccgascagagttatgcgatggtgagttacatggagtatgacaaagggtcctcctcccccaccccctcccgggtattttctaagtaattatgatgcaaaattgtttcctatatattagaataaggtcgctgagatttgccgcctgccatagggcaaggtggcagtagtggkggatagtggaggagtagtaaattcagggtccctgcatcccackagctggcggctgcatctcacttcataccttcactgtttttgtttttcccatctgtgtttgatcttgcctgtagatccttggtctactgttatagatgagaaaaatcagtctctgctttgcaatattttgtatatttttctgttatgccagagtgaggacttagaaaattaaattagaaatatttatatttgccacacctttcttcccttttgggaaagaatcctgttgagatagtgacgattcagtgttagcacttagcaggcgtgtttgtagtcaaggtaataaccatggcttatcgccaccaattcccgctgtattacttgtacatcatatcttctgaagccagaagaaaagtttaggacaaggagaatgaattatttcaattccaggatctgattagtcctaggctgaaaatggttttaaaccaacaaaagccccagaactccactcccctttagctgttcatggaagggtaagaggtctgagacaggcactgaagagggccagttgctgggacagtgtccattcctacgctgccagacgtgagggatggcyragtccttttggactctattgctgtgggtgttctgggctgtgggaatcagtaggtctgatcccaaatggcagtttctgtgccgtcccacacggtctgctgggctccataaaccgtcatgactcagcagtgtgggccactgaccagccacatgagcagcatctggagtttcttggaaatgcaagttctcaggctacaccccacagctattgcataatctgcacggatctgaactgcttttttttttttgagacggagttttgttcttattgcccaggctggagtgcaatggtgagatcttggctcaccgcaacctctgcctcctgggttcaagggattctcctgcctcagcctcctgagtagctgggattacaggcatgcgcacaggaaaaagttgtatctaagtagagaaagtgttttccgctcatatcctgggtccacatcgaagaattcagtccttgtggatgaactgtaaacagcacccttcctctaagatgcygaagatcatagtttgtggtttttttctttcaggcrgtggaagcagggcagarccgaagcagcccgctcctcaagaggccggtgcggacccaggcggtgctggaccagtcagatgtgtacacccatgtcctgtcagccttygtggaaaagaaggtgggcygcagctttccgcctcttctggactgagaatgctcaaaacaaggaagttgctgaaaacgaggagacttcatgtgattagagtcacttgaagtgattagaatcactggagtttccttgggtgaggccctagagctggtagtttggcttctaatgctgaggcctaaagcataattgttgacgggtggttctggagcgatktgtgcaaaaccagtgaaagatgaacactgggccattttaagatggaaacaaggtgggggttggatagrgagttatatgcagcctcttttgcacctcgttggtatttgtaagaccacatttttttctccctaggagatgcctcataaatttgtgatagccgtgctgatggaatacattcgttctcttaaccagtttcagattgcagtacaggtaccttcaaatcatctgggcccaagttaaaacagaaggaatttaaaaaaaaaacacagtcactgtcttagaagatgactcatatgctaagacaggtctgcctccctgactcagaatgctgagtgactcctgacattattagttggaatgggaagtgtaaggtcaagttggggtctttacctgcatgacgaaaccacttcttgtaatgacagacttttactgtgttggttagaatagccagtccttggggagcctctagtctgttgtagctgaatgatttggaagtgttctttcactttttacttttgtcctcagcattayctacatgaacttgttatcaaaacccttgtccagcacaacctcttttatatgctgcatcagttcctgcagtaccacgtcctcagcgactccaaacctttggtatgcattgccagatttttacttccattgtggttaaaaatggaaaattttaaccgttatctttccaactgaagtgggtctaaaaatgtctttcaggcttgtctgctgttatccctagagagtttctatcctcctgctcatcagctatctctggacatgctgaaggtaactctgatgtgtgaggttttagactatggaaactaactctgttcctgttgtttgcactgacctggacttctctcccttactgctagcgactttcaacagcaaatgatgaaatagtagaagttctcctttccaaacaccaagtgttagctgccttaaggtttatccggggcattggtggccatgacaacatttctgcacgaaaatttttagatgctgcaaagcagactgaagacaacatgcttttctatacaatattccgcttttttgaacagcgaaaccagcgtttgcgagggagccccaatttcacaccaggtgagaatgcaatgaaaagacttggggtaaccatagcctcaaagagtagcagagggcactggcagctggtgggcgaggaccctgggttagcatttttgtaaacaacacaatttgataacagcccacctagcccttggcccattatttgtagtagagtgaattcagtatactgacagaatctgaattatgctctggaactcaccgaggaggtgtgttttgagtcaagacacatttaggacccagatcaggcacagcccatctcttatagcagatcttggaatatctcttaaagccaggaataagacggcaaatggtggctaagggttttaaagggtctggggcttattaaggtttcagttttatgaagtatacattggttgatcattctcattttttttttgagacagagtctcgctccgttgcccaggctggagtgcagtggtgtgatctcggttcactgcaacctccgctgggttcaagcgattcttctgcctcagcctcctgagtagttgggactacaggtgcgtgccaccacacccggctgatttttgtatttttagtagagatggggttttactatattgtccaggctggtctcaaactcctgacctcatgatccgcctgcctcagcctcccaaagtgctgggattacaggtttgagccaccgcacctggccctggttgatcattctcatctccaaatagttatacaacctaagacatcatctttaggatagggaaggatcagggctgtctaatgaaacttctaggtctatttctagctcaatgtaagacggcatttagttaccataaggacaggttagatagaatctcttccatttagcttttgtatttgtctctcaaagcagatagggtaaccccaaaacttaggaaaacaatgtattttattaaagaaaaataagttaaaacccagtagacacacctacgagatgctttctttgtccctcatttcatgccacatctaactggcaattaaatctcttcctttctaggggaacactgtgaagaacatgttgcttttttcaaacagatttttggagaccaagctctaatgaggcctacaacattctgaaatcacttgctgtttttttatataaaaatgtgtacaaagttaatttattgcattaataaagctctttaaactataaaatgttataaagtgtatctacaacctcaactgtcactaaaaatatggtatagaacttgtgggatggcttactcctaaaaggagagacagacagtgcattgattggcctttacagagtgtcagtgagcggatcacattcacagccatctagtgtcacctcctgcttgccaaagaatgaggtttctttcctgaagaggctgggagaagtttagtgtcctgtggttgcctccagatctagtaatactgcttcccaagtcaactgtgcattcctgagttcacaggcgctacgttcaaagctgctgccaaacaaccgatggttggcaccatccggtgttcaacttggccttgccgatgcagcacccgtccagtggtaaaccgaccgacccttagacacagttcagtcaggatgccctgcgagagggctagaaatttagaagccgttcgcgctctgttcctttgtatcgctcttcagtggcacaacttttggctttatttactgatggccctatgagagagagagactttttcttatttctgcaggagaaagggagctagttggctgggcatagtggctcacgcctgtaatcccactttggaagactgaggcaggagaattgcttgagaccagcctggacaacagagtgagaccacatctctctccctctcttttggagatgggctctttgctttcttcctcaggctgcagtgcagtggtatgaacacgactcactgcatcctaagcccacccttctgggctcaagcaagcttcctgcctcagcctaacaagtaggtgggactgcagacgcacaccacttcacctggctaattttatttttgtagagatggaggcctcactatgttgcctaggctggtctcaaacgattctcctgtctcagccttccaaagtgctcatctcttttttttttttttttttcttaaaaggaactagtatattagattgtaatagaactactttctatcccccggagatgataaaaagcccctcattttcttaatcttctacttcagtgcttcaatttagtgacaaagctataaatgaagcaaatcagtattgttctttcaaccgtgggtcatttttgtgcaaggtgaagtggccatagaagtaaaaggatcaaggacagtctcgagatgaagaaaggcagcaagcactttgctaagaaacgggaaatccatgagggacataaaaagctgttctgcagcactgctggtgtgagagctggctgccagatggactccttcatctcagtggcagggaggagctgccctgcctgctgacactcagatccattcaaggactggctccaggcctttgtgaagcagacagatcaggcctccagaaaaaacatcgacaacttcctaataaagtagtctgcaccatcatgaatcccctggatgggttttttcttttagaagaaatttttttactcagtatcatttatcattatcaaatgaccattagtatgagttcaaatacttgaaaagaatgcctcaggatagaattccctttcagtaatgtccttctattgtgccacccttttaagatgagaactcttacctatgtaactgagtaagacagggagaaatattaatccgtgagtggctcccagtaagaccatggccaaatacatcctgaagtagaatatctggaaaatttgagatttggcaaaagccaacaccacaatccctccaaattttgtaagtgtgattccactgaacacctaaaagaagagatactgtgttagaaaccacttttaccaacctgtaattgaacaaaaacacttccttacaaggatttctcccaggttcaagtgattctcctgccccagcctcctgagtagctgggattaaacaggtgcacgccaccatgcctggctaatttttgtgtttttagtagagatggggtttcaccatgttggccatggtctcgaacccctggccgcaagtggtccgccagccttggcctcccaaagtgctggggttataggcatgagccaccgtggccagcccttatggggatttcttaatattcaaggttcaaagcaatgggaactgaacccaggtagcatcatctactacctaacactatttgctgccttatgatcctgggggagaggtatgaccaagttaaaagctgtgtattctgcacagacactgcatcgtgtctcccaattgattatctttctttatattctcaggtgaaaacttaaatatttaaaagtgttacgaaacaaagttttagtttttactctttaccaggtattttctacagtggtaaagagataggctaagccagggtgtagagttgaaccaagacgactctccaggcaccaaccgcacatcacacgctgggttctggcccgggctcccctgcattttaaatgggaaagactgccagctgtctcatgtttaacttgtctgttattttcctgcttcagcacactgccacctaaaaaggagccgtaccaacaggtacagttccacagaacgtccgttctgtccacgatgtggcagctaattcatgaattgcctgaaagcttgcaatccttagaagctgctttgtaagtacaggatccagactcttcagtcactgaggaggattactttgtggtgcgactctgccggcgtggccctgctcagggtactcacggagctgcccatgtgggcaagtgcctcttccgcgcgctccacgcggctgcctttcatgctcaccgtgaacgctctggttatgtggctgcagaactccacggagatgccacagctctgaaataaagcacttcctttaggatggctctcttcctgttgaagaccctaggcagccaccccgttctgaggatgggtgctaattacccagggcaccctgggtgctagaggaggccaagcatcccattggacttacaaggcctccatcacaccaatcttactgtaccaggaactttttggggccctctctacacacagccaaaagcctggttttctgtggcacgtttgtgttgaccaggagaaattgctggaacccgttaaggtcaccccacccgcaccgagctggcgcattgtcacaacttcttttcttggacctcagtgctcccctatctgaagcagggctcatatctgagagtacggatacactgttctattttccatgaataccttctcgagtgctctcatctttaatgattaaaagtacctgataaccacataggaggcaaaaggcactggtcggagagctcctggggcggggtgcaattttctaagtaaaaagtgaacatcctgctgtcatcaggctacaggcttgtgcaatctctaaagaataacaaattacaggcagactagcccagaactaggccaggaaatcacatttccatggtcagaggcaccatcaggtatactagtatagccgcaaggaatgggacaagagaaaaaattgaacagaaattgcctgtaatgtgcctatgctcccagatgtccaactcaatgctcgctccctctatgccctgtcccaccaccatccagcactcctccagcactcatcctgcctctccatgtgtgccaagagcaagcgccagacttggtatcttactccatctttagggtttacatggaatctaagacagccaattcccccaagtgaaacaggagctagggacaaactgagactgtatgaggactcaccatcaccaggttgaccaaggatacagcgttcagactgatgccccagagccacataactccaaacatgttgaccaagaccatggcgatggtggcacacatgatgactgcagaccagagctcacagcccaggaggaccatggtcaccagaaatatcgcgcccagggacacaccgaggttgaagatagtgtcgtcaatgatggtcaggtactgttcgtagaagacataaaacacactggaggggagaggggaggcctcattaaagctcgctctcactcccgaacactgcgtgttcatcctgtcaccactgccaagtggtcagactcctttgggaaacatcccttgcagaaaaccttgctggctgtctacaagactcaccgaaagcaactcacttgacctctcatggccactgaccacccagagaagggcccagcagtgatgcaaaatgtatatttttgataaagtttctgtttataagcccaatctatgctattttatagacatttacagagagcattccacagcattctgaaaaaacacaaaaaaacaaagaatcctgatctatcctgagacactacctcaggctcagcggggtccgtgcaaggcctgaggaaaacatgctttcatttattttctgccagagctaaccggctcttaacttcttccaaacaaatccaggccttcctgctttaagcgagatcatggggaggcaggaaaaataaatcacttgtttctcctacctttctacagtttctaaattcagtagttcatacataatacttttcttcctgggaaaaaaaacccctaacaatataaaaagtctacatacaggcagcatcccaaataaccagcagttagggattctggttcattgttggccaagaatgtgggccgggccctgctctgagccgcctgctctccaagcgccccctgccttaagccattttccagtgtgtgtctcttgcagctgtgcagtggcgcagagatcaagttttgcgtctctagccctcaggccttcacagagactttagattctgaactcctttgcccagcacccatttcctttgatatactgccctgtgctcagaatggagcaggggccagaacccaacctgaaaatcagcatcttgccaagggaaccctccccactcccacccagtgtaggccctttgctgggtaaaccccattgaaaaagggcaggctttacctgtaaggaaatactcggtaggcactgccgttaatgcccatggtttcggtgacattactggctataagtcgggctttcttcagagcgtcaataaagtcagcagaggtctgcagcacggtgtggtaggtcatgaagtacgtggctccgaccctggtgccatggccaaggaggatgttaactgcagaactataggcagcatgtcccctgaggaaagaatcctgggtgtcaagagagtccaggtcttgcaaaatatcagcagaatctgagcacttgaggctaagcaaaatcacctgaccctggactcagaggtcagacccagctgtacatttcagggatgaagaaggcccccagataagggaacaccaaaggtttagcttgttctctcccagactggcttctttttttttttattttgagacagagtcttgctctgtagcccaggctggagtgcagtggcgtgatctcggctcactgcaacctccacctcccgggttcaagcaattctccctgcctcagcctcccgaatagctgggattacaggcacctgccaccacgctcaactaacttttgtatttttttagtagagacagggttttgccatgttggcctggctagtcttgaactcctgaggtgatctcaggtgatccgcccacctcggcctccaaaagtactgggattacaggtgtgagccacttcgcctggccagatgggcttttctcgattgctctgggttctttggtacatagctgctgtttctccacctggtttcatgtataatcaaaggtacagggtttactcagtcctgttgtgtaataggaagcaggaaagggcaagggccctgggaacaacctcagccctgccacttactggtcatgtaaccccgagcaaaatgaccacctctgagccccagtctcctcttctgtaaatgggtataccaccacctactcataggctgcgtgatgagaaatggaataatgtcagggagtgcctggcatgacgctggcaccctggaggctccccaggaacggtggctactgccttcagaaaaactgaatctacttcaacttattttacgtaggccaaagcatccagtcagtgagtaaatcaagctgcaagattca

SEQ ID NO: 5775 - DNA, 59942 bp, Homo sapiens
ctacccactgagtctcagcccagatgactgcaggggcgttcaacacctatatggccagccctggcccactgtcacctccaggaccccagccctgggcccccaggctgggatagacaccaatgagattgcaccgctggaggtgaggccctgcctgccagtccccctactcctctgctggccactgtgactgcagcatatgccctcagcatgtgtccctctctcccaccccagccagacgccccgccagatgcctgtgaggcctcctttgacgcggtctccaccatccgaggcgagctctttttcttcaaagcgggctttgtgtggcgcctccgtgggggccagctgcagcccggctacccagcattggcctctcgccactggcagggactgcccagccctgtggacgctgccttcgaggatgcccagggccacatttggttcttccaaggtgagtgggggttggggatctgctcgagagacttcccagagccaggaatgttatggccaagggcaggaacagacagatggatccttagggacacagtggatagggagagctgccccaaagcctgggggccgagggagagagagtgtggtttgttcctcaggcacaggtaggaggttctcggaggtggctcttgagataggagcagcgtggaagggattgcacggtggggcctcgtgttggtgcgttcaaccctcagccaccccatggggcggggttctagagatgaggcctctggggccccgaggcagtgaagtgactcactgtgagtgcagctgggaagaggcagggcagggaattgatccaggtctatcatcctagagctgggatttccatcctcaactggcagagatgagagcctggagcattgcagatgccagggacttcacaaatgaaggcacagcatgggaaacctgcgtgggttccagggcagtccagcctgcaggggcccagggagtggtcagtaggcatttgtcacagccaaatgccagtggaaggagcagccgcccaggcagccctctactgatgagagtaacctcacccgtgcactagtttacagagcattcactgccccagcttatcccaggcctcccgcttccctctgcgggtggggtgctgagcaggcattattggcctgcatgttttactgatgaggaaactgaggctgggagagtctgtggtaggggtcaagcaggtccacagtggcggggcatggcagtggtggctgggcaggtccttgcagccttccctctccggcaggtgctcagtactgggtgtacgacggtgaaaagccagtcctgggccccgcacccctcaccgagctgggcctggtgaggttcccggtccatgctgccttggtctggggtcccgagaagaacaagatctacttcttccgaggcagggactactggcgtttccaccccagcacccggcgtgtagacagtcccgtgccccgcagggccactgactggagaggggtgccctctgagatcgacgctgccttccaggatgctgatggtgcgttgggggtgaggcagctggtgggaggtgggcacagcagccgcttctcccacctggtggtggctgggctcccacatgcctgccacaggaagtctggctcttcatcacaggtcctttgtccagagccatctgccctcctctcggtggccggctagtgctacattccatgttgcagatgaggaaactgagggtcagagaagtgcaaggtcttaccctggtttttcagccacagccagtagaacaataaactgctgtacactgagggccaacaatgctctaagctccttactggtctcatccagttctcagaacagccctctgatgtgacacctgttgtgaacccagtttccagaggagcaaacagaggctcaggcaatgaggcccctaacctggactaccctggtggtccctgctcctaaccactgacccacccagcctcccacaaccacagggggctagagccagtccagtgctccctcccctgctaggctcctcttctgtgctctttctcccacatcaggacccactgggagagctatcctagggtagcctccagctccaggactccagggtgcccgtcaatagcctggctaatttaatagatgcaggagagagtgatgtggagggtggtgggggcaacgggacttgctttcctgagaggtgggactcaggcctctgaggctctgggtacctgtcaggctgggtattagcccagcccagattccggggcaggcagaagggctccctagagggaagagaggttctgaaaggccggccctggatcctgcaggactcgaggaactcagcagtggccaagggcttcccactcagccctcccttagtgcccatccctgggcacagcctgacaggcaggagtagggcccagtgtccactcgcccaggcttgaccaccttctcttctcaggctatgcctacttcctgcgcggccgcctctactggaagtttgaccctgtgaaggtgaaggctctggaaggcttcccccgtctcgtgggtcctgacttctttggctgtgccgagcctgccaacactttcctctgaccatggcttggatgccctcaggggtgctgacccctgccaggccacgaatatcaggctagagacccatggccatctttgtggctgtgggcaccaggcatgggactgagcccatgtctcctcagggggatggggtggggtacaaccaccatgacaactgccgggagggccacgcaggtcgtggtcacctgccagcgactgtctcagactgggcagggaggctttggcatgacttaagaggaagggcagtcttgggcccgctatgcaggtcctggcaaacctggctgccctgtctccatccctgtccctcagggtagcaccatggcaggactgggggaactggagtgtccttgctgtatccctgttgtgaggttccttccaggggctggcactgaagcaagggtgctggggccccatggccttcagccctggctgagcaactgggctgtagggcagggccacttcctgaggtcaggtcttggtaggtgcctgcatctgtctgccttctggctgacaatcctggaaatctgttctccagaatccaggccaaaaagttcacagtcaaatggggaggggtattcttcatgcaggagaccccaggccctggaggctgcaacatacctcaatcctgtcccaggccggatcctcctgaagcccttttcgcagcactgctatcctccaaagccattgtaaatgtgtgtacagtgtgtataaaccttcttcttcttttttttttttaaactgaggattgtcattaaacacagttgttttctacctgcctgcttggtctccttttgtgaatgttcagccaggatggggaggcctggccactgtccagccctatcctgggagccagggtcgaagtccaccacccccaagcctctggcccttggggctgggcacagtgctcagggctccttctgctccatttctacatcacattttgctacagtggcttcttaactggctccccactttcctacttgtcccctctgttcatcctccagagtggtggtttatctgctcatgccacagcccagcctgccatacatagctgtggtttctgcatccgtaggctcaactaacctcgggtagaaaaaacaatgtttaaaaaaaggatgcggccgggcgcagtggctcgtgcctgtaatcccagttctttgggaggccgaggtgtgtggatcacctgaggtcagaagtttgagaccagtctggccaacatggtgaaaacccatctctactaaatatacaaaaattagttgggtgtggtggctcatgcctgtaatcccagctacttgggaggctgaggcaggagaatcacttgaacgtggaggcagaggttacagtgagctgagatagtgccattgcactccagcctgggtgacaagagcaaaattccgtctaaaaaaataataaagtaaataaataggctgggtgcagtggctcatgcctgtaatcccagcactttgggaggctgaggccagcagatcacgaggtcgggagatcgagaccatcctggctaacaccatgaaaccccgtctctactaaaaatacaaaaaattagccaggcgtggtggcgggcgcctgtagtcccagctactcggaaggctgaggcaggagaatggcgtgaacccaggaggcggtgcttgcagtgagccaagatcatgccactgcactccagcctggacgacagagcaagactctgtctcaataaaataagtaaataaataaataaataaataaataaataaataagggatggttacctccgtactgaacatgtacggacttttttccctatcattgttccctaaacaatagtataacaactatttatataacatttgcattgtattaggtagtataaggaatctagagatgatttaaggtatacaggaaagtgtgtgtaggttatatgcaagtatgacaccattttatataatggacttgagcatctgtggactttattatctgcagggggtcctggaaccaattcccatggatactgagggatgactgtactttggtttcccaccactgtgaggatacagaacaaagcaacttcagtcactgcccttcccaactctccagtgtctccttgccctaccttccagccccatgtgtgtcttcgtaatagcatagttgcattttttttttttttaagagaggcagggtctccctttgttgcccaggctgcagtgcagtggtgcaatcagctcactataaccttgaactcctgggctcaagggatcttcccctctccacttcccaagtagctggggctacaggtgcacaccgccatgccacacccagcttatttattttagaatttttgtagagacagggtcttgctgtcttgtccagtctggtctcaaactcctggcttcaagtgatcctccctgccttggcctcctaaagagttgggattacaaggccgggcgcagtggctcacacctgtaatcccagcactttgggaggccgaggggggcggatcacgaggtcaggagatcgagaccatcctggctaacatggtgaaaccctgtctctactaaaaatacaaaaaattagctgggcgtggtggcgggtgcctgtagtcccagctacttgggaggctgaggcaggagactccagcctcaaaaaaaaaaaaaaagagttaggattacaggcatgagccgctgagcccagccacagctgcaatttcattagattgaacggtgtgaaatcatcagtagtgggccactgttttactccctgcattattcaatcatgattgctttcagactttcattagtttcactagcttcgcgctgtaagagccaagaggcagagccacagggctgggctgcctggtttcactccccactgcagggctcggttaagcagagtgtaggctaagagaggaatggagaaggtggaaggtgtctctcccttccaacgctcatctgatgcaccagccaaaccaaataccacctgggcctttgaacattgccaagcctcatccgctgttgtcattttgcccacctccacagctgcagggacagccgtaggcccggaactgggatatctcttcctaggggcctgcctatctgctcagctgcactgcgttttaggggtggggaagctaaggcacgagattggggtcccaaagcatgcccagaccacccaggcttccagatactaggtcctcctccttcaggcctcacttcgttgcttttcccctgggctcagttccagtcctggctgtaagactgggaaagccactgcttgagtcaggacctcagtggctatttttgtccgtgagaagtcctctacaccacgacttgggaggcagcctgggagaaagagaaattagtcgtggctcctttaaggggtccgcggaggcgcgcccggccttttgtttgagcggcggcgcgcgcgtcagcgtcaacgccagcgcctgcgcactgagggcggcctggtcgtcgtctgcggcggcggcggcggctgaggagcccggctgaggcgccagtacccggyccggtccgcatttcgccttccggcttcggtttccctcggcccagcacgccccggccccgccccagccctcctgatccctcgcagcccggctccggccgcccgcctctgccgccgcaatgatgatgatggcgctgagcaagaccttcgggcagaagcccgtgaagttccagctggaggacgacggcgagttctacatgatcggctccgaggtagcccggggcgcgttctcgccctccccgggctcggccccgcgggagccccggggcgggcccatgcgccgagagcgcgcgtctccattcatcggggcgggcgggcgcgcgcgcgcgctcggggctgtggggcgtggcctagtgggcgtgtcgggtgtggcccccgccccctcatcgacctgggatttccttacttatttcgccgaggtccgccgccttcagtgctgccaagattttggcgccgcgaggggccccagtggttccgcgctgggttggtttccagtcagacgcaaagaaacgggatattgagttagcccctgcgacgcttgggggactgcactgctgcctttgaccctttttagatgtcgtaaatttcacgtgcacccctccccgtattgctacttgtgggaacctcaaatggcaggctggaaaccctggacttagtgagggctcatccccattgtgtttgttgcctcttaggtgagcagtggaggtcttttgacctttgtttaccggtgaagaaacagattggaggaagatgtttgcttttgggtgaataagggccccatgcctaagctagatctttcagcagttctgaagcgattgacactttccatatctgtgaactgattctgaattattacaggggaaagagcctaaggatgtttaacccttaactagagtggctgcattttgttgcatcaactggatgactgacttcaggaaaactctactggcctttgaatgggtgtttgttccaagtctattaggttcttgttttttgttttttatagagacagggtctggctatgttgcgcaggcaggtctccaactcctgggctcaagcagtctgcccgtctgggtctcccaaagtgctaggattacaggcatgagccaccacacccggccatatattaggtttttacagattgtctcaaactagccttttttgctccaaaggcagtccccagctagtatatgttacctttttaaaaaaattatggatatacagttcagatgtacaaatgtcaagcagtagaatctcatgtaaggaagtaagtgccaatcctggagaattaaagctatcatgaaatgccaagagtttcttctccttatagcagtttttagtatcatattccagcattttattcgtactttattttcttttatttttgaaaaaagatctcactttgtgcagtggtgtgatctcggctcactgcagccttgacctcctgggctcaagcgatcctcctgcctcagcctcccaagtacctgggactacaggtgtgcaccaccgtgcccgactaatttttgtattttttgtagagacagggttttgccatgttgcccaggctggtcttgaactcctgggctcaagtgatccttgcacctcagcctctcaaagtgctggaatgacaggtgtgagctactgcactcacactcagcgcattcatactttttaaacttgtgggttttatccttcacaattgagcatagcatgaatgaatgaagcctcaagatggtcacactgagtcccatggatgagactaaggtcaatagcatcagaactttagtgttagcattttccaccattttttttttctggacgaggtttgactctatcacccaggctggagtgtagtggtgtaatctcggctcactgcaacctccgcctcccaggctcaagccgtcctcccacctcagtctcccaagtagctgggactacacgcacacaccaccacacccggctaatttttatatttttagtaaagatggggttttaccatattgtccaggctggtcttaaacttgtgagctcaagtgatctgcccgcctcggcctcccaaagtgctcgattataggcgtgagccactgtgcctggcctccactaatttttataaaacaaaaaatataggattcaataaaattttcacgttgtcacttaaattacaactgttcaaagatgccagtgctggggaggtagagccagtgcctgtccatctgccacagttcagaatggtcctcattggccagtaggcacctgcctaactgcagaatgcaaaaggtgtcaaatttcagcctgtgatactaggcgagttgtttacctgatctaatgggtgtaaaagtaatcagtttggctctaagtaggtgacacttcaaaagaaagctttcatttattagttggagcaaattgagaagctgtgcgtggccaagtgggaagaaccttgggaggcctggttccagccctgctctgccttgctgtcgtgtttctcatgtgtataatgtgatgcttagactagatggtctccaagatcttccccaaaacacattttagtttctagaaagctaattacagtcttgtctttcagccccttgactcctgggcctcccagtaagaataatcttcctgagacccaggctgtaagagactcagttggagaggcagtttgttcttttgggcctgacttaatcatcagaccttcggagtttagggaagagttcaaggtcagagctctattgaaattcagtagctccagtgatagtagtggatggacggtctcagcccactgccctgtggaaaacaggcactgtattcagagaggtgggccagccatagcaacatacccagtgcctccatgcgccatctgtggagctgtcttgggaaggcatctgcatttactaagagtgtgtgtcactgttctgccattaacagacagctgtatttaccaagccggagtcatggagctttgaggaccctaacagatccccaagtccagcaccttgattttatattcaggaaacctgggtcccaagagggtgaaggctggttcagaggaaagccaggaaggcaagcccagtttcctaagttctgaaggggctttggggggcatctaggagactcagagccctgcagggcctgcarggtagtcataggggggagtattgtcaatttcttttaaaaaacctaatggaaactctacatttaccatgatactggatgatactgacacacaagccaaataacatagaggggtctgtgccctctatgtggaaagcgagtgacttgctgtgtctgctcttctctcagcgttcagtagccctggttgttgattacagtcactgctgaaaatggagaaacattttatttaatactatgcctgggtctcacacctataatcctagcactttgggaggcccaggcaggagaatcacttgaacccaggagtttaagaccagcctgggcaacatagtgagactcttgtctctacagatttttatttttattttttttaattaggccgggtatgtggctcacacccgtaatcccagcactttgggaggccgaggtgggcagatcgcttgagcccaggagtttgagaccagcctgggcaacatggtgaaactccgtctctacaaaaaatacaaaaattagccggttgtggtggcaagcaactatagtcccagctactcaggaggctgaggcaggaggatcgcttgagccgaggagttcgaggctgcagtgagctatgatcgatcgcaccactgcaatcgagcctgggtgacagagcgagaccctgtctcaaaaataataataaaaattaaaaataaatttaaaaatgcaaaatatatactatgttgcatagataaaatgggaaacataatagaagtggtccttcatgggggtgaagttcagagttgctgagcatttggcagatgagtaaagggtacccagaaaatgggaagtgatcccaggttacagatggagccagcacctggcacccagtctattggccatcccctgcaatgtgactccgaagtgatcatacttgaaaagtcaacgagacaatagggtaccctcataaaaactttaggtctagatttattttccttaaggaagtcacactttcagtatttgstacaagcaaactgaagccattgtttgagtcagtgatgatttatatagcagtctggtgattgccttgtaaaccttttggaaaattcctttggtatccctggtttgggttttgttactaaacaaagyaacacaggccatgggggaaattatctggcatctgtctaaaattaaaagacctttttggtgtttattacattgtaaaratatcaaagtcttgtccttaagataaaagaaggtcaaggaggccttgcatttctggaaagtgccagagatccttagtccaaaatcaaaatcaccacgaacttcttgctaagctctgggggcctcccactcaggcatctgcccaggcctttcggaacttggttctgttgtcaggatgcacatatgcaggccagatgtgcactgctggtgaacccttcatatcagcagaatgtgttttaatgctgccgaaagcgtggcgcctgggggccacctcaaggcctgtttgtctgttgcttgatgcagtctgcgccaggaccctccccttccctgtggtgctgcgacccttataatgagccttcttgctttactcataggtgggaaactacctccgtatgttccgaggttctctgtacaagagatacccctcactctrgaggcgactagccactgtggaagagaggaagaaaatagttgcatcgtcacatggtaaaaaaacaaaacctaacactaagggtgcgtcttcacgagggtttgtaaacctgtttcaaaaccactcgcttatgtcatgaagataaaacgttttcactccagagtgtcttcactgcagccttggccttagtcgggcagggagcatcccggggtgggccgccctgtgagcactccaggcaaggaagtggctccagggagccattggtggtccactgtcagttatttccagcagggccattgggtacgtgagcgggccggggccaggacactagcaggtgctgtgaagacatgttggtctcaaaacgttttaggaatgctgcgatgctctgccatctgccgtgggtgtgtcgccataatcatcttccatgcagcccaagtggcgggtggtggtcccagctcccactcccctctggggctttcactgcttgcttcctggagcacatccatcccatagcacttcatcctggcagccagtgtgctagagcccatgtgcatgtccctgctcctggtggcctgcgtgtgcctggggcttgctaggtacactagtgaaactagtgggctttgggtcacggcagctctgtgcagggtgaaagggtgctcttcagacactctgggggctctgtgggagacactcccwtggagacatttgggtgtggacacagcatgtccttgggcaggtggcaaaactgcttcccacgtgrcaatggcgccttgtagagagctgccctgggcctgggtgtgtctgtgagcatgtgcgcgatgcttcgtagtctgccctgtttgtttgtgtctgtaggtgctgctgtggttttgtccactgcgggaaagtagtggttcttttaatgcaggagccggagcttctttttgatctgctgctatgacatttccactcacttgcttaaaacagtttcctttttgttccccctcctcccctagcagagcatcagtcgctaacacagtgagtccccagctttgcttccccctccgcaagtccctgggctaagtcttgggagataccttccccataagcgattgatttctccaggagaagccagactgggcccacagacaggtagctcttgacggagattccccggaagagctaggggtcgagctgcctagaatctgtcctgcttcccaggcagcacgtgtggaccggctcggggatagaaattcgtgtttggtgtgaagcagctctttccaactctctgggctcttgttttaaaagaaaagtattcttcatcttccattccatctccccaccttgcatcgtgttgtggattgtggtggtgtcagacctcttcccactggggtgttactctgggagctttcttttcccctgagtgaggaccaagagaatatgttctggagtcgagtgtccccgctggtcgtgctgtattgtagttgctggtgctgccctgagcacttccctctgccccgagccagtgctcctggggcagattagtccaaatcagtcccattggaggctctacccagcaggacttgtaagtaaagcactcagtccagattgcccttttggaagaggccagcattcagcagtagtaagtttgacaccttgcttttcccacctcccgcatgcgaggaccttgatgtgctgcatccacttggctggctgctgtgtgccaccgccaccagcagagtgacccagtgatgtttgtctgttacagatcacggatacacgactctagccaccagtgtgaccctgttaaaagcctcggaagtggaagagattctggatggcaacgatgagaagtacaaggctgtgtccatcagcacagagccccccacctacctcaggtaatgcgttcctggccagggcatctctggggacacctgtggggtcttttctgagactcaagaactggttgggttgaagttaaattgaaacacttttttttttttttttttgagatggaatcttgttcttgtcgcccaggctggagtgcagtggcacgatcttggctcactgcaacctctgcctcccaggttcaagcgattctcctgcctcaacctcccaagtagctgggattacaggtgcctgccactatacctggctagtttttttttctttgagacagagtttcactcttgttgcccaggatggagtgcaatggcgtgatctcagctcactgcaacctctgcctactgggttcaagtgattctcctgcctcagcctcccagatagctgggattacaggcatgcgccaccacgcccagctaattttgtatttttggtagagacgagtctctccatgttggtcaggctggtctcgaaaccccacctcaggtgatccgcccgccttggcatcccagagtgctgggattacaggcgtgagccaccgcgcccggtcctgatttttgtattgaaacactttttaacagttccctctgtttttatacattttcttagccaggtttctaagtttcttctatatcattggaatttctaagaaacgtaagccaagtcctggattccggagaacagttacaaatgcttggaaagtgggactcgtggggcacagtggcttatgtttgtaatcccagcgctttgggaggccgaggcattgcttgaggccaggagtttaagaccagcctggggcaacacagcaagacctcatttcttaaaaaaacatgtaagtgggaccaatttgtcagaaaaatcagtggctcacataaactcacaaaagaaacaacaatagatttgaatgtataaaaacttagaacctggctgggcacggtggctcacacctgtaatcccagcagtttgggaggccgaggtgggcagatcacctgaggtcaggagttagagagcagcctcatccacatggagaaaccccatctctactaaaaatacaaaattagccaggtgtggtggcacatgcctgtaatcccagctactcgggagcctgaggcaggagaattgcttgaacccgggaggtggagattgcagtgagctgaggttgcacctttgcactccagactgggcaacaagagtgaaactccacctcaaaaaaaacaaaaacaaaacaaaacttagaacctttagaagagtatttatagtaacaattaaaaaaccaagtaattgggaagttacgatgttgtatctagaatctatacatctagatttatacaacaaacttggataccccaacaaataggtaaaagatggtccataccttgaagtacaagggagtaaacaaacatggaaagaatttgccctcatgtgtaatttcaaaaattccaagcataagactgggcatggtagcttatgcctgtaatctcagcactttgggaagtcaaggcaggaggatcgcttgagcccacgatttgactgtgttgcccaggagaccagcctgagcaacatagtgagacgttatctctactgaaagttaaaaaaattagctgagtgtggtgatcacaccactgtcctctagcctaggtaacagaacgacactctttgtctcttaaaaaaaataaaaaacaggccgggcacggtggctcacgcctgtaatcccagcactttgggaggccgaggcgggcggatcacctgaggtcaggagttcgagaccagcctgaccaacatggtgaagcctcatctctgctaaacgtacaaagttagcctcgcatggtggtgcatgcctgtaatcccagctactcaggaaggctgaggcaggagaatcacttggacccgggaggcggaggttgcggtgagccgaggttgcgccattgctctccagcctgggcaacgagagtgaaactccatctcaaaataataaaataaaataaaaaataaataaataaaaaataaaaataaaaattccaagcataaaacaaaaaactggcaacataaggaattggggaaggtgtgatagaactgcactcatgtgtgctggaggtgctttttttttttttttttgagatggagttttcactcttgttgcccaggctggagtacggtggcatgatgtcggctcactgcaacctccgcctcctgggttcaagcgattctcttgcctcagcctctggagtagctgggattactggaatgcaccactatgcctggctaatttttttgtatttttattagagacggggtttcaccattgtgcccaggctggtctcgaactcctgacctcaggtaatcctcccgcctcggcctcccaaagtggtgggattacaggtgtgagccactgtgcccagccgggagtgccctttctgtaaagtatcctgacatcaaacttttttgttctctggcccattaataccrcccctgggaatttgtcccaaagaaacattttcaaagaacaaaatgaatcagtaaacccactatatgtacagagattctctgtagcattgtgaataatactggagaatatggagtcgcttaagtatccagcctttaaggaaaggctaggttagtgacgggtcagccacttgaatggacaaaggtgtgacccatacatggtataattaagtagattctgcagtgacccgagacgggtcctgtgggtgagacgtgcagaatacaagattgtacccatctaccttgtgcattcagctctcaacaaagtatgcatttctctgcacaaagcccaaggagcattaagaaaaaggattattgttcagagtgatgtggttatggaaaatcttttttatgattcccctgaaaggtggcacgcctccaggctggccagtgttacagacgtgtgctttgcagattctttttcccccaagggatgtggtaagaacataaggatggcttgrccttcccagggaagttgcagaaggaaattgtgtacatatggagggcactttaattctgcacatgtcagctgggaatcttttatggggcgataaaacagtttcttggtgatcatgtcgtgaggaacagctgcaggagtggaatcccgttgccctggaggtcaagtctttaggggtgggggctggcagaggtttgagggaagtggctttggctggctccacactactcagtcagcccaataaggggacttatggcaccctccccatcctgtcatcggacaatttgagcagaggctgggtgccctctctcagggatgctgggattgcaatggaaggaaggttgtttttctttttttttttttttttgagacggagtctcgctgtcgcccaggctggagtgcagtggcgcaatctcggctcactgcaggctccgccccctggggttcacgccattctcctgcctcagcctcccgagtagctgggactacaggcgcccgccacctygcccggctaattttttgtatttttagtagagacggggtttcaccgtgttagccaggatggtcttgatctcctgacctcgtgatccgcccgcctcggcctcccaaagtgctgggattacaggcgtgagccaccgggcccggcctgtttttttttattattattattttttttgagacggagtttcgctctgtcgcccaggctggagtgcagtggcgccatcttggctcactgcaagctccgcctcccaggttcacaccattctcctgcctcagcctcccgagtagctggaactacaggtgtctgtcaccacgcccgtctaattttttttgtatttttagtagagatggagttttattgtgttagccaggatggtctcgatttcctgaccttgtgatccgcccacctcggcctcccaaagtgctgggattacagacatgagccactgcgcctggcctttttttttttttttttttttttttttttgagatcgagtttcgctctgtcacccaggctggagtgaagtggcaggatctcagctcactgcaacctccccttcccgggttcaagtcattctccttcctcagcctcccaagtagctgggattataggcaccaggcaccacacctagctaatttttcgtagttttagtagagacggggtttcaccatgttggccaggctggtctcgaactcctgacctcaggtgatccgtccgcctcggcctcccaaagtgtcggggttacaggtgtgaaccaccacacctggccagaaggttgaattttatggcttagatttgcagattctgtgtatggctgagcatgttactcacattcactgtgtctagtgacacttgcattgtccacttgagttgatagctagacctggaaatgagaacttgctactgagatagggcaggatgagggggcaggggctcagcccaggctctaacgtatccagtcagaaaagaggaggtggtcaagatctgtggtttgcaaatacaggctcagctrcctggaaatcacccgtggaagctgcaaagaacacatcttcttgggcccttcctcagaggtgggaagtcactccacctgggtggggctcaggaatgtgcttcttaaaattttgcattctgggtttgggtgttgtagctcacacctgtactctcagcactttgggaggccaaggtgggaggattgcttgagcccaggagtttgagaccagcctgggcaacatagtgagaccccaccatctctataaaaataaaaaaatttaaaaattgcactctgagcggccaggattaggaactatgacccagataggttgtagaggggacccctgtcttgctgtcccctctcatagtctctgcccaagctgattccatgttccccaaattgggtactacaaaatcctccctacccctaccagcgatcaaggggtagtcccagcctcagcatcagacgtgtaagtgattcccactttagaagggaaaagagttaaagggcccagagtccaggcaggtcttggccattgcttctgccctcccccaccctctggaaaggagaaggacctttgtgctgtcttcccgggtccctccttagagggaactgtcaaacgtttgtcggccgggcgcggtgactgacgcttgtaatcccagcactttgggaggccgaggcgggcggatcacaaggtcaggagatcgagaccatcctggctaacagggtgaaaccccgtctctactaaaaatcaaaaaacttagccgggcgtggtggtgggcgcctgtagtcccagctactcgggaggctgaggcaggagaatggcgtgaacccgggaggcagaccttgcattgagcccagatggcgccactgtactccagcccaggcgacagagcgagactccatctcaaaaaaaaaaaaaaaaaaagtttgtcatgacttgctctgaatggttgaatagttattgtggaagtggttgcgcaggtgttggggttacacagggaagtgacacacagtcgctgcctgctcctgctcacagccttgccagggaaaatggaaaagcacagagcacaacgggcacccaaatgctctcatctgtttcacccagccctggagccttagtttaaaacagcttttggtatttttttttttttttcgagataggatgttgctctctcgcccaggctggagtgcagtggttgatcccggctcactgcaacctccgcctcctgggttcaagtgattctcatgcttcagcctcctgagtagctggattatagacgtgtgccaccacgcctggctaacttttgtatttttggtagggttgaggtttcaccatgttggccaggctggtttcgaactcaccttttggttttttttttttttttttgagatggagtttcgctcttgttgcccaggctggactgcaatggtgtaatctcggctcactgcaacttctgcctcctgggttcaagtgattctcctgcctctgcctcctgagtagctgagattacaggctcctgccatcacacctggctaatttttttttttttttttttttgagacggagtcttgctctgtctcccactctggagtgcagtggcgcaatgttggctcactgcaagctctgcctcccgggttcacgccattctcctgcctcagcctcctgagtagctgggactgcaggcgcctgccaccacgcccggctaattttttgtatttttagtagagacgggctttcaccatgttggccaggctggtcttgatctcctgacctcgtgatctgcccgcgtcggcctcccaaagtgctgggattacaggcgtgagccaccgcgcccggctacacctggctaattttagtatttttagtagagacagggtttcaccatgttggccaggctggtcttgatctcctgacctcaggtgatccatccgccttggcctcccaaagtgctgggattacaggcgtgagccaccgcacctggcctggtttcgaactctwgacctcaggtggtctgcccatcttgaccttccaaagtgctggagctacaggcatgagccactgcacctggtgcttttggtaaaagcaacctggaatttgggagaaaagatcaaacgcttcatgggacatgggttatttaaattaccttggatgtcacctctggaaggtatttatcaacccatcttctcaactyctactgctgtggaagctgagaggccagaggccttgcctagtccatctcaggatggctggtatgtctaaaatgacagcctgatcatgtctcttccttcaaaaccctggggactcccagccacctgctgagtaaagtcatctcacggagcatgtgagacctgtgatcggtcccctccctggggacctcctccctggactgcccctcagtctctcctacttgctgctgcccgtgcccctccccgcagtgaaccctgactcagtgtctaaggctgtgctctattatccactcctctgggaagtctcccccttgtaccacttccccgcatccaggaagtgcttccgtggagccatgcctggctcatagtgcagtacaccatggccgtgctgtgtctggtgcccctacgtacccttgcccttgcccaggtgcctctagcatctgatgacagcctggggactaggctcctgcaaagtcaggtgcacagacaactcccatgggagcctcgagcctgacagaggtacagtgggcatccctggagcattagttgattcctggtgggcaggatcaggctcctatactgactgggaggacttttcttgtatctcctcagggaacagaaggccaagaggaacagccagtgggtacccaccctgcccaacagctcccaccacttagatgccgtgccrtgctccacaaccatcaacaggaaccgcatgggccgagacaagaagagaaccttccccctttggtgtggatgcatcgctgcactcaccctccgtgctgattcygccttagttctccagcacgtttcagttccttcctccccagaaaaacactctgctttgaccttgtgctccccacaacgccacagtacctcctcgcctttgaactgttgtgtttccctgacttccaggacattgtccatagcctccttggctctgtctgctgtcaccttgccatgtcctcctcacctctctggccsctcaagtggagttactcagggcgcggtccttgggccctttctctgccctcagtttcacatgagtgggccacagccagtctgatggtgcagatgccatccacgtgactcccactgtgccaccatttcccagagcctgctggagtaaaccaccacaaactggtggcttcgagcagagcacatttcttccctcacagttctggggcccaggagcctggatttagtttcactagaccagactcatgtgtggacagggccatgctccctccagaggccatcgaggcgattcggtccttgcttcttccagctttgggggctgccacgttccagtctcagcctctgtggtcacgtggccttctctgcatgaaacttccctgtctctctcttagaaggacacttggcgatgtaatttagggcccttctggttaatctctcaggatctttcacttaatcgtatcttcaaagtctccttttttggccatatgagctgacagtcacaggttttggggattaagttgtagatgtcttcggggtctgttttttacctctgtggcccagacttcctcagctgccctcaccccctcagcctcatgctgcctgaagacctctccatctcggcgcgtggagatccagccctctccttgctcaggctgtaggtttctttcccaaggcctgccttttcctcacacagcaagtccagtctctccaggttctcccctgggactgcctcagacagccccccactgctctccctggggtctctagcagcccctacctcccytccctgctgccttctcagctctgcagctggtgtggcctctgctccaggcagatcatgtcacctctccacgcagaatcctccaggctccccatcaccctcggagcagaagcaggagttctcactggggtgccaggcccaacctggcctggtgctgccaccgctgcactctgccccactcaccctgcctcaggcctgagaacgtcctcattgctgtcagacctcccagagctcctgccctgcagttgcctctgctgaggtttagccccgttctccctcctcccctctttcctttcctccttccttccttccatcattcctccttccctccctsccatcctaccccctcctccttttccttctgtcttccttccctctatctcctcttcccatccctagttgactgtccccttctcccttagagtggccaccccttttctgcagcatccctgcccctttccctgtctgtttcccagcgcattcatgcctggcactcagctcacttttctctgtcttccatctacctcccaaggtcactgggggcctttcgcagccctctccatgctcccagacgcccttaggtgtcctgtgtcctccagctccatttcaccaacctgcctgccggactcttccctctttatcttcccaaagtactccattgcttggaatcctcctgggactccctcagggcagtggccagtttgcatagcctgagggaagaactgtgggtgcttcgacrcccgctagctttgcagcatccctgaccactgctcctcacggaatctgtgctctgtggtctgtttgtacgtcctcagcagttcctccattcacctgccttggccttgctagaatatttcctcttctggaaatgcccttctcctttcccatagccttccatgaaagtcctgccaaatttcaggcttaaatatcccttcacaggatgtctgggtgttgttccaacactgcccaggtcgattctattgcagacagactggtgcttgttatttatggccccaactgtccccattagaccgtggcccygggacccctgctagcctcgtctgctgcctcagctgttagctgacaagcggccatcttccccagatgggtttgcagargcctgctgtgcagagagagaggctgaaaatttgcatacctagggctccggccccctcgctgactgttgcttccatttcactttcagctttgatgaccatgacccagctgtgatccatgagaacgcatctcagcccgaggtgctggtccccatccggctggacatggagatcgatgggcagaagctgcgagacgccttcacctggaacatgaatggtacaaggcagtcgggcttggctgggcctggccccaacccctgtgtgttacgtgggaacagtcccstttcctgccagctgcctgtcaggcagattctggacctgacacgcaggacattggggcatagttttggagggtgtgggctctgggttcagtcctggttctgttgctgttcactgtggattgggcctgtgaactttggactctttccccatactgaggttgggtggcccaagaggcctggcatgggaggcggctgatctgcatagcatggatgatgatgacaatgccagtcagacctagttcagcccccgagccctgcacacacctgccttgggtcctgtccaccactctgcttctgctgtgtgaggctgcatgtgtgccccgtgcctctctcctcctctaactggtcatctctagacatcctcactctgtaagtcctgggtcagatgccatctcttctggctcttcctgggcttccaaagcctggacagaactcggtctttgtgcaaatgtagacagaaaggttagaaggatatgcatcccaggtgtctagactgcttatcccatctgggagggtggatcatgcatgcatttattgttttctctatttttaagtctgttagaatgtatttttattattttattttatgattactgtttttttagatcttgttgcataccagttttttttttacttagtgtctgtatcctgctgaatttttataatgaacatactatttatattcagacaaaatgcagtgaatatcatctttattttacttatttttttttttaagagacagagtcccactctgttgcccaggctggagtacagtgatactctcatagctcactgtaatcttgaactgcctgggctcaagcagtcctcctgccacagcctcccaaatagctaggaatacaggtgtgcaccactgtgccaagcgttatcatttttaaatgagtaaatgtttaaaatcatcagaatctcaccacctgaataatgttttcagttttaccttttctgtcaattccacatgcaaacatatttaacatagttgtcactatagagcaagtatcgttttatttttcttcacttatcataagtatctttctggtttctcttttttttgggaggggagatggagtctcactctgtcgcccaggctggagtgcggtggcacgatctcagctcactgcaacctccgcctcctaagttcaagcgattctcgtgcctcagcctcctgagtagctggaactacaggcgcgtgccaccatgcctggctaatttttgtatttttagtagagatagggtttcaccatgttagccaggctggtcttgaactgacctcaggtgatccgcctgccgtggcctctcacactgctgggattacaggcgtgagccactgcacccagcctctttctgatttctttaatcttcaaacagtgcagcattttctcctgggtcaaggcgcctttgtttgctaaaactccccctgctgtagacggctccacagcagataacgtagttgcagcatttttctctcagaagggatttcctaagggaggagagtatgagtggttgttgatatgtggctgccttgagctttctgaaggattaggctgcttcctttggtcatccccaggcgctcagcatggtaggcctgagtgctaggcctaccacttgctcacaccagtgccaggcctgagtccaaaggcctctgctcagccctgagaagaaggcctgagagccatgtgccgggtgcttgtcccgtaggtcccacaggtcagctggtgaggggggacgccagtgggaggagacatgggtgagggaggacactggcaagagactccgggaggttgtattgagtgtagatggggacaggtacagttcactggtcatgccccagaacagggacaggacagcccatggggaccaggccaccagtgctgcacaatgcctgttatctctgccaagctccccgyttatctctgctggcccacatcatagttatttgttaattcttttctctccctctccatttcaaccctttaaggtcaggggccttgtttttcattgccgtttttcttcttttttttgagatggagtttcactcttgttgcccaggctggtgwgcaatggcgtgatctcagctcaccacaacttccgcctcccaggttcaagtgattctcctgcctcagcctcccgagtagctgggattacaggcatgcgccaccatgcctggctaattttgtatttttagtggagacgggatttcaccatattggtcaagctggtctcaaactcctgacctcaggtgatccgcccgccttggcctcccaaagtgctgggattacaggcgtgagccaccgcgcccggctgctgtttctcttaacatagaatctagcccagcataggaacttagtgttcmaattggatcagtccatgctctgtctcgttacctttctttgggcaacacatagaaagttctggtttgtttatacccccgccctgttccagaaaggatgcaagsaagcttaccataagtacactgggcccaaatgactaaagcaaatgaaaacggagtggttaggaaaaactggataaagaggaaatgttcaagttgaagagggagctcgtactcagcttttatttggtgaacrttgctgggagttgggcgtggctctgggcctttttagaaccaggcagaatgagacgtgaaaatcatttgcatactcagtgtggtcaaggttagcagcagcctgtggctctgaagaagtagaatcacacgtggtcctggaatctgagatttcctacagccctcaggaagagggcacagtatagtaaggaagaccaggatcgtccatgaactccacagtgagtttcactgggctgttcctcctaggagttctaatgtaaaatrtgatgcccactgaaagtaatttagaacaaagtcttaaccagtggagaaccaaaatagtgttgttctgcgaactcttcctcagctctgggtggtatttggcatttgtaagagctgtgattcttaattggtggttagatgccatgccaaaattgttaytgatttgctttgaaatttcagatcatcttaaaggtgggcatgagagtctttatcacagagggattaaatatgtgaagtagcagtacttgagtagcacraatgaagtgtatgttcagcccaccttcagaatcaggattggccaggcgtggtggctcacgcctgtaatcccagcactttgggagggtgaggtgggaagatcacttgaggccrggagtttgagaccagcctggccatcatggtgaaaccccctctctactaaaaatataaaaattagtcggatgtggtggcacacctgtggtcccagcaacctgggaggccgaggcacaagaatcgcttgaacctgggaggcagaggttgcagttagctgagattgtggcattgcacttcaacctgggcgacagagtgagactctatctcaaaaaaaaaaaaaaaaaaaaaggaatcaggatttttctcaggtttctggtaggtgttgtgatgagtttgaggttattttctctgwaaaggacttgaagtagtgcttctctgaatcactggtgatgtatggtgtcacctggcttaacagcctgctgagggagggaagtattaaaatcctccagaaaagatgagttgcctaaccagaacacatgtggacatagatgccatcttcacccagaaggggaacaaggggatcccctcaggaagagttttggaatctgtcttggcacacaggcaaaggagtgattagggccctgagtgtctacacttggctacagaaggcaagtttttagagatttatatccacatgcttgttttggkctctaaaaaagttaaatgaggctgagcacagttgctcacgcctgaggctgaggtgggcagatcactttaccccgggagttcaagaccagcctgggtgtcacggtgaaaccccatttctacaaaaattcaccagatgtggtagcacgtgcctgtgatctcagctacttgggaggctgaggtgggaggatagcttgagcccgggaggttgaggcttcagtgagccgtgattgagccactgcactccagcctgggcaacagagtgagaccctgtctcaaaaacwttttttttaaagttaaaaaaaaaaatcaaatgatagattcaggaagccaagtgaagcccaacatgattaacccaaagcaatccatgccaagacacatcataattaaacttctggaaactcaacacaaagaaaaaaatcttgagagcaatcagagaaaaaggacaacttacctgtagggaaaagacaataagaatggtggtagatttctttttttttcttttttttttttttgagatggagtcttgctctgtcgcccaggctggagtgcagtggcawgatctcggctcactgcaagctccgcctcctgggttcacgccattctcctgcctcagtctcccgagtagctgggactacaggtgcccaccaccacacccggctaattttttttttttttttttgagacggagtctgtcgctcaggctggagtacagtggtgcgatctcagttcactgcaagctccgcctcccgggttcatgccattctcctgcctcagcctcccgagtagctgggactacaggcgcctaccaccaggcccggctaattttttgtatttttttttttgaaacggagtctctgtcgcccactctggagtgcagtggcgcaatttcggctcactgcaagctccgcctcccaggttcacgccattctcctgcctcagcctcccgagcagctgggactacaggtgcccgccgccatgcccggctaattttttgtattttttagtagagacagggtttcaccgtgttagccaggatggtctcgatctcccgacctcgtgatccrcccacctcrgcctcccaaagtgttgggattacaggcgtgagccacggcgcctggccaattttttgtattttttagtagagacggggtttcaccgtgttagccaggatggtctcgatctcctgacctcgtgatctgcccgcctcggcctcccaaagtgctgggattacaggcgtgagccactgcgcccggccaaatgatggtagatttctcatgagaaactggacgctagagcaagtggcaggatatttttcaagtactgaaagaaaagaactgttaatctagaatcctgtacccagtgacaatattgttcaggaatgaacgatattggacattcttttttttttttttttgagacggagtttccgctcttgttgcccaggctggagtgcagttgcacagtctcagctcatcacaacctctacctcccgggttcaagtgattctcctgcctcagcctcctgagtagctgggattacaggcatgtgccaccatacccggttaatttttgtatttttagtagagaggggtttctccatgttggtcaggctggccttgaactcccacctcaggtgatccacccaccctcggcctcctaaagtgctgggattacaggcgtgagccactgtgctcggccaattttttgtattttttagtagagayggggtttcaccgtgttagccaggatggtctcgatctcctgacctcatgatctgcccgcctyggcctcccaaagtgctgggattacagacgtgagccaccgcgcccagccaaatgatggtagatttctcgtgagaaactggacgctagagcaagtggcaggatatttttcaagtactgaaagaaaagaactgttaatctagaatcctgtacccagtgacaatattgttcaggaatgaacgatattggacattctttttttttttttttttgagacggagtttctgctcttgttgcccaggctggagtgcaatggcacagtctcagctcaccacaacctctacctcccgggttcaagtgattctcctgcctcagyctcctgagtagctgggattacaggcatgtgccaccatacccggttaatttttgtatttttagtagagaggggtttctccatgttggtcaggctggccttgaactccccacctcaggtgatccgcccacctcggcctcccaaagtgctgggattacaggcgtgagccactgtgctcggccaattttttgtattttttagtagagacggggtttcactgtgttagccaggatggtctcgatctcctgacctcgtgttccgcccgccttggcctcccaaagtgctgggattataggcatgagccaccgcgcccagccgaatgatggtagatttctcatgagaaactggaggctagaagaagtggcatgatatttttcaagtactgaaagaaaagaactattaatctagaatcctgtacccagtgacaatattgttcaggaatgaacgatattggacattcttagtcaagacattcttagatgaaagaaaactaagtgctgggcggggtggctcatgcctgtaatccctgcactttgggaggccgaggcgggcggatcacgaggtcaggaattggaggccagcctgaccaacatggtgaaaccccatctctactaaaaatacaaaaacaattagccgggcgtggtggcgcatgcctataatcccagctacttgggaggctgaggcaggagtatcacttgaacccgggaggcagaggttgcagtgagcagagattgcgccattgcactccagcctgggtgacagagcgagactccaactcaaaaaaaaaaaagaaaaagtaaactatcccctgcagaccttccctaaaagagtggctaaaagaaaggaaatgattgccggcatggtggctcccacctgtaatcccagcactttgggaggccaaggcaggcggatcacaaggtcaggagtttgagaccagcctgaccaatatggtgaaaccccatctctactaaaaatacaaaaacaattagccaggcatggtggcgcacgcctgtagtcccagctactcaggaggctgaggcagaagagtcacttgaacctgggaggcggaggttgcagtgagccgagatcacgccactgcactccagcctgggcaacagagcaagactctgtctcaaaaaaaaaaaaaaaaaaaagaaagaaaggaaaagattaaagaagaaacattgagacatcaggaaggaacaaaagaaagcatgataagaaaaaatgtagataaataaaatagactttcctctcctcttgggtttaacaaattatgtttgacagttgaagcaaaaattgtaacagtatctgatacggttctaaaggtatgtagaaagatttaaggctttaaggctgggcatggtggcttatgcctgtaatcgcggcattttgggaggccgaggcaggcggatcacctgaggtcaggagttcaagaccagcctggctaacatggcaaaaccctgtctctactaaaaatacaaaaattagctgggtgtggtggcgggcgcctgtaatcccagctactcgggaaygggaagctgtggcagggataattgcttgaacccgggaggtggaggttgtgttgagctgagatgacaccattgcactccagcctgggcgacagagcaagactgtgtctcaaaaaaaaaaaaagatggataaagataaaacgttaatcaaaggaaagcaggagtgacaatgttagtatcagtaaggcagacttcaaagaaaatgaccagagacagagaaggacattaaataatggtaaaaagataagttcatcaagacatagcaatcctaaatatgtatgcagcaaacgacagagctggaaaatatgtgaaacagtatcagatagaaatcagatagaaccaaaaggagaaataaacaaattcacaatcattggagacctcagcattcctctctcaacaacygatggaactggatggaaaatcagcaaaacgatgtaagatcaaaaacactatcgaccaacagaatctgattagcatttatagaacactccagcacagccgaatgcacattcttttcaagtgcctgagcaacatataccatataatccgtataatggatcataaaacaagttttaacaaatttaaagaattgaaaccatacagagtgtgttctccaaccacaattgactcaaatacttgtaagctaaataacagacttctaaataatctgtggttcaaagaggaagtctgtagggaaatttaaaaacatacacagacctaaatgaaaatgcagcatatcagaatttgtgggataaagctaaacagtgcaatacagattatctgtagcaccagtgcgtacattggaaaacaggaaaagctttcctcaagtcgataatctaagctctaatctcaagaaccaagagaaacaaaaccaaaggaagcagaaggaaggacatttgaagagcagaaatcaatgacattgaaaacagaaatcaaacaatagagaaaattaatgaaaactagctggttttttgaaaaattaataaaactggcaatctctagcaaggctgacaaaaagaatgtaaattatcaatatcaggaatgaaatgggatgtcaccacagaccctgcagatatcaaaaggaatactgcaaacaattctataagtttgacagcttacacaaaatggattaatttcttgcaaaacacaaagtaccacaactcatccaatgtcaaatagataatttgagttgccctataactattaaggaaacagaatttgtaatttaaaaaccccaaaaaatggccaggcacggtggctcttacctgtaatcccagctctttgggaggctgaggtgggaggattacttgaggccaggagttcaagaccagcctgggctacatagcaggatccaatctctaattaaattttaatataaaacattattttaaaaaaggaaaacaattctcccccccaaaaaaatctctgggcccatatgatttcactggagaattctgtctatcaaatgttgacgaatgagttaacaccaattctacacaatctcttccagaaaatggaagaggagaacgcacttcctgatcaattttataaagctcgtattacctagataccaaacctaaagacagtaccaaaaaaagaaaaatacagaccaatatcctttatgactaaagatgcaaaatccttagcaaaatattgcgaaatagaattcagcaatatatagaaataattatatactgtgaccaagtgggatttattgcagggatggaaggctgggtcaatatttgaagctcaatcaatgtaatccaccatattaacacactaatgaagaaaaatcacaggatcagatcagttgatacagaaaaagcattttgtagaactcaacacctgatgataaaaatgctcagaaaaataatagcaggaaacttcctccatttagtaaagagcatctatttagtacaaaaagtcctgttgctatttttttttttttttttttagacggagtattgctctgttgtctaggctggagtgcagtgscatgatctcagctcactgcaaactctgcctcctggattcacaccattctcctgcctcagcctccctgatagctgggactacaggtgccctgccaccacacccagctaactttttgtatttttagtagagacggggtttcacagtgttagccaggaatgtctcgatctcctgaccatgtgatccacccgcctcggcctcccaaagtgctgggattacaggcgtgagccacagagcctggccttctgttgctagcatttaatagtgaaaggttgcatgctttctgccagagaccaggaacaagccaaatatgtctgctgtcactattcttattcaacatagtgttggaagttctagctaatccagtaagctgagaaaaggaaataaaagacgtgtagattggaaaggaagaaataaaatcctatttgcagatgacatgattgtcyatgtagaaaatcccaagggatctacagaaaacttggagaactaataactgaattccccaaggtcacaagatacaagggatacaaggtaaacatgcagaaatccattttatttctatatgccattaatgagtacctagacacaaattaaaaatacattaccatttatcatcactcaataaaaaaaggaatacttaggtataaatccaacaaaacatttacaggacttatataccaaaaactataaaacactgacgaaagtaatgaargaagacckaaataagtagacatatcatattcatggattaaaagactcaagatgatgtcagttttccccaaattgatatacagatttaatgcaatttctgtgaaaatcccagcaagaytttttttgtagataagatggttctaagatttatatggaaaggcaaagaaactaaaatagctaaagcaatttatttattattattattattattttttgagatggagttttgctcttttgcccaggctggagtgcagtggcatgatctctgctcactgtaacctccaccttcyggtttcaagcgtttctcctgccttagtctcccgagtaggtgggattacaggtgcccgccaccatgcctggctaatttttgtatttttagtagagacagggttttaccatgttggccaggttggtctcaaactcctgagctcaggcagtccgcctgtctcagcctcccaaagtgctgggattacaggcatgagccaccacacccggccagcaattttgaaaaacagtaaagtgggagtaatcattctacccaatctcaaggcttactatatagctacgataatcaaggctgtgtggtattggtggagtgacataccgtgatggaacagaattgagaatccagaaacagacccacacaaacgtgccctcctgatttttacaaagatgcaaatgtgattcaatggaggaaagacagctcattcaacaaaatggcactggagcaattagacaatcataggcaagtaggctggcacagtggcttacgtctgtaatcctagcacttcgggaggctgaggtgggcagatcacctgagatcacgagttcgagaccagcctgaccaagatggagaaacctcgtctctactaaaaatacacaattagctgggcgtggtggcgcatgcctgtaaccccagctactcgggcgggtgaggcaggagaatcgcttgaacctggaaggcagaggttgctgtgagccgagatcacgctgttgcaatccatcctgggcaacaagagtgaaactctgtcccaaaaaagcaacaacaacaaaaaaggctgggcacagtggctcacgcctgtaatcccagcactttgggaggctgaggtgggcggatcacctgaggtcaggagtttgagaccagcttgaccaacgtggagaaacctcgtctctactaaaaatacaaaattagccgggcatggtggcgcatgcctgtaattccagctacttgggaggctgagtcaggagaattgcttgaacccaggaggccgaggttgctgtgagccaagatcacgccgttgcgctccagcctgggcaacaagagcaaaactccgtctcaaaaaaaaaaaaaaaaggcaaaagacaggaagagaaatttcactaaagaagttatataggtggcaaataaacattgaaaagcttttccacattgttagccttagggaaatgcagattaaaattacactgttattccacatctttaaaaagtggtgacagcatcagatgctggcgaggatgtggaggaactgggtcactcacaagctgctgatgggaatgtaaagtggctggaaaactgccctagaaaacagtktggcaatttctgttaaaaactaaacatgcggccaggcgtggtggctcacacctgtaatcccagcactttgggaggccgaggcgggcggatcacgaggtcaggagatcgagaccatcctggttaacatggtgaaaccctgtctcttctaaaaatacaaaaaattagctgggcgtggtggtggctgcttgtagtcccagctactcgggaggctgaagcaggagaatggcgtgaacccgggaggcggagcttgcagtgagccgatatagcaccactacactccatcctgggcgacagagcgagactccgtctcaaaacaaacaaacaaaaaactaaacatgcaaccagtgtaccttgagcatttatcctggagaaatgaagacatgtttatacaatagcctacacgtggatgttcatagcagctttatttataatagcgggaaactggaaatgatctagatagccttcagtgagtgaatagttaaagtgaggccccttcgtaccacagaatgtcacttggcagtaaaaggaagtgacaatctggatgaatcactggatacagatacagtcctctatcttgtcttttttggaggaaactgggcgcagtgtgcatggaatttctctgtgttgtttcttgcatctgtacatgaatctacaattacttaaaaattttaaaatgctctgggcagtgtattcactgggtgtttaccccgtgcacctgaggttcctgctgttgctgccccgcrggctgttaggatgctggtctccagcgtgtctttagggcagggaggagatagtggggctgtggtctgttaggccgacctgcttcttgatgatggaatcctactgtctgctctgaggsaatttttcttggctttttcagcttattcctgcaaggcgtcttgtcagtamggtctgggtggagcagggagagaatgttgactgagaggaccttgctgaggtctggctggccacagatggtccctgtgagctcccatctggtacaattccttttccaggatccgggatctgtagggacctccacgcttgtgaccttgttgaggccctgctgctgctactgcagtcacaggcctggaaatcgctgtggcttggcacagtgtgttttgctcacatgaggcctggtattgggccagcctctgtgccatcacrtctgccaccagttcagcacagaggggagtagagagatggcacgcaagctttgatgtgcctttgctggcctcgcctggatcatctcattagttgggataatctcatgcgcccacccagctatgastggaatgagggragtgtttatggccatgaccacccccagggcatggagcaggaggtctgtgcaggatgagggctgggggcctgctagtcatgtgcttcctccttccactcccagtttccaggaaggccacccccagtgccctggttgtcctctcctgcatccggagatgtttggcttcaaagaagaaggggtgagggrggcmggtccatgcccaagcatggtgcaatctcttggcatcccttccctctcctgatttcagagaagttgatgacgcctgagatgttttcagaaatcctctgtgacgatctggatttgaacccgctgacgtttgtgccagccatcgcctctgccatcagacagcagatcgagtcctaccccacggacagcatcctggaggaccagtcagaccagcgcgtcatcatcaaggtaggtgacttctcacccagcactggagccttcctggccctcagggtgggtgtcatcatggagcactgagggtacaccaaggcctcagcagaagcccgtctttgggttccatatcatctgraaagtcataacacctggctttgctccctgcartcccccaggaagggcataggctgagttctcwtagtaaagtgttayattcyggacacattcagggggtgtctctgaggcactgccaggctctgagcaaagcccggaggtctagaggaggtgaaggcagctgattggctgggccaggctgagtgctccagggkggcctagtaacccaataagatgctgccttagtggccatattacaggtgaagaggtgggcacgtggagagctgagatcacctgcggaagttgcmaactggccagttgagaaatggtgaggctggcgattgggcgcaggcctgcaccctgcagagcctatagcataatccttgctgtgctgagcygccactgccagactatgccttgagggtgaggggagctttgaaaataggaagatatgagaagtaggtgaaattggcacatgtgatgaccctaaaaaggtcagtggtttggttagatctgatgctgtgcctttggcttccattttaggaaaacattgatgtataaaaataagagccatgttacaaagggttcctgaaaatagtctttggggtcgaggagcctcgggagggatgcctcctgtgactgagggatgcctctgccccgtgcaccagatggagcctgggccgacttcttcccactgtggttctccgtggcactttactaagattttggaaaataacgtgggggaatcaccagcaacttcctctgtggtcccccaagtaacaaacaactaaatatcttatcttatttagttagtyaagacagtctcactgtgtcgcccaggctggagtgcagtggcwcgatcttgactcaytgcaacctccacctcccgggttcaagcaattctcctgtctcagcctcctgrgtagctaggattacagttgcccgccactawgccaggctaatttttgtatttttagtagagacagggtttcaccatatttgtcagtctggtctcaaactccttacctcaggtgatccacccacctcagcctcccaaagtgctgggattacaggcatgagccaccgcacctggccgaaatactttgggtgtgtgtgtgtgtgtgtgtgtgtgtcgcagtctcactctgtcgcccaggctggcttgcagtgtgcgatctcagctcactgcaagctccgcctcctgggttcacaccattctcctacctcagcctcccaagtagctgggactacaggcgcttgccaccaygcctggctaattttttgtattttttatagcagagactgggtttcaccgcgttagccaggatggtctcgatctctggacctcgtgatctgcccacctcgacctcccagagtgctgggattacaggcatgagccaccacacctggccaatactttgttttcttgattaatattttaaaattgtggtaacattcataacataaaatttaccattttaaccacttaagtgtaaattcagtggcagtatattcacatccatggctgtgtaattatcaccaccatccatctccagaattctatcatcatgtaaaactgaaactgtccatcaaacactaactccccattccccctccscccacccctggcaagcaccattctgctttctgtctctatgaatttgactactcgaggtgtctcatttacattcctaagggaatcatgcagtatttgtccttttgtgactggcttatttcacttagcagaatgtcttcaaggttcatttatgttgcaccatgtcagaatttccttccctttttaaaatgtatttatttttagacagggtcttactctgttgcccaggctggagtgcagtggcgcagttatggctcactgcaacctctgcttcctgggctcaagtgatccacccggtgcagcctcctgagtagctgggaagctaggactaccggcacactccaccacacccgactgattttttgtattttttttgtagagatggggtttcgccatgttgcccaggctggtctcaaactcctgggctcaagccatctgcccacctgagcctcccaaagtgctgggattacaggcgtgagccactgcgcccagcctcctttcttattaaggctaaataatattctgttgtatggatctatcacatttttatttattcatccctaaatggacagacacttgggttgcttccacattttggctattgtgaataatgctgctatgaacctgggtgtgcagatatctgttggtgtccctgttttcatttattcattcattcattcattcattcatttagatggagtctcactctgttgctcaggctggagtgcagtggcgcgatcttggctcatggcactcctgcctcccaggttcaagcaatctcctgcttcagcttcctgagtagctgggattactggcacccaccaccatgcccagctaatttttttggatttttaatagagaccgggtttcacyatgttggccagcctggtctcaaactccgcctcagcctcccaaactcaaatgatctgcccacctcggcctcctaaagtgctgggattataggtgtgagcccctgtgtctggcccctgctttcatttcttttgggtgtatacctagaaatggaattcctggatcgtacagtaattccatgtttagttttttgaggatccactatactgcctttctcggtggctgcacccttttatattcctaccagcaatgcgcaggggttccagtttctccacatcctcactcacacttgttagtttttcttttcttttctttttctagacagagtctcgctctgttacccaggctggagtgcagtggcatgatcttggctcactgcaacttccacctcctggattcaagcgattttcctgcttcagcctctcgaggaggagctgggactacaggcgcatgccaccacgcccggctaaattttgtacttttagtagagacggggtctcatcatattgaccaggctggtctcgaactcccgaccacaggtgatccacctgccttggcctcccaaaggattatagacgtgagccactgtgcccggccagtttgccagcatttttttgaggatttttgcatcaacattcataaggggtgtaggtctgtagttttcctttcttgtagtattttttgtctgacttaggtatcagggcaatgagttaaagaatagtttgagaaggattggtgttagctcctatttaaatgtttggtagatggccgggtgcagtggctcacgcctgtaatcccagcactttgggagaccgaggcgggcggatcacctgaggtcgggagttagagactacctgaccaacatggtgaaaccccgtctctactaaaaatacaaaaattagccgggtatggtggcacacacctgtaatcccagctactcaggaggctgaggcaagagaattgcttgagcccgggaggcggaggttgcagtgagccgagatggtgccactgcagtccagcctggctgacagygagactctgactcagtcagtcaatcagtgtttggtagaattcaccaatgaagccatcaggtctaaggcttttctttgtcaggaagattttattattgattcagtctctttacttgttaatacctttttgagaggaatacaaatttgtttcagtttcacattatggccagctaggaggaaaagaagggacaatggtaggagagaagtggggtggggatgggagtggcagcaagcacctggcctgtgtcctgcatacggtctgctggctctggagggcagccctgagggctccactctgtgcttctctttgtcttgtaaacatgtggaggatgaggctgtgtgggctaacccacccagccacgtggttccaaatgactgggattggccacacaaggggcctcatgaagcctgactggtagcttcccttaacgtttttctcagaattgagcccattttcattgttgttgtcttgacggggcctgcagaggagccatacaggaagttgcccagcagctgtaatcctcctggggctgttccctgccccaccagaagaggcttccccagtgaccctctgacttacctgtgattcccacctgggggatggtggcagctggcaggttgagagactgtccccagccaggtgtcctgctctgccctttgggtcagaccagatgtcacagggtggacacagctggcccagggaagcctgtgttatgtgggacagactgcatttttcaggccagaggcctcctgggcaccgtgaccctgggaacagtgtcctgtcttgcccatgaggaatagaaggtcacacccagggtttcccatctataattgggactcagaagagctgggtatttctttcttccttccttttttttcatggctcactgcagccttgacctcctgggttcaagttatcctgccatcttggcctcctgagtagttggaactataagcacgtaccaccatgcctggctaatttttaaattttctgtaggaaatggagtctcggctgggcaccgtggctcatgcctgtaatcctaagactttggagagctgaggtgggcagattgcctgagctcaggagttcgagacaagcctgggcaacatggtgaaaccctgtctctactaaaaatataaaaaattagctgggcgtggtggcacgttcctgtaatcccagctactctggaggctgaggcatgagaattgcttgaacctgggaggcggaggttgcagtgagccaagattgcgccactacactccagcctgggcaacaggctcttcccatctcactgactctgtctcaaaaaaaaaaaaaagaaaaaagagaaaatggagtctcactttgttgtccaggctggtctcgaactcctgggctcaagcaactcttccaccttggcytcccaaactgctgggattacagacatgaaccactgtgcctggccagagctgggtgtttctgtaaggacgtcctttktcttgatcctggaacatgactgaaggaaaacaagaatctttggagccatggcacatgaggaccatctctctcctcagaaagagtgccttaggttrgagcagcatcttccagatattcttggcaatgctgggaccaaagcccaggcctggctgcccttgccagggcacctggcccaagtcggctttgcccagttccagcaggggttggggggcaggggaggaagctggggacatggtgctgctgcartttgagccatcagaccctgtggcactgtccaggccccgtccrgagagtgcatggggtgagatgtgagtcagggctggggaggtgggcaggggcctggccctgctgtgcacctgcttgggagtcctggccccgtcttagctctgtgagtccacctggagtccagcactcctcactaccccaccaaggccactgccagatggctcccttcctccctccccgccttccagtagaggtctcagcatggcagctcagcccatgtctcttgtctgcccaaaataccgcagaagcttcccacatccctctgtggaagccaagcctgtccaaaggcctcagggccctaactgctctctgctacagtccctcgccaccctcatctcctcccttttcccctcactgggcagatccgggtaccagaccttggctcctcagtcttttacatctctgtgtcccccacctgggactgttctcccccagggagccacattcctgctccctgggcacattcacttcttcctaaaggccaccttcctagaagccttcctggcctcctgacttctgaggccagcctggactttctccccctccctccctttcctccctggcactcccgtgctttctggcacaccacatgctcacttaacctacttagtgtctgtcagtgcccccaccagcatagcttttttttttttttttttttttttttgacacagagtctcgctgtgttgcccaggctggactcaaacacctgagctccagtgatcttcccacctcagcctcccaagtaactgagactacagacatgtaccacctcacctttctcaraacagccttttgaatgtttgtctctcttgtgcctctccttggtagacacacagtctagactttggaataaatgaatgtgttagtgactgaatggcaggggacaggcaactccatccatgagcccagggcagggagggcttgctgggtgggagccatgtgcctrtggtcctatggggtcctgttgggtggttccmtgggctgtctgctgctgcacgttctttttggacccagcacccacgtggtttgcttggcattagattccagttgggaagggccagtgcctccgattccattcatcatcaggcgtgggcgtatgtggagatagcaaaggacatgggggcccgactgcagtccccattgcctggctgcatgccgtgtacaggacactgcagctctgccctcggcttcctccctctgcgtgaggattccttcattcccagaacaaatacaccctgcctgtgctagaattcctggaggcaaatgattcagattgtttcagacagtcctaagtgctgtgaagaaaataggagaggtgccagcatggtggcccgcacgtatagtcgcagctactcaggagactctcgggggaggatcttttgaggccagcctgggccaacacagagaggcagcagggaagcctgcggggaacagaaggctcaaccacagggtctcttctctgcccaaaacacttgatacattgcctgggccttgtagaaaccttgtctctacaaaatattagccagacatggtagtgcatgtccgtagttccagctactcaggaggctgaggcagaagggtctcttgagcccaggagttcaaggctgtagtgagtcatgatcatgccattgcactccagcctgagtgacagagtgacatcctgtctccaaagggggagaaaatggagagaagggtgtggaaaggggctgatgggaaggggagctctcaggagctggcactttagcttagaccaggatgctgagaagaggctggtcctgccaggtgaggggaagagcattctagcaagtgggtggtgatgtgcagggctcagaggcacagggctttatgaacatgatcggggattggggtaccctaatctctaaaaggaggcagaagtccccggaagggctggactccgaggcagtggtgagttttccctgcagctgcccaccctgatccttgacttaaaagctaagggccaacaatgaatgggcaggtgcactgtgacctggttgccctgtggagcactggatagcagtgagggatgaccccagccccacactctaatgggaggagtcttgcaagcatgatgcagagtgaatgaacctggaccccgaagtgtccatcctattcagaacagccacacctactcaaggggtgagaagtcaaaatggtgcctccccaggggggcaggtgtaggtgggagcccctggggtacagtctgtgttctctcagctgggtgctggcttcccaggtgtccactagtagaaaacccctgacagcacacccggggcctgggccctctggctgtgagtcacgtgctgcagggagtcctctggggaatgtggaggagctggcccagcactgtgatccctgcaggcttccctgtcccctcaccgtgttgacccagagtggggtgcatctgtgaacacgctaggcagggttttccgagaggggcaagctctgtaaagggcatagacattggctcaagacagggcttagggatgccttagctgagccctgcctttctggtgtagtcacgtaagaccgatggcagcaggagcgaagggcagaaargaaggtccccaccagcacagggcacaggggagatgggatgaaggtaaggtgggactcaggtgcccccrgggtcacttcagggcctcycgagggtgactgtgctgggccctgagccagagcccctcatggcagacagggttgtggggtcagccttgttttggggatggggaactggaaggacaaggaccacctgcagttctcagctggtggaccctggtgggcagggcccaccccaggcctggcagggccccgctcctcgcggcctccctgggctgcaaaagctctaacttgtgtcctttggttgttgcctcagctgaacatccatgtgggaaacatttccctggtggaccagtttgagtgggacatgtcagagaaggagaactcaccagagaagtttgccctgaagctgtgctcrgagctggggttgggcggggagtttgtcaccaccatcgcatacagcatccggggacagctgagctggcatcagaagacctacgccttcaggtaggatcatgcatgagtctctccctccctcatctccctgcaaaactgttttgagaaagacttctctgtgtgagcggtgatacctttgaggctttctcacgcttcgcagcacaatctggctggggtctgtgtgtttgctccgtcctcctcctgccctatgtatctctccagggctccgctgtgccaggtagggttagaagcacctaacacaatagctggcaaagacttggagttctgtcagggtgaacctcaagtccttgcctccacggagccctggcctgcccccaccatccaccattcagtygtcctgccccacaccctctctctctgctcttgcccagactgttattttggtcagggtgacccctgcccagggttcttcatctgttgaacttgaattatgtcttaaacacaaaggcccgcccagcttttgagagtcaggggtccctagcagctccttcttactctagtatctctgcctttggtcagtcagagagcatttgatgagtaccatgctgggctggaccccatcctggctgccctggaagatagagacaggtcaccttgatccctgcctgtagcatttgggctggctgagatggtggaggtgtgaacagaatattccagtccagtgtcctctgtggtagggatggggatggacccgggagaggccctcctgttcctggcaggaggtgggactcagagttaaaagtgaggtcaaggcccagtgcgatggctcacacctgcagtcctagcacttcgcggagctgaggtggatcaccagaacccagtagttcaagaccagcctgggaaaaacatggtgagaccccacctctacaaaaaaaaaaaaatagaaaaaatgagccgggcatgttggtacatgcctgtagtttcagctactcaggaagctgaggtgggaggatcgcctgagctcaagaggtsgaggctgcagtgagccaagatcacaccactgcactccagcctgggtgacagagcgagaccctgtctccaaaaaaaaaaaaaaaaatagcgaggttgaactctcccggctcagcaggactcyaggactgggaagccccgtggttcctcaccctgtcctctgtgttgggatggggtgggggtgcagcaagcatccctacatcaaaacaggatgttcagatttagtctgctcatcagactatcatcatccacatctgcagtcatcactcagggatgacagcttaaaatgctacatgaggagcaaataggaaggtctgttttgcaaagccatgacaattaatggagctcgttaggtttgtgtctaacttgttttcccagacatcccaagagacagctttctatgacttcccataaatctgagcaaggaagaaggaatgagagccacccacggggctcaagggcccgggcctgggaaacagctgagtccctgcctgagcgccatggtgctgagatcctgtgacctgccccccagcagccctgccagtcacatggttctgcttcacagacagggcagcccagagaggaggctggggggctggtgtctgatgcctccctgttccctcggggtgttgcctgggagtgcagctgtagcgtscattcaccctgcacagagccaagccctatggccggagagccagtcaagggtggcctccctccaccagagttgactctgaggccccgggaggcagtcatgttgcgcgcatcaacactgagcacctcctcccgcagaggctgatccagtcagaaccctcgtcttgggctcacaggtgcaggtggtaggctggctgcccccagcatccagcccctrcggtgttgaccttcacctagtcctgcagccgctgccagtgcccacagtccagggtcaggaactgaagtccccggggcctcttgacaggtccttgcaacatcccttctttcagccaccatggcaccatccctcctgctctgacccgaaggtgacctgagcctaaattcctttccaagttccgggccctctgcagtttgcagagtggctccagagcagaccccctggggagtccctggtggtggcaggtcaggatttagaggcagaggcgggccccttctttatctcatcgaccacttastgcattccagttgcagggcctgggggcatcacagaccccctgcyccctgctctctcttatgctgagaatgcaggtttcaaatctttggggttaaaggcaaaggccatcccgctgggaccaaggtgagcacacgtccctatcacagcagccagatggagaggcggcctgcctggggaactgggaagtgtcctgagtgggcttttagcatcaggagggctgcgtgtgtcttcccagtccccacactggaagacagctgcaaggataggacagggccttagggttgggctgtcatccctgactccaactcgcgttccccccactgtaccaccccaccccatgggatcttaggagggacttcgtttaactctgtccccagggagaccagtgtcagtcctgcctggccctgcctggggaaaggaggctgggccactgagtccccaggtccaggggccagtcagcccacagagagctagaccaggagtcctggcctggtctctgccacacagaaagcttggcaactgctgtgtcacatgactttttgttttgttttgagatggggtctcgctctgtcgcccaggctggagtgcagtggcgtgatctcggctcactgcaagctctgcctcctgggttcacgccattctcctgcctcaggctcctgagtagatgggactacaggtgcccgccaccacgcccagctaatttttgtgtttttagtagagacggggtttcaccgtattagctaggatggtctggatctcctgaccttgtgatccacccatctcggcctcccaaagtgctgggattacaggcgtgagccaccgcgctcggccacatgacttcttaagaagggttttcaggctaggcatggtggctcacgcctgtaatcccagcactttgggaggccgaggtgggcggatcacctgaggtcaggagttagagacaggccaacatggcaaaaccccgtctctactagaagtagaaaaattagccaggtgtggtggtgggcacccgtaatcccagctactcgggaggctgaggcaggagaattgcttgaacccgtgaggcggagattgcagtgagctgagattgcaccattgtgctccagcccgacagagctagactccatctcaaaaaaaagggttttcagctctggacctaggtcactccataatggaagcactcgctgattccccaagagccagtccctccatctctcccagccagagctcagtgcctgacttccataccctcctcggcagtggggacattgattggatccatggtacagkggggcaagctgctggccacaggacatgtgtgygcaaggccactatgcccacacctcaggggaaccagggcagagaacagcctgttccctttggcagtgggacagacaggagacaagcatgaaggggaaacaggggcatgtgacaaactggtcagaagccctaggctcctagaggacagactgggaccagagtgacacaggcgtcycagagccagtggagtgggatgaagggccagcgaaaggagggagacagggctcaaggggaaggaggctgggctaggcagagcctctgaggagagctgatcctgcraagttactggcacctcccctgggccagccctgtgttcctggccagggacgggaggagacagtgccctgtctggcagaggaaacagattcatgtgcatgrctatcagtgtgccatggccacagaaagcaccggaggctgtgggcatgaggaagggcagttgggggcatagaacctggggtgaggatggccagggcaggtgctgatgggggactgcagcaggaaggaccgagrggagaccagggacaggcaggtgcttgagaaggaaggtgggccctgtggatcaggcagggtatctgccccagggggctctgcacaccagcagtcctacacgtacagggtggggatgaaaagagactaagggtcagggagcttggtagctgggcctgcatgagggacagagaggcagtgtccctctgatggcacagcatcaggaattaggctggggtatgtcaggtacacgttgggctggttgagcgtaagcctcaggttccttccgaagctctgcccgccagccctggcctgatgtcaggttttgtttgtttttttaacagctttattgtgatataattcataaaccatacaattcacacatttagagtatatagtgcagcggtttttgatatatgcagagagctgtgtaactatcaccactgtcaattttaggactttttcatcaccccactgcaggcagtcccgttcctccccgctgtctctcagccctaggtgtccactcatccactttctatctgtagatttgcctattccgggtacttcatagaaatggaaccatctaatatgtggtcttttatgactggcttgttagcataatgttttcaaggattatccatgttgtagcatcttttatcaggacttcattcttttttatgattgaatattatctcattgcatggatataccacattttattcattcatcagcagattgacttttgggttgtttccatttttcagctattgtgagtactgctgctgagaacatttgtgtatgagtttttgtgtgaacatctgttttcaattttcttggatatatacccaggagtagaattgctgggtcacgtgacaactcagtggttagcattttgaagaatttctagactgttttccaaagtggctgcaccattttrcattcccaccagaagcgtgcgattcccgtttctctggatcctgctggcatttgctgttctctttttgatcgtagccgtctgaggaggtgtgaagtaattgtggttttgatttgcatttttctaatgactgatgatattgagcatstttgcatgtatttctggctgtttgtgtatcttctttggagaaagtgctttgctagtttcttaattgggttttattttattgttgagttgtaattgttctttatatattctacatagaagtccctcatcagatagatacatgatttgaagatattttctctcatttggaggattgccttttcactttcttgatagtgttctttgaagcacaaaagttttcattttgatgtagtccaatttatcttttttttttttttttgagacagtctcgctgtgtcaccaggctggagtgtagtgctgtgatcttggctcactgcatcctccgcctcctgagttcaagtgattctcctacctcagcctcccaagtagctgggactacaggcacctgccaccacacccagctaattttttgtttttagtagagacggggtttcaccatgttggccaggatggtctccatctcttgacctcataatccgcccrcctcggcctcccaaagtgctgggattacaggtgtgagccactgcacccggcctgtaatttatatattgttttagtttgttgctagtgcttttggtttcatatctaagaatccattgtcaatccagagtcatgttgccccagcaccatgttgaaaactgctcttcctccattgagtggacttggcacccttctaaaaatcatttgaggctcctggcggcctcggaggtgtgaattgcaaacataagggtgacaccaagttttggcatctccccttcctggtcgagtggctgtggacaggtcattttcccttgaagtctgtattttgtcatttgtaacttggggataatacttgtgtgttgcatcacatgaggtcatgaaagtgagatcacattgaaagtaaacctcaagatactcgaccggcatcagtcctggctccctctgtccctcagacgtgagcatcccctgcctgggtatctttgtccccacctggacactttgggtggtaggaaggtctggggtccctggcggcttcgaagcccgtgaaccagaattccctggaaggaatggggagcagggtggctcccagggtccccagcactctttggaactcaggacagcatctccatgcccacatgcccccaaaacccaaggcaggctagtgctggctctaggcccgttcttacatggttggtgcgagcatttcttactttagaacaaacccactggagtggaatattcccagcatcaaggggaggtaaacaaaggaccctctgggacccactcgccagctcttgtttaagaggaaaacatgttttgctcccctcgttgtgggcttggtacctttcacgtctgccctccaaggaaggctgctgggagccctcacggtgaggaatgatgtttggggtctgaggctrgggtggtccctagactgctaaaccacccggtgctggccagggaccagctgtcaggagctgctgaggatgggtcagccccagagggtgggggtgccgacattgcctctggccctgcctctgcgtcaccagtacgagcttgagcttctgcgactcatgagcatggacctggtgggctgagcttcagctgtgaggggtcaggcctgctgcagggagagccagctgcagccagtgccctgcgctgtgcccacagtccctgagaccccaggctgaggagagcagcactgagcccaacctgraacgggctcacggctactggagctgggtgtgtgctcactggtgtggatgtgcagagccgggactcgctctgcaagcaggctggtcccacaaccttgagcacccgctacagggaggctgtgagaaggtccctggcccctaggaagctccctcagtggagatgttttggctgctttaataacagtcatccttccaaagcccttcacagcaataaatgtttccatattccagatgaggtttgcagggacctgtcctctctatcagtgtccacctggcgcctcccccgagtccggcctgcccttgcttctcccagagctcatggtgtttttcagggccgcaggctggcagggtgtccttctcccaggggactgagcctagggagagccaagtggaggtgcccaagtggaggagaaaggaaaggaccacagagaggggaggggaagtgggagagtcatggttaggacctcaggctgaggccttctgccaagccaggggtctggtgtcactcaactgggaaacactgtcagcacccaaagctgctctcagaggtgggggtgacgggaccactgcatgtgggaggcacacgggccctgtggcatccacagctgtggtctccttagtgtcctgtcacagacttgcaaatcaaagcccagagaggcggcagccagccaccctcccacctccccagcactcctgtgcccaccccatgcctgtttagcctctgcccttgctgcccccttcctctgctgtgtccttttggcaagaggaaggtacctcggggcagatttgggtggtccttgtgagacccagggcagagtgtggtccggggatayggcttctgtccagctccctgccagacagctgtctgatcctaagcacagaccagcctctcgggggttttgttcrgccaggaggtgggctgaggggcaagtgtgtggaacatgcaggaacaggctgtgcagtggccctcagtagtggggggctggggacttctgggagactcctttgctcccattcgccatccatcccctttccctgatcagtgggccctggctctggacactgagtggagcagacagtcctcctgcccctataggttccacctcctgactggcactgtggcatcagcatggtccagcccgtgctgtcctgtcaaggaccacctccacagccagtggccccttcctccatctcagagacagagagacgctgggcacaaaagccctgttgaaagttcactttgaagggaagcccatggggtcatggcgacaacacttgttmtggaaaggccctggcgcctccagcagctcccttgagrttcaggtgactggagcatccactgggtgccagcagtgctgctgggaggagcagggcacagacaggggccaaagctttctgaggattctccatctatagctggaaaagtcattcctctcactgcctcccctcctcgtagcgagaaccctctgcccacagtggagattgccatccggaacacgggcgatgcggaccagtggtgcccactgctggagactctgacagacgctgagatggagaagaagatccgcgaccaggacaggaacacgaggtacccctggccctgtggtcctgggctctgcccacaggcacctggctttccaggcagaggcagggccattgcctttcccagtctcccatggtctctgagacagagtacctctagtgctgctagaggcaggcaggcttctgggtgataaggccccatccaaacgccagggtatgtttccctgcatggaacaaacataattcctcaggctgagggtctgaccacagcccagatccaggttttggggtccctggagtgatgagcagggcctgagtggcagacaggcgaggctgagagaaggctgggtctgaccctgctgggggcccacatcctgcctctgttcccacccctacacttggctgccctgtagagccttgggaagggcagcgcccaggctggragctggcccygactcattgccctccccactcctcttccaggcggatgaggcgtcttgccaacacggccccggcctggtaaccagcccatcagcacacggctcccacggagcatctcagaagattgggccgcctctcctccatcttctggcaaggacagaggcgaggggacagcccagcgccatcctgaggatcgggtgggggtggagtgggggcttccaggtggcccttcccggcacacattccatttgttgagccccagtcctgccccccaccccaccctccctacccctccccagtctctggggtcaggaagaaaccttattttaggttgtgttttgtttttgtataggagccccaggcagggctagtaacagtttttaaataaaaggcaacaggtcatgttcaatttcttcaacaggtcatgttcaatttcttcaaagttttaacataaaaataatgagagccaggagtggggccggggcctggggggacgaaggtggtatgtgaacaaggttggcacacaggcctcaccctcctctgcctcagattcccaagtgggcaggtgggggtgaatggggctccgggtagcacctcagctcctctcagctcccctcagcctgttctccttccagacccagagagctgagaagagtagctgtgaggctcagggcagaggctctctgcctttcaggaacagccctaaccctgctccccttgcttggcctcaggaaggtgccgcgagctctcctgccgtccctgggccgccctggctctgctgtgtccagatggtcaggctactgccagctggggccttgctgctctgaagtcccctgcggagggcccagtcctgtgtgggcactgctgggctgtcgccagcctgggtgcaggagggctgttctagctccagtggcacccatagccaggtcagctggggccctttcccaccccagcaggtgctgtggcctgggccagctcctgccttacaagccagctgtgaggaatatgggaatagccctcccggcctggtgccagctcttggagttgacacggtacagggaggagacacagcccagggtcccttcccagccctgcctccaaggagttcatgtcccctctgttctcatctgtaatagggaggtgtccccattcttcagaatggacacaggatctgggagggcagcaaactggctcgcagctccagccttactgaagagaatgggcccagatccgggcacagatcccagcacagactgctgccaccctcagctgttggcaggtcccatgctgccagggcagggctagggtcagaggctgctgtgctccctggaagtggggtagggccccatgtggggcagaggcagagctctgattagggattggggttcttggtcgctgagatgtgagaggagggctcctttgagcacatgttagcatgggactcttcccagggagtttgcactcagggcctctgccctccatcaaagagtggaactccccagagccccatgcacagcaaggggacagctgggccttactggaaggccttgaacaaaggggaagattcccagcccagctgctcttagacatgaacaggtttcattgctgaggtgtttgttctgtccatgaggtaggaacctcggcaatgaaagggtgaggcagccctgtgtctccacaactggggggatggaaggaaccttggctgcctcaccccacaggtcgggcagggccacctggctgggaggtgccgggaaggctgggccctcactcctgaccgccagctcacaccgccgcaaagccatctccacaaggtctggctacaacacggagggcagactcaacagagaacagtgttgttaccatgaaaatgacaacctgtctttggaggaggccccgtgccactgagcatccagaaataaaccacaacatggacaggcttagaacaacaaggaaagctgccaggtcagaagagaaaaatgagccacaggggtcagataaggctcacacacgtcctcagctaaaaagggcaggaacagaaccttccagaagtccctgcctcacccagtctcagaactctgctaaggtgaaaacttaggctctgaggtcatagaaagggcagaagacctagtcctggccctcttctgcacctgaatccatggggctttggcatcaccagatgaaaaatgaggcatacgcccacctgtcagggtggctgatgagagacaggagaggctagattggcatcagcctgaaggcaccactggcaggaacatctgtaggctggtttggcacaacctaggagaggcctgtcctggccccagcagccgaaatctggtgaacttccccgctgactggcaggtagcagaggcctatggtgggcaggacttgcccaaggccctggtggggccaggatgagaaccctgagcctgtcacctgtgagctcaaaagctctgcctggcaacctgtgagctcaaagctctgccaggcaaccatgggcagtttctttgccctctgtgggcacccctatcctaccacctgcagttgggctgagaggccacactgagtgaggacggggcaggcatagaaggatgtggccaggtgagatggggaagccagtgctgtgggccaagagactgcagctcattctgtttattcaggtgggcccttgcatgggcccagcctttaggatgggttttttctgccccaagtaggggtcatgggtaggatggaagctgccagaagcctcttaggcctggccctgggtgggggtcactgctgcgggggtggcagatggggtcctggctgttcctcagggaggggcaggtaattggggtcttctgcaggggcatccaggagcagctttctgtggggaggggcccgtgttgagcacaggccagcacaggtccccatcggtggggatccttctgagggtggggagagggagggagggctctcaacactcacaggaagccaggggtctgcaggagcctcttgcctccaggctggttggggaagacgtcctccaggaagtagtagatatggcccaccgcaatccctgtgagacagccacggactgtggggtcaccctccacagcccagagtcctagaccagcagagcctgccccaggcccccatccacagcctggtggccctgcaggccccacagcatgagtgccccaaagccttgcacagagtgccagccccgggttggccgtgaaggacaagcttaaaaggcccagaagcaggcaggacccagggaggggagggcctgagaatagtggaggagtgggagccatggggcaggaaccctgaccctcccatcctcactcccatcaggaccgtgcaagcatcagtagatccgtcctgacgatgcaaattatgtgggccggctggcttgaggggctgtaagagcacagcagctgggagggcaggaagatcgggatggagccaggtgtgaggagaactccagcaaggatgggagaggggccccagggcataagcagcgtgtcctgaggggagtggccagcctggggcggactagatgtaccgggaggctcacccagcaggtccacgaggatggagttgcccagcagcagcgagaagcccatgagcgcccaaggcaggaacggtgcctggaaagtgagcaggccgaagaagttgaccctcacccgagggctgcggcggctccacacgtacaccagcatggccatgagggcctggcccaggaagaacaggctgcccaggagtcccagcagctgggccagagtcaaggtgctccggtgcaggcctcagcccaagcccagggcccctctgacttcccaagaccctggaattcttccctcatctcccctatgtgctattccctcatcaagatgagccagtccaataaaggcgacacactccacgggcttcaggtcccacgaaatctgccctgcacacctacagcctcatcccagggcccaaccactgcctgtccctgccccagtttctcccggctactcgcattcagggctcagctagtggccctgacaacccacctggctcttttgtgcatggctttgtattttgcatacagcactgaagatctagccctgacccctgcagctgagcacagagtgggccctcaacacatactaagctggagacagcgactgtgtccctctctggcatggctgtgttggccccaggaccaacacaggctggacgccgaggcgccctagcccgaggttccagagcctgcgggaaggatacggtcataaggacgcccccgaagagaaacatgaagacgaagtcggccgtgcggccgcggaaggagccctcttccagcatgcggcagtagcggaacctacggcgtcggtataggaagtgccaccaggcggggcctcagtttccccgtcccggcctctctcccagcccggccggcctgccctccacccagcccgtgtccgcagggcgcaggatacacgaagagcatgttgaagaagaagctgaatcccaggggcccgaagaagaggaagttggtgacgagcctccagacctacgggggacgggcggtcaggtgcggggtgggtgggtcgggcccacaggtgcgcggcgcggggcggcctcacctggaacttccggaacacaaggtgcgggttgaagtagagttgaaaggggctgaggagctccagctgctgtggaaccaggggccagtcaagagctgcccgggagccacgccgtaaccatggcgaccctcacccctcccgccagaggctgtaaccaaggcgacgtccggtccgcccggccgcttaccaccgcggcggtggtgaggacacaggctgcggtgtaagcccgcgtcaccgccggcacctgcaggaactcggccgctagtccctgccacgccattgaaccttctcaagcacgcgtggcccagccagcaacgcgctctttaacccgcctcccagccccgccttcggccaatccgcatccgaggcgctgcgcgccccaggctgaaaagagagcccctgagcccgacagccaatggaaggaagaagagggaaattaggggcggaaagggagagtgggcgggtagaggctggtggccaatgggcaggcgccaaggttgagcacgtggcggttgttgtggctgcggtggtggcgcgggagaacgtgtggccaatgaggaactggtcatttcgcggctttctaggagaggaccagtagcgtggacccacgacaccacgggggcggggctaagatcgtatgggttacaggagcgaagacccgagcaggcgaggcaaaactggaaagggcggggcgcgtgggcggggcgcggagtgtggcggctcagaccgtgctggctcactaactgacgacctagccgcaacgttgtcctcgctgccagcccaagacaggcccacctaacccacagcagggaggcattcgggaatgtgtccaaacctccccaaacgtccagggccccactcaaatgtgccggccgctgtcggggttcttccccgggggcccaaggaaggagaggcaggactgcgggattgagtccaggtggggcgcgagggttgagaggcgcaccagagcaagtggacaggcaggagaggtcctcaatattttggtggaaaatagaaaccaacctacccaccttccttccctccttccctccctccctccctcccttccttccttccaccgtttattaaacaactgtttgcctgacactgttctagatgttggggatgtagcatgcaataaaagacactgtctcttagagtccagccaggaggcagtcaatacaataagctagtgctgacacttgatgagaatattgccaagtgaggggtggggccacgtgggcgtccgcagtgccaggtggggtgacctgggatacctctgggaagatgtaaagtttgtcactttgcaagcatccctgtgtccatcaggatggtaactgtgaaaagcaaaacaataaaacaaaataagtgttggcgaggatatggggaaattggaacccttgggcaccgttggtgggaatataaaatggtgcatccgctgtgaaaaacaatatgatcatgactcaaaaaattaaaaatagaattaccgtatgatccagcaatgctgcttgtgggtacacattcaaaagaatcaaaagcagggacttgaacagatgttcatacacccatgttcatggccccattattcacaatggttcacatcagttcacccaccgatgagacagacgaaatgtgctgtctacatgcaatgcaataccattcaaccttaaaggaatgaaattcggatacatgatgcagcatggatgacccttgaagacattacacccagtaacataaaccagtcacaaggctgggcgcagtggctcacacctgtaatcccagcactttgggaggccgaggcgggtggatcacctgaggtcaggagttcgagaccagcctggccaacatggtgaaacctcgtctctactaaaaatacaaaaattagctgggcgtggtggcgggcacctgtaatcctggctattcgggaggctgaggcaggagaattgcttgaatccgggagatggaggttgtggtgagccgagattgcaccactgcactccagcctgggcaacagagtgagactccgtctcaaaaaaaaaaaaccagtcacaaaaagacaaatactgtatggttccacttatatgagaggggatcagggagttattgtttaatgagtgcagttccagtttgggaaaatgaaaaagttctggagatggatggtggggagggttgcataagaatgtttaataccactgaactgaacacttgaaaatagtttggacaaattttatg

SEQ ID NO: 5776 - DNA, 14963 bp, Homo sapiens
cagtgattcctgactctgtcccaagtcctaggaaccaagaggggctgggaaggaggcaagactccagactgagatgccccccattcactctaccccacccatcccatccctttctgctcccatagccagcacaggacaaggctgccctgagcagagccagagtggctggacagagggtcccagcctggccaggcctgcctcctcaccaggccagtcctgagactcctgcctgtcacaccctcctgctcccttccctgcccgagctgtctggatgcctccgctgtggagtggagtggcccaggctctggccccaggccctgtgactggtgcctggaagcgccccagggaaggggcagcttttgggacacatgcaagctgtcacacacactccatgacagtccctcctctcctcactctgctgtcctctcttacctgggctttcttctcctctcctgagcacacattttctccctttcctttctctccccgcttctttctgacagccacctctcagtcacacacacactgcactcatactatttcatactcatgttctcctggctccaagcctcccaaaactgctgccggcaggtgcccgcgggggacatctccaggcttagaccccatttcccgcagcacagcgctgccctcccttctccctttatccttcatcccaccgcacacctggaggtgtactaactgcggccacacacctgcaggctgacacctgcctgggatctgctcggctttgtccctacgatgaatagggggccctgttaccactccctctgctgcttccttcaacgcacactccagcacccgcggctggagcgcgagaggcaggtccccacgctgggagcaagcgtgagtccagcgtggagtcccgtcccaccagcccgaacgatgccggcgccggctccccttcacacccccagggactgcaagctcgctgtctatcacgcctagagggaaccagaaagcgtttcgggtaccgggcgctggaggccacccggggcgcccccttcggtccggatccgccgctgggcccagcccgcgtgcccggcgccccctcagcgaggagcggccggcgagtggcgggcactcaccggcggcagagcccgggccagcagcggcggcggctggagcagcagcagcagcatcgggggcaggagggcgcgcgcggccgcgctgcggagccaggcggccggagccatccgccccggggctgctgggcttgctgggccgctccgggccgccgccccttatagcttccgccccacccccggcccgcctcggccccgccccccgccgccttttgttctgaactctcctagcagccgcggcccgggtgggggaggtgaacggggagggtacggcccagcggggtcgagggccggagacagggtcctgccccggggctggcaaagtccctatctggtgctgggtgaccctggccaacccgtgccgctctgggtctcagtttctcctctgggtggtggccgtccaaagtcttagacttggctagagtctgagaggagtcaggtttcatgggtcccatccgtacccccacctttggaaggcgcatcccactgggtctccttggtggcctgacctctgacctctgacaggtggtcctacccacaagcaagttcccccacccctcagagcctcaacggatccttctagaagatgacacaatagcccctgtgaggaaagggatattattttattttttattattattattttttgagacacagtctcactctgtctcccaggcaggagtgcagtggtgtgatctccactcactgcaacctccgcctcccaggttcaaacgattctgctacctcagcctcccaagtagctgggaccacagacgtgcgccaccatgcctggctaatttttgtatttttagtagagatggggtttcaccatgttggccaggctggtctcgaactcctgacctcaagtgatctgcccaccttggcctcccaaagtgctgggattacatggggaagccattgcacctggccaggaaagggatattaaaatgtgtcccaggggaaagtgaggcatatggcagggactggccagttcttcagcttgggatagaccgaagtttacagatagggaaactgaggctccaagagggagggtccaggcttttccacaccagcagacaagtggaggggtcaggaggtcctctagctggtcagctgtgggaaggatgctgtcagaaggctgtgggaggtgtctgagtggagtactgggcccccagggtgtcccctcgtcagtgcccaacaagcccctggggacccctccaggctagccacctcagacttgaaagaaaggaggcgagaggccgggcgcagtggctcatgcctgtaatcccagcactttgggaggccgaggcaggtggatcacgaggtcaggagttggagagcagcctgaccaacatggtgaaaccctgtctctactaaaaatacaaaaattagccaggtgtggtggcacacacctgtaagcccagctactcaggaggctgaagcaggagaatcacttgaacccgggaggcggaggttgcagtgagccgagattgttccattgcactccagcctgggtgacagagcgagactccatctcaaaaaaaagaaggaaaggaggtgagactcaaaggaggggttgtgtccacattctggaagggatccttcagtctcatccctgattttcagggttacccagtactgctgtacaccccctgaaatgatgaagggcctcaccacctcaccaggcgacctgttccatcatgggtggccctgcagagccacgatccaggcagtggctcgcatcctggcaggcagggctctgagctgctcaaaggtgaggctgtggtcaggaagcctgggccaagaaagggaagcgggtggggaaatgtttcacagcttattcaagaagactccacagagactcctagagggcgaggagaagtaagacagcagtaatttttacaacctacactgttcgtaatcttttcttttcttttttttttttttgagacggagtctctctctgtcgcccaggctggagtgcagtgacgcgatctcggctcactgcaagctccgcctcccaggttcatgccattctcctgcctcagtctcccgagtagctgggactacaggcgcccgccaccatgcccagctaattttttatatttttagtagagatggggtttcaccgtgttggccaggctggtcttgaactcctgacctcaggtgatccacccgcctcggcctcccaaagtgctgggattacaggcgtgagccaccgcgcctgaaaggcaatcttttctttaaagtcactcacttttatttacctttattattttgagacagggtcttgctcaatggtgtgatcttggctcactgcaacctccgccttccaggctcaaacgatcctcctgcctcagcctcccaagtagctgggactaccggtgtgcatcactatgccctgctaatttttgtattttttgtagagacagggtttcaccatgttggccaggctggtctcgaactcctggactcaagcaatctgcctgcctgggactcacaaagttctgggatatagacatgagccactattccccgctaaagtgactcatttttaaaaagtaggcatttcaggccaggcgtggtggctcatgcctgtaatcccagcactttgggaggctgaggcaggcggatcacaagagaccatcctggccaacatggtgaaaccctgtctctactaaaaatacaaaaaaaaattagctgggcatggtggcacgtgcctgtagtcccagctacttgggaagctgaagcaggagaatcacttgaacccgggaggtggaggttgcagtaagctgagatcacaccaccgcactccagcctggcaacagagtgagactctgtttaaaaaaacaaaaacaaaaacaaaaaaacaacaaaaaacaaacaattagcggggcatggtggcatgtgcctgtggtcccagatactcgggaggctgaggcaagagaatcgcttgaacccaggaggcagaagttgcagtgagtggagatcataccactgcactccagcctgagcgacagagcaagactccgtttcaaaaaaaaaaaaaaaaaaagttggcatttcaatgcctgcttcagtgtcatcctttcagcctcattttcatttgtgtaacccacttaagtggtcttgggtgcctccgaggtgcaaggccatgctttgtggaacctgcagtccatcagccatgggagctgaagtaacaactctctgcagtttaggcccggggaccaccatgagaagtgttcagtttgtttggtgtggcaaacaggaaccaggtggcatggactgcatgaacaagggagtagcggctggaccaggcctggtgagtctgccaggaaagaatggcccacccttggtgtgctcacctcactgggaggccaccctcaaggtgggtggtcaccccccttcagagaggagaaactgaagacagggcggggaagggccctgttcacaggctggctgaaaggactgcagtgtgagagaacacagggctgcacctgacttccatggagagcatgcatggctggggacagctgtgcacacacagaattgagcatgccaggcagggccaaacgccccagccaccactccccttgccccttgacctgctccttccttatggaggggcctcctctcttacttggtgacccacacccccacttctgggtgcttttgctcttggttgcaccctgccgacaatcccggtgtcaggagtcctctgcaggcacagcagtgatgagggacagtccctaccttcccccacctaggagtaataatatgaccactgcaaagtcacccagaaaagaccataaaaacctcaagctcagccgggcgcgatggctcatgcttgtaatcccagcactttgggaggctgaggtaggaggatcatgagctcaggagttggagaccagtttggccaacatggtgaaaccccgtctctactaaaaatacaaaaattagccaggtgtggtggcacgagcctgtagtcccagctactcaggaggctgaggcaggagaattgcttgaatccgggaggtggaggttgcagtgagccgagatcgccactgcactccaacctgggcgacagagcaaggctccgtgtcaaaaaaaaaaaaagtaaaaattaaaattaaaacctcaagttctcgaagagcaggaaagcattctaaatccgcgctccagctcacctggcctggaacgaagctgctaaaattgcgaggccgcaggcttcaaacttgcgctagatttgaccgagccgggcaaatgctcctaggcctttgggatagacacgctgctcggatgtcgcgtaaaggccgttagtgtcgggggttgcactcgcggggccagggactaggtgggggcggtcgggccggcccggggaatccggtggggttcagggccgcgcggggggcctcatatcccccgcgggcactgcgtaaggctgccagcattggcagcgcattttggccaacagtcgaagacgggttgggacgccccctcgtgggagttctggggatgggttgctccaggccttccccagggccgcgcttcacttccctaggccaccggagactcccaggccacgcggtggtcagcagaccctgtctggagggaggggacagacagccgagtccgggagggggcagagagcggagtccagcctggagcctcgcgtccccttcccagctggccccatcccgtcgcctccccgtctcctctcccctccagggctcgcaacaacccccaactccgctccctgccctctgcggtggtcctaacagaaggcactgtcgccctccttaagccctcggcgctttgcgacactggcccctgtccccagaacccgcacagcctgccaggcgcagggagggagcagggtcccatttccagccgagacccggagctgctggaagggagatgtccggaggacgggagaagggggatagggttgggggcagtgccgcctcccgctgggggcgtgttcctgaggccccgcccggggccccgccttttttgcgccggctgtgacaagcgctgcggcatttgtccccgcgacagcaccgctgccgccgtctctaaggtcgcccgggtcccaccgccgccaccatgcctcggggaagccgcagcgcggcctcccggccagccaggtgtgagggggacaagggccctgtggggagggggttagggaagtgtgggcactcccctaagggcgtccgcagagtgaccttggctgctgctgcgccatcttggcggggggaggggtgggggtgcagcacccacgtgtggagacgtgggtcgtccatctctccgggggtcgtttccaggagctgcagccctccagcctggggtctggccaggattaaccctgcttcctcccacccccgcagccgcccmgccgcgccctctgcccacccgcccgcgcacccaccgccctcggcagccgccccagcccccgccccttcgggccagccggggctcatggctcagatggcgaccacggccgcaggggtagccgtgggctcggctgtgggacacgtcatgggcagcgccctgaccggagccttcagcggggggagctcggagccctcccagcctgctgtccagcaggtgagcagcgrgtccaagagaaactgaggcaggattatctcgaggccacacagggagctgcccaagtgtccagtgaggagtgtccgcgtgtattcaccrttgcttcagcccaggactctgcccgggaagggtcctagtccactggtcttgagttcactgtcacttagaggcaggcttcccggcctctcccttgaggccagggtccctaagctcccagggagagacaccaaccagccctttaaagatgggaaacccaggccctgagggctcagagactcgcccaaggtcacctcaccctagcagaggggagggatgttggatttcctgagcccctgttctccccacacccaggtctgggcactgtggccgctgggcgcaagggcgaaggggagccacttccctgatgacctttcccctgctaggaaccccaccgccgtaagccaaatgtggctttgtggctaggtcaggggtcatgaggattagtgtagctgagccaggaaggtgctagaacttgtgggggtggggctcatactctgagagtacaggcagagtactgggctttcctagagccttctcctccctcycctgcacccgcccaaagtgcccattagaaggcagcagaggccaggcgcagtggctcatgcctgtaatcccagcactttgggaggccaaggcgggtggatcatgagttcaggagttcgataccagcctggccaacatagtgaaaccccctctctactaaaaatacaaaaaatttgttgggcatggtggcgggcgcctgtagccccagctacttgggaggccraggcaggacaaccacttgaacccgggaggcggaggttgcagtgagccgagactgcgccgctgcactccactctaggtgacagagtgagactctgtctcaaaaaaaaaaaaaaaaaaggcagcagaaacatgctgtctgtagccgcctctgctgctggatcactcagcctgcctaggacccttgggacacccaggctggggatgtggggaggggcaggtggccccaggtttgaaacgcacctccaggtgccaactccaagctgatcctgcagcctcttgcactgtacccccaggcccccacccccgctgccccccagcccctgcagatggggccctgcgcctaygagatcaggcagttcctggactgttccaccactcagagtgacctgtccctgtgtgagggcttcagcgaggccctgaagcagtgcaagtactaccatggtgagtgagtggaccccgactcaggcsgggagggggagaggccaaccctcctcttgcacctgcaggctgaccaccagcctgtgctgcccctcccttcccaggtctgagctccctgccctgaagaggtcggtgcagactcgggggccagtcctgcacccacctctacccctcgccgacagccagaccacaacaccagattgtacccagatagctgggattggaagtgaggaggtttctcaccccacagataacccaagacacaaatgtgcaattaaaagtttattttagaccacagcctgttgtgtgcctctctcgatggcctgtcttcagggagctccctggctgatgaggtggggtcaggatggatgtctcactacagtrtgcaatccatccccttaatcagggccctgggtggggaggaggagccctgttgcaatctgcactgtgggtagcacaggacagattccttgggcagtccaragtgaggtggagaggcattagtcggtgatcccaagggcatctgactctgagggtggaatcccaggatgaacccatggtctcccccttatcagggatacctgccacctctacccttcttgtctctacctctgcatcccattctctgcacccacagcttaggtgcccctggcggcctcaaatcctgtctgaccttgcccctcttgctgatgcaacttctcagcaattccagattctgcaagaggagtcctgctgggttgttgtctgtttgcacctgatcacacaaggcagaggtcatggctaacccccttgggtctgagtccaacttggctagttggcagtagtgtgccaggtccccaagcctgccagaatggaagaacaagcccttcaaacccagtgtgggccgtgccatcacacaccatgctgccgccttcattgagttcatccagcagttgtgcactgagctcctactgtgtgccagcccctatgccacatctgtgaagcctgaggacattccggcccttagtgcgctggcactcccgtggggtggtggggacctgtctcagggtacagtgtgttccatctgggggtatatgtgcgtggagttggtgttgagggtctgcccctcatcatatgtgtctgtcctgcaggaagggatcccactctgggtgtctctgtggatgtccaaatctgctctgtacctggctccctgccccagctagcaactcctgggtggcagggagctcacctttctgggccttgaagtggggctttgctcatggcggcctcgccgagtgcccatacgcttcctccagttgtggcccacagaggagaggcctgacagcctgcgcagttcctctggaaggcccaggaagtcctgttggtaggggttagggagaaggtgtgccctccccctgggctgtaccctgacactcacctgccagctctgggtaatggtcatccaggttctccaatagggactcatagcgggtggaggccatgtcctctccctctgtgacatgtggagagacgatgaaggacacctgactggcctaatggtccctactctgcctctcactctggaactgtttgctagtccaggctgggagcagagcattgggtagggatggattggggctaggtccccagccgaggtgggaggctggacagggccttgggtggtctatggtctgctatgcccccctcttacattctaccatagctgcaggggagagaaccttgggccaccttactgatgatccgaacgaggacatatatggctcgctccttcagtagggagttgcccatggtctgggcccgggaagccccttccttcaggtcctcctccaggctcactaggttgccatcctcagccaggagagcaatggtcgctgggaggacatggagagagactgggcagggctggcacccctgcctgggacccctcagcccctccttctcctccctgtctcctcaccatctgggggcaaccctgctttctgcctcaggtgggcggtgaggttcaccagcctgcaagaggtgttcaccagcaccgagcagccagctgtggagaggggcaaaggtgagcctgtgagatctcttaccttcctccaaatcggggtcctctgtctctccctcccatctctccctttcccagagctgcgactgggcctatgggctaagactgtgccccgggcataacagctccaacatctgttgcttaaactgccttggagaaccctccatccatctcccatgtgtggtgacttttctcccatgtgtggtgactcccaagtgttggtctcttgagtcctgcaaagcacgaagtgcgcgccagcccagcctcctcccgggacccgcccccacgggacccagccagtccccgccctccgcacccaccggctcctctcttcccttccgctaccgcacagggccgacccgcctccagccagaggcacggggaccctgcaactgtggctagagtttcaggtgtctgatgcacgctgaagcttgaggatcacggattgaatggcgaagagattgtgcggcttaaaaacctgctccagggtaatgcggcggtctctggccgagaggaacccttgtgaatgagcaggactcagctcgggttttccctttaagggactcgctccaggtgctggcttcgcctcctcacagagccgcttccccgacgacccccgccatgtgcaccacccccctttcccgccattgcctccccacccaccgcaagggcggaaggaagcacgcctctgagtgtgctcatccccctatccgcctaccaagacaggggaccccacttacccccaaacatcaccttgataaacatagctgcagcgggtgagggagatgtggggggctttgatcccccaactctcgattccccaactaaggaaaagcgtggagcagagacctgcttcagggccgggctctggagggagaagtggatgtgtgagtgtggatggctgggtcccagggccaggcccctgctcagccacctctgtggttctgctgcttcagcctagctcaaaccctgcagctagtccaagactcctggcctcctcttcctccccactgagccctgggccacagcagctcccctaagcttccaagctggtctccatggcagtgggggcggagacatctaggcaggaaatgccttcctccctgtatccgttaacggggcccatgggggagaggtgacagaagaagtgggggctggcattccctgaggcggggaatgccatcattgggattgattttttttagagacagtctccctatgttgcccaggctggtctcgaacttggctcaagcaattctccagccccagcctcccacaagtgctgggattgcagttgtgaaccacttgtacagtaaagttcaccctttctggtgttttaaagttatgccaactctcatataaccaccaccacagtcaagatacagaacatttccatcacccccaaattcctttgccccctttgtactcagccctagtcgcttccaggtccatagcaggtcacaagcacctccttgttagcactggccactagctagtccctcacaccggttctcaccgtcatttcctgtcttttatttatttatttattaagtttattaattattattattattggtgttttttaaatttttattttttgagatggagtctccctgtcacccaggctagaatgcagtggtacgatctcggctcactgcaacctccgcctcccgagttcaagcgattctcctgcctcagcctcccaagtaactgggactacaggtgtgcaccactacacctggctagttttttttttttttttttttttttttgagacggagtctcgctccctcgcccaggctggagtgcagtggtgtgacctcggctcactgcaagctccgcctcccgggttcacgcctttctcctgcctcagcctcctgagtagctgggactacagtcgctcgccaccacgcccagctaattttttttgtatttttagtacagacggggtttcaccatgttagccaggacggtctcaatctcctgacctcgtgatctgcccgcctcggcctcccaaagtgctgggattacaggattacaggcgtgagccactgcgcccggcctttttttgtatttttaatagagatggagtttcaccatattggtcagattggtctcgaactcctgacctcaaatgatccgcccatcttggcctcccaaagtgctgagccaccaagcctgacctatttatttttttttgagaatgagtctcgctctgtcagccatgctgcagtgcagtggcgcaatctcggctcactgcaacctccgcctctcgggttcaagcgattctcctgcctcagcctccggagtagctggtattacaggcgccagccaccacccctggctaattttttgtatttttagtagacataaggaaggccaggctggtctcgaactcctgacctcaggtgatccacctgcctgagcttctcaaagtgctgtgattataggaatgagccactgtgcccggccatttcggccatttcgtgtcttttgtatttgtctgcttctcccagtctctccccttcttgttcccctcctctccgtcttccttttctgtctaggcttcacattctctctcccctcccctcctctcccctcccctcccctccctcctttcccttttttcctttctcttcctccctccctctctccctccctcccttccttccttcctttctttttttgacagagttttgctcttgttgcccaggctggagtacaatggtgcaatctcagctcaccgcaacctccgcctcctgggttcaagcgattctcctgccccagcgtcccaagtagctgggattacaggcatgtgccaccacacctggctaattttgtatttttagtagagacagggtttctccatgttggccaggctggtctcgaactcctgacctcaggtgatctgccccccctcggcctcccaaagtgctgggattacaggcgtgagccactgcgcccggctggctggcttgctttctcgctcttttgctctttcgctcttttgcccttccttccttccttccctccttccttccttccttccttttctctctttctttttcttttccttccttcctttcttcttttctttcttttctgttctctttttttttgaaacagggtcttactctgctgcccaggctgcagtgcagtggcacaatcacagctcactgcagctttggcctgccgggctcaagcaatcctcccacttcagcctcctgagtagctgggtctacaggtgcatgccaccatgcctgttgaaatttttttctttttaattttgtagagatggagtctcactatgttgcctagactggtcttgaactcttggggtcaagcaatcctcttaccttggcctcccaaagtgctgggattacaggtgcaagccactggtcccagcctcacattggtttttttgcctctccgtgttcatccttcctttgacttttgttctcatgtctcttttcattatcctttccctttccttcctgcttactgcctcccctctgtctctgtctctccacttctgtctcctgccctcaccccatgacccccaccagacctttccagccagggcaccaggtggatgcctggagcaacacctccctttccccagctcccttacccccaaggttttagaagtgcttccagcccccatgattcggctgtgtcctgccttttacaggcagagttctggacagtgagggtggaggaaatctgagtcttccatgaagcctgccattgtcagactccggctctggataagcactttcctttggactgccttggtgtttccatctgtaaaaggggggtatgacccgtgacttagcagggctgtggtgacgattaagtgtgataaattttaaagagctgtctctgtgctcagcaccgtgatggagcaagcactccaatcagtattgcagaaacaggtagcacttcccaagcttacttaaacatgagatggccaggcgcagtggctcatgcctgtaatcccaacactttgggaggctgaggatctgcccagcctgggcaacacagcaaggcctcatctctgtaaaaataaaaacattagctgggcgtggtggctcacacctgtagtcccagctcctcgggaggctgaggcgggaagatcacttgagcccagttcaaggcagaaattaattaaaatcacaccactacgcttcagcctgggtgacacggtgagaccttgactaaaaaaaaaagacaaaaaacagtgccctttttttaactcacagcctccagaattcccttggggaggctacatagccccttcccaggtaccactccattcttgacacctcctcagggtatctccatgacagtcaagatacagtctcttgattccctccttggtggcactgaagaggagatccttggatggcagatggtgactacaagagctgaggctccaggcctggagtggcctttccttccagattctggcttcaggcactggaggctccacacttaacagtctcctgagctgtgttctgtgggacgtggattcccagatatggttctgtcccgggaaaaagtgctccatgtttttttttttttttcttttttgagacagagtttcattcttgtcgcccaggctggagtgcaatggcacgatcttggctcactgcaacctccacctcccaggttcaagtgattctcctgcctcagcctcctgagtagctgggattacaggcgcccactaccatgcccagctaattttgtttgtatttttagtagagacagggtttcaccacattggccagggtggtctcgaactcctgaccttgtgatccgcccacctcagcctcccaaagtgctgggatcacaggcatgggccacctagccccgcccatgttttttttgtttgtttgtttttgttttgttttgttttgagacagagtctcactctgtcgcccaggttgtag

SEQ ID NO: 5777 - DNA, 27240 bp, Homo sapiens
agaatggctaacctcagagctaagccccagccacctttcttgggagagggccccctcaccggaagccggggtcgctcttccaggtaggctgagctgaccaaggggaggatgacagggtggatgtagaagaggaggtggtgactggggctggggcttcttgggcctgaaggttggggctcaggcacctgccaggccctgtactctgggtgccaagccttgggagggccatgtcaggggctgggggaacacagggagagcgattcggggagtggcttggggaacggctgggtgatcggggtggcttgggcagaggtgggggcacagtctggcctgagggggccccaggccggaaggtgggggacagaagtccaggggagtgagtgccaggctctgaaggaccctggcccacatccaagggcaaggtctggggtggccgtggcaaaacaggatcctcagggctgctgtggagggcctcaggccgggctcggaaggagggggagagccgagggtctggggaggtttggatgcagggtggggagcctgtaggaccagatgtctgagctggaggctggagatgcccctcagaagcagggagaggtctaggggctggggcatccctctttctagctgatgtctgtcccacagaggctgcgcctgatgccgtggatgctggagccagggcctgttcctgagttggagacagaactggactgggcaccggggaaggggtggaggggagttctgggggctgctcctcagaagccagggccaggctcaggccagaggctgccagtgttggcttgggtcccacggaggcaggtggctcctgcttctggtctctggaggttggggccagattgggccccagggtgactgggggagatcttggccctgctgaggcaggcatcaccagccccagggacgtcggagccagaactgagcctgtggtcgctgggggaggctttggtccagctgaggcagacatcaccagctggcccacagatgttggggccaggctggagctgcggtgggcagtagctgttttctgcccttcaggggtacacagtggagccaggattggtcggggagatgccagagccagcctcggtccttccgaggaagctgacatagctgcccgtggccctacaggtgccagagccaaccttggttccgagggtcctagggctgcgttcttctttgctgggagctgaaaacttgagtccaccttgtggaggacaagtcaaagattcagagtgaccctaaccagggcattgggccccaacttccatatagaccctggcagagttcatctagctaagaaaggcacatctttccaaggaagttcttcctactatctcacttcaatctattctgctgcaggtcaacttctgtcttggaggagataggacacaaaaccctaacccctcctttaagtctgaaacctctttcacagatggggaaactcagaccctgactcaaatgaggcagagtgtgaacctaaacctgaggacttgccttgccttcctggctggcacccacaccctgcccattcggggcagcttccctgggcaaccctcccactgcagtccctgaagctcccccagccacggctactgacctgacatcccaggtctgggcacactggggacagcctgtttcttttctttttctattgtcaagatacagacctacaggtgcagcttgttaaatacctctcccttccttcataatgcccagaaaccctcagttccccaccgccccctaaacatccaaatcccttggttacagccctctctgttctcttacccattcccagagctccactcaggagcaagagctgggagctgagactggctgtgtagattcaaagcccagctctgtgtgaccttaggcaagtacctctctgcccagcgcctcagtttctctgtctgtaaaatgaagggatggggtctagggttcctggccacattatattctggggaatcttcatctcccattgtctgcatttatgagcccaacatttgctagaattccatctagccccgttgaatagtccatcctcaccaagtgtgaatctagcattcagagcaagtccaggattctaagttgatcctggtgtcacatctctctgtgcccaggttgtgccctcttacatcctccactttctcccctacctgaaaggacaggcaagcaggtatcccatttatgtccggcaggtgggaggggtggggagtcacggagtcctgtagagacctatcctccttccccatctattctctctgatgtcccctgtctccagaagacaggataaagtgtccttcaccaaggagggcagaagaatgtctatacttgccccaggatggccctaggtagggtaacagggcgcagggaggccctgcctctggagacgcacttctgtttctgtcccgtatccttctcagttcagagtacctaaaactccatctccacctcccttctcaaactcagttctttgaggtggcattttaggcaccctccttggctccaagtgtcacactgtgtgccggcttccccccaactatcacaccgcctccagtactaacaacttagccatcccagatgtcacagttttagtcttcagcgacaagccccctcattttgcattggctcagagaggaaaagcaacttggccaaggtcacacagcaaaggtggagcacagctgggtcctctgatacccagtccaggactctcccaagggctcctggagatggctaacttcatctgtctccgggcatcctgtcactgcccctcagcccccagggtgctctcttcacctagcccctgctcgctgagcagaggaaagtaccagcccctcagtcaggagcaccagggagcctgcagtgtatgtggggggggtgtgtggaaccagggatcaggaaagcggggggcactgggtctcaggggtcttaccttggagggtgccccagtttgggcaacaccctggggcatgggcagggaacccaggccagcccgggtccctggcctcctgctgcccctgctgctctggccctccatgtctgcagcccccggcagcctggactcccttggctccggctccagctctaccgctcccgggaaccagtgatgtcatcagccatttcaacctgctgagaatttaaaggcacaggctcccacttcccagcctggaagaggccgaagcaaggtggctaccccctgggaatccttcaaacaggctgctgaggctggaacagccatggagtggggaggggagagtgtacccatctgcctggcccaggtcccaactggcagcaggaaggaggctgtctgtctaccttcacctttctgccgtaggcctggtcagccctttgctccagggaggggcattaacacacctgccttaaggtaggacaggtggttcagaggtctgcaccctctccagggcctcagagacaactgagttcttgccctgatcctgtgaccttcctggctccctgccagctcagagcttgccccggcccccacccttgccccattttcaggtcttggtgccaccctctccactcctactgccagtcccaggctctattcttcccaacccagaaccagacactcaggctccagccactgcagtcttttcccatctcaggcctcagcaccagcccctcctcttctgcagacacctagctgccctcagatgtccccacagccaggcctaacccagcccggcttctgtcagctttcttctctccagtattcactgggtgtggtttgggaggggaacttgctcaaggtcacctggtgaactgagaaggtctcctgtgtttcagtgagaaaacttagtgacctaggatgagcacaagcccttcgagctatctgggggaagggaacttgggtggagaagggcccagcagtggggtaacagactgacaagagagttacaaacaggcctgagaattgctacagccaggacccagcccaggacatggtccccaacaggcctacgggagtgtttgttgaatgaataaatgaattagaagagtgaatgggtgatgagggtcagattgggctgggatggctgtgggatctgtttctcatggcttagagaggagtgatcccacccactttaggcagaaagtgttcagagttgtgtgtgcagagctccctgttaaccaacatggagcatctgcatgggcctgtgcagtctcctacatgaaggcagatgcctcactttcctctcctgaaggcacttcctacctctgcttgactgtcagtaggtctagtctgtattctcaggccagcatctctgctggaatttgcaggggcagagactcaggccatattagagtgttggggtagaaaggtctttggacagcgatagtggagatggtgacagtggtgacggggaaggcgactgtggtgatggatgtgatgatgtatgtaactgtgatgatggaagtagggggctagcagtggttgtggtgaaggtggtggaggtgatggtgatggcaaaggtagaggtgatgatgataccaatactgatgatggtgttgtgtcaatgaaagaggtagtgttggagttggaggtgacagtcagggaggatgtgagagtagacctggtggtgatgctcaggttaccagaaaaaggaagattcgaactcatcctgtcttatcctctgtctcctgttttacaaataagaaaatgggagcccccgggctgggggagtactggcaaagtgcgggtaatcccagcactttgggaggctgaggtgggcagatcacctgaggtcaggagttcgagaccagcctggtcaacatggcgaaaccccatctccactaaaaatataaaaatgagccgggtgtggtggtacatgcctgtagtctcagcgacttgggaggctgagacaggagaattgtttgaacctgggaggtggaggtggaggttgcaatgagccaagatcgtaccactgcactccagcctgggtgacagagagaggccctgtctcaaaaaaaaaaaaaaaaagaaagaaagaaaagaaaaaagaaaaagaaaatgggagcccccaagactacccagcttttcatgcaatcctagagggaatgatgggcagatccaggcctctgggaccagtcctaaggctcagccatctagggctgggacaggggcatcagtgccctttggaagccaggcaaatgtcatgcaaatgtgtctgcagagggctcctctgcctcaggagggcaacccaggatttcccaccacccgctccctgagctcagaccctgcaggggactttgtttctggccctgccactgacttacttgaggaggtcactctgattcccaatttgtgtaagggagattaaaacagcagacacctcctaagtttgctggtgaagattcaacaggataatatatatgaaatgtttagcatagagcctggcacagcaagctctccataaaggtggctgctctgtatttatcatcatcatcatcaccaccattgacttcagcctgcccatgtggtggatgctgaaacaggctgagggtggttactctcctgggaggacaaggaaggggctctgagacccaagcctggtcttgtcaggagaagggggtagggggcggaccccagctgaaaagggagtgagttggagctatatttgagctcctggtgtgatgactaaggaggttgataacaggctctggggctcagggcggcaggctgggggcagctgtcagggagaaccgcccccctggagacggctgtctctggaggccctttctggctccctccttgccctcactcttggtgggggaggggggtgggcgtactgaggcagggtccagggctcatccagcccactcctggaaactcagtgctgtccttcaggctgtgtgggtcagggataggaaggcaggatgccagtgatagatggagtatcccagttactctccatagtaaccctgtgaggttggtaatgaggcccccattggacagaggaagaaaccgaggcccagggattacacagccagtagagagaggacagagcatggagctcctggagaggcagtggataattcttcccgacagaggagctgactgttgaaccccttctttgaaggagagtccgtgctgccaaatcgaagaagagaaacgccctggctggaaagcagagagaacagcaggtacaaagcatggatggggaaggaaggttctggctgtgaaaggatgagaaatttggacatgtaccctcctgccctttggttcggagtaaacatgagcagggaagggagagaagtctttcctgtctttttcctcctcctcttcctcggttcactttccaggggcacctgaggatggcaacggtaccgagggtctgtcctccttcctttctctccctggtcaccctgacccaggcccgccatgagggaggtcatgctatggctaccatctgcaaaggtgtagagggtgatacaggatattgtgggaatgtgaaagaaggggttatctgggagggcttccctgaggaggaagtatacagggcacaaaagagcatttcttctcccaaggcttcactccagggtttcttgttggtaacaagcttcacakgttatgtccccagcacttcattctcaccctctgaggcagatgtcatcctcactccccattctgccactcaggaaatgggctggaggaggaggagtgactttcccaaggtcacacagctggggctgagctcaggcctctctcctccttctcttcggctccccctcctcctaggcagcccagcacccgctgtcagctgckctgaagtgagtggctatttttattctggtgcgaggggatctcaagcagcagagccatgtaggttagaggctctaggacacccggcctcagcagtccaggggaaacttcctgcagccaccagaccctgctaagcttgcctgggggctctcatttcttgcagactgacttgctctgggctcctatgcctccagaagcttctttattggagctcagaacagagcatagagccagattaagccctggtcatggtcctgatcctccaacttgaacccgactcttggtattgactaagcctctactccagctcttgactgagctctgacatcaccttagaatgaaccctgactctagtcacatactgatctaagcctgaattaggctgatcccaacttgagaccttagttctgggcccagatcaagcccttatccttytctaagactgagccttagtcacagactgaattctagccccagcccagactaaccttttagactgactctggcagaagagtcagactaaccttttaaccctgactctggcagaagactgagccctaatcttggtcaaagactgagtcctgagcctaatcattgactgaactctgaccacagactgaattctgaccctggatcatgcaattctggtcacacactgagccctaaacggaagactgtgccctgaatctggtcacagactgagccctgaacttagtcattgacagagacatgaccctggtcacagactgagcctggctcctggtcacagactraagactaagcccaatcatggactgagccctgtatctagccctaggctacagactactcaactaagggstgacctagaccctgtctgagcctgaccccatcacagactaatccccaaccttggccccacytgaggaagactgctggcctaaattacatgctgccacataagaggcatggattatgggcagagatctgtcttgggagatcttgggcttctcatgctgctgatgccacagtgttccttcctggtactgttatggtcacagtctccaccactggttccactggctggttggtcaaccctcagcagcccaagctgtggcctttaggggccacagcatccaggctaatgcaatgagagtggtttggtggcatctgtccagcaaacaaccagggcccatggggtactggggtttggctctgtcagcagcaagaacgactccgtggggcctctggcttcagttactctgaggcccttgctggggtaggggttggagtagaaggaaatagtggggtatgtcccattattttcgtaaataaagtttactgtttgtgtttaggtaatccatgcccattacacaaaacacagaaggaaaacatttacctataatttcatccaccaagaaataatcgttctgacttattggtttgtttccttatagatattttttggtgggggcgggggtctaggcatatatatttatatatacatgttgtatataatatgcatatatatttatatacatgttgtatataatatgcatatatatttatatacatgtatatttacatatacgtgttatatattttatatagctatatctattttttgagatggagtctcactctgtcgtccaggctggagtgcagtggcatgatctcagctcactgaaacctccacctctggtccaagcaattctcctgcctcagcctcccgagtagctgggattacagacatgcaccaccatgcccagctaattttgtatttttagtagagacagggttttgccttgttgaccaggctggtcttgaactcctggactcaagtgatccacatgccttggcctcccaagtgctgggattacaggcgtgagccaccaagactgggcctatacatgttttatagaattggttggttactgtgttgctgccacaatgtccagcaacacagtagggttagggttagggttaggatcctgttaaggttgcagcccatctccttcttaacaggaactggaatatggtggaccccaccctcagcttcaggaatgggtcccagttggttaagccagtaagcaattcccatttccccaggcacatgattagatcacgaatgaactagcaagatacaaggaaatttttgctcagggcttttgggaaaggaagcttattttctctcctgaggaggctgccaaaaaagatgatcttccttccattagatgtaaatgaagaggccaatggctctagttactgctggcagccatctttacaccatgtagaaaattggcctactgataaactgacattatggaaagcagaatggagagacaccaggctttggtgacttcattaactggatcaaacttcacctgaagccccacctgccattggactttttttttcttctttttgaaatggagtctcaatctgtcgcccaggctggagtacagtggcacgatcttggctcactgcaacctccgccacccaggttcaagcgattctcctgcctcagcctcccgagtagctggagttacaggtgcccaccgctgcgtttggctaatttttgtatttttagtagagacggggtttcgccatgttggccaggctggtttcaaactcctgaccttaggtgatctgcccgcctcagcctcccaaattgctgggattacaggcgtcagccactgtgcctgtcctggacttttaaaattatttgagccaacagagtccctttatttatttatttatttagagactgagtgtcgctctggcacccaggctggagtgcagtggcgcaatcttggctcactgaaacttccacctcccgggctcaagcaattctcttcctcagcctcctaagtagttgggattacaggtgtgcaccatcatgcccagctagtttttgtgtttttagtagagagggggtttcaccatgatggccaggctggtctccatctcctgacctcaagtgatctgcctatctcggcctcccaaagtgctgggattacaggcatgagccactgggcccagcccctttatttttattattttttgacacagggtcttactcacattgcccaggctagagtgcagtggtacgatcttggcttactgtattattttttattttttataggagatggggtctcactctgtctcccaggttagagtgcagtggcatgatcatagctcactgtagtcttgaactcctgggctcaagcagtcctcccacctcagcctctggggtagctgggactacaggcactgccatgcctggctagattttaaatatctttttttagagatgggttctcactatgttgtccaggatagtttggaactcttggcctcaagttatcctcctgcctcagcctcctgagtagctgggtttatagacacaagccaccacaaccagctccctttattgtttaagccagtttaaattggggtttctatgacttgcagcccacagcatcacaactcccaattgatattaccagattactgtttttgttgcttttttcttgctatttaataccataaccacgaacattctccatgtcattccatctatgctgcatctttttttttttttttgagatagagtctcactcgcccaggctggagtgcagtggtgcgatctcagctcactgcaacctctgcctcctgggttcaggcaattctcttgccttagcctcccaagtagctgagattacaggcagccatcaccatgcccagctaatttttatatttttagtagagatggggcttcaccatattggccaggctgctctcaaactcctgacctcaggtgatccgcccacctcggcctcccaaagtgccgggattacaggcgtgagccacccaygcccagcctgctgcatcatttttaacaattgcatggttttccatcctatggaggtacactcattaatttaactcatcccctgctgtgacatgcttaggttatatccccagttcttcaccacgataaatggtattctaataaacaagcttgacctaacaatcctctctctgatgattactttggggctaattctgaaaaatggaattactgggtcaaaaaaagtttttagagttttgattttgcccttcagaaagccagggtgaattcatacttccccagcagtgaacagagtgttagagatagcttactgtgtgaatagtctggacaagactaatcatattgactacatactcatattatatatawatatttttttttttttttttttttgagacggagtcttgctctatcacccaggctggagtgcagtggcacaatcttggctcactgcagcctctgcctcccgggttcaagtgattctcctgcttcagcctcccaagtagctgggattataggcatgcaccaccatgcctggctaatttttgtatttttagtagagacgaggtttcaccatgttggccaggtggcctcgaacttctgactcaagtgatctccctgcctcagcctcccaaagtgctgggattattggtatgagccaccatgcccggccaagcctattatttttatatctttacaatcaagttagtaaaggggaagttagcagggtgcaaacaaaagactcagtgcagacttaacttctctagaaggcacagtaggctcagtgtttagggcccactatacttttagggggtccatgaaagtgtttttttttttttttgagacggagtctcgctctgtcacccatgctggatggagtgcagtggcgtgatctcggctcactgcaagctccgcctcccgggttcacsccattctcctgcctcagcctcccgagtagctgggactacaggtgcccgccaccacgcctggctaatttttcgtatttttagtagagacgggggggtttcactgtgttagccaggatggtctcaatctcctgaccttgtcatccgcccgcctcggtctcccaaagtgctgggattacaggcgtgagccaccgcgcctggtcgaaaatgtttttaatattctttaaaattagaaggatacactgggaagttaaggttaaaaaaaaaaggaaacatatactaataataatgaatccagcctagattatagttatctttttaccaaagcaattgaaaatcaaatatatataatatttatgtatattatgtatatttaatggaggcatgtgtccatatcccagctactcaggaggctaaggcaggagcattgtttgaggccaggagttgaacactagctgggacaacacagaaagaccctgtctctaaaaaaaaaaagaaaaaagaggccaggcacagtggctcatgcctgtaaccccagcattttgggaggcggaggcgggcggatcacttgaggttgagaccagcctaacatggtgaaatcctgtctctactaaaaataaaaaaaattatccgggcatgatggcacgctcctgtaatcccagctacacaggaggctgagacacgagaatcgattgaacctaggaggtggagattgcagtgagccaagattgtgccactgcactccagcctgggcgacagagcaagactccgtctcaaaataaaaataaaaattaaaaaaagaaaaaagaaagaaaaccctaggatccatgaaagtcataatgcagccttggctcggtattgagaaggagtccctagattcaatgggaaaagaggacagtgacgaacttgctgtgtctgtggaagaaagcatgaagaagagaactggcatcctaatctggtgatctggtgatccgttctccttttttttttttttttaattgtaggcattttatctgcaaatgcatattacctccttagaaaaagaattccaggattttacctcctgtgtgttttcgtcttgcttctttgtgatccatgatgccagctgaggttgtgagtacaatgaaacccaactggcaggatgggagcagattattctgccatttttctagatttttgagttgcacatcaaatcaggggctgattactccacacttgtttaacctgcctgtgaggttcacagcagttttcctagctctgtgatcatcaatgacttcaacttcaccagtgtaactatgcttcatcaccacagttagaaaccagacgacgacattataagaacctggtgtttgcctctcttttggcattgttgatgctctygagagcatcagccgggacattcatgcacaccattatggcagcacatggcagaaagagctatctgcttatgyatgagattgagaggtgaagccagctggacttcctgggtggagtggggacttggagaaattttctgtcyagccagaggattataaatgcaccaatcagcgctctgtgtctagctgaagaattgtaaatgcaccaatcagcactctgtaaaaatgcaccaatcagtgctctgtgtctagmtagaggattgtaaatgcaccaatcagcactctgtaaaatggaccaatcagcactctgtaaaatggaccaatcagcaggatgtgggcggggacaaataagggactraaagctggccgccactgccacccttcatccccagccagcagcyggcaacctgcttgggtgcccttcggtgctgtggaagctttgtcctttcgctcttcccaataaatcttgctgctgctcactctttgggtcctcaccacctttaagagctgcaacagcctgtaatcccagcaccttgggaggccaaggtgggcggattacgaggtcaggagatcaagaccaccctggctaacacggtgaaaccccatctctactaaaaatacaaaaaattagttgggcatggtggtgggcatctgtagtcccagttactcgggaggctgaggcaagagaatggcgtgaacccaggaggcagagcttgcagtgacctgagattgtgccactgcacttcaacctgggggcgacagagcgagactccgtctcaaaaaaaaaaaaaagaaagaaagaaagaaaagaaaaatagaaaaaagagagttgtatcactcacygtgaaagtccgtggcttcattcttgaagtcagtgagaccactaacccactggaaggaagaaactccagacacatttgaaggaacaaactctggacacaccatccttaagagctgtaacactcacagtgaaggtccgcggcttcattcttgaagtcagtgagaccaccaacccactggaaggaagaaactccggactctcaagatgagtgcagagacatgttgggttcaagtcccaaatccacagttcactcatttcacctttctgagcctgtttcctaacctgcaaaatggagttcacggggtctttatgaggtaaggaaggaactgataatgaaagctaacactgtcctagtaggtacttttttttttttttttttttgagtcagagtctcattctgtcgcctggctggagtgcagtggcgcgatctcggstcactgcaacctccgcctcccaggttcaagtgattctcctgcgtcagcctcccgagtagctaggattacaggcatgcaccaccacacctgggtaatttttttgtatttttagtagagacggggtttcaccatgttggccaggatggtcttgatctcttgacttcgtgatctgcccgcctcagtcttttttttttttttttttttttgagacagtctcactgtgtcgcccaggccggagtgcagtggtgcgatctcggctcactgcaacctccacctcccgggttgaagcgattctcctgcctcagcctctggagtaactgggactacaggtgcccgccactatgtgcccagctaaatttttttttttttttttgagacagaattttgctcttgttccccaggctggagtgcagtggcgccatctyggttcactgcaacctccgcctccgggttcaagcaattttcctgcttcagcctcccgagtagctgggattacagacatgagaatcatgcctggctaagttttgtatttttagtagaggtggggggtttcaccatgttggtcaggctggtctcgaactcctgacctcaggtgatccacccaccttggcctcccaaagtgctgggattacaggcatgagccaccatgcccgtcctgtattaggtactgttctaatgagctttatatgtgttaacccctttatcctgccaaccccaacagggtacacaatattgcatcaccacaatgtgtgctctgggaagtaaaaaccttgattggaatttttgtccaaagaaataaaaaggccaggtggagtggctcacacctgtaattctagcactttgggaggctgaggcaggaggatcacttgagaccaggagtttgagaccagcctggtcagcagcaagaccccgtaatctactgaataaacaaacagcgcaaacagggattccctagggttcggttttcctatctctttttttctacaaccaaattggtttaytacaggaatgcaaggtttaacatatgaaaatcagttcacatattttaccacatttaataaaataaaggagaaaaaccacatgatcatctcaatagatgcaggaaaacatttgacaaagttcaacatccattcatgataaaagctctaagaaaaatagaaatagaaaactttcttttacaaaaggcaccagtaacaaacctacagcaaacatgatcgtttaaagatgatatctggaaaaagacaattatcagttccagtcaacattgtaccagaggccccagaccgtaaaattaagacagtgcaacgaaacaaaaccaaggtataaggaccagaaaggaagaaaaccacttttatttccagatgatataatatgcatatgtagaaaataaaaaaaaatatccagttaaactattagagtaagaaaattcagtaaggtcactggctgcaaggttaatatacaaaaatcaattgtcttcctatatgctactaccaagcaacttgaaaatgaatatgtaaaaacaatagagtttgtaatgctataaaaaattaaatacctaggagtaaatctaatgaaagatatgcaagatatttattctaaaaaccacaaaatattattgaaggaaattaaagaagacctatagaaatggagggacttactatgttcgtggaagaaaagtcacaataatgtaaagctgtagagtctccccacattgatttccccagtgggaatctgaaatcctgatagaaatttggaaggtttttctgtggaggttgacgagctggccctaaattgtacctggaagtgtgaaaggccaagtatagtcaagacaaccttcaagaagaacaaagctagactgcgatggcttactgaggctgtgggatcacacatggccctcaccacaggaaaatgtaggccacaggccaggcatggtcgctcatgcctgtaatcccagtactttgggaggccaaggcaggaggatcacttgagcccaggagtttgcgaccagcttggtcaacatggtgaaacctcgtctctactaaaaagacaaaaaattagccgggtgtggtggccgacgcctgtaatcccagctacttaggaggctgaggcaagagaatcgcttgaacctgggaggcagaggttgcagtgagtccggatcatgccactggacatgagagtgtccagcctggacaatgagagtgaaactccgtctcaaaaaaaaaaaaaaaaaatcagctgggcgtgrtggtgcatgcctgtagtcccagctactcaggaggctgaggtgggaggattgcttgagcctgggaggttcaggctgtgattgagccactgcactccagcctgggcaacagagcaagactctgtctcaaaaaaaaaaaaaaaaaaatagccagcccagcagctcacacctgtaatcccaggactttgggaggccaaggcgggtggatgacttgaggttaggagttcgagaccagcctggccaagatgatgaaacccccatatttactaaaaatacaaaattagctgggcgtggtggtgggcacctgtaatcccagctacttgggaggctgaggcagaagaatcgcttgaacctgggaggtggaggttgcagtgagctgagatcgtgccactgcactccagcctggctgacagagcaagactctgtctcaaaaaaacaaacaaacaaaaaaacaaaaaaaaatgggccaggcgcagtggctcacacctgttatcccagcactttgggaggctgagacgggcggatcatgagatcaggagatcaagaacatcctggctaacacagtgaaaccccatctctactaaaaatacaaaaaaattagctgggcgtggtggcgcgtgcctgtagtcccagctactcgggaggctgaggcaggagaattgcttgaacccgggaggcggaggttgcagtgagccgagatcaggccactgaactccagcctgggcaacagagcgagactccgtctcaaaaaaaaaaagaaagaaagaaagaacaaagctagaggaccaacacacaaccagatgtcaagtctgactataaagctatagttaataagacagcgtagttagacaaacccactgaaggactagaatagggtatgatattcagaagtagactcccatatatttatatggttacctatttatttatttatttatttttgagacagtctctgtcgcccaggctggagtgcagtggtaggatgtcggctcattgcaaactctgcctcccaggttgaagtgattctcctgcctcagcctcccaagtagctaggattacaggcgcccacaccacgcccagctaatttttgtatttttagtagcgatggggtttcaccatgttggccaggctggcctcgaacttctgacctcaagtgatctacccacctcggcctcccaaagtgctgggattacaggtgtgagccaccacgcccggccgtggttgcctatttatatataacagaggtaacgcggcagagtagcaatgaaaaagacaagatttttaattgaattggatagccacattaaaaaaaaaagtaaatcctgactccataaatttaacccagctgatttaagaccctgttgtggcctatcagctgtaaccctccttgcatcttcccacctttgaatagcaaattccttkcctcaccccaggtcagaaagtctgctcagcagtagctgtggatggtaagaagacacgctggtaggtctcagtggctcccagaagccgcaccccctccaccgaacctcactcctcatctcccacgctccaaagcgaggagtcctcagaaagccagtttcccttatttattcttctttctttctttcctttttttttcttggatgtcctaccagtttccctatcttaaagtcgcaggttcggctcagaaactccagtgtccctcagcgtctcgccggcaccctctgccggcgtgaggtggcgctgcctggccgcatcctgggggagcgtccacatcctcggtcgacaaaaggagcgtcgacactctcggacctgggaaagtgacggcccaaacgccagggaggagccaggacctcgccctgagctagcgggaggtaacggcggggagtcctggggcggagaccgagcgctgggggcgtggtctccagcgggactgggcctctagcgggagtgggggccggggcgggggcggggccagcctggaggcccagacgtggcgcagcgactcggaggttcgcctccagcttgcgcatcatctgcggccgggtcccgatgagcctcctgttgcctccgctggcgctgctgctgcttctcgcggcgcttgtggccccagccacagccgccactgcctaccggccggactggaaccgtctgagcggcctaacccgcgcccgggtagaggtgagtacgccggcctccagccccggcactatcgttccccaaccctgcggccccatgggagcaccgtccgtcccggccccaagaccacctcgaaccgcgagtctccctgctttccccctggcgccgggaccatccctcctgttccctagccccagatggccccagcatccaccgtggaagcctgagacaccgactttggggcctggaactccgaacccttccccagctccccctacccggtccgacagcggacacccagacacactgacgcagtctcctaactcttctcgtggcctatgactcccaatcctgtcccaacttcccatcccccatcacttcatgttttcctggaattcccccccgacccggttccagggctggaggctccagaaagtctcttttccttctcctggggggaaagaagactttctgggtgcctcctcccatatgcaggatccggggaagggggccaactcggaggggcaaccgagttgggaacttggttgccaacatttactctgcagcagcctcccatcctcccccaaccaggaaattcccgttcggagtccctgtcttgctatgtgactttgaccatcacagcccgcctctgagctttttgtcagctctgtcygacaaaagggtgtagaatggttgggtgccggtggtgcacgcctgtaatcccagcactttgggaggccaaggcaggaggattgcttgagcccaggagttcaagaccagcttgggggacatagtgagaccctgtctctaagaaaagggctgagggtaggatggaggagggctggagtgggtggtcctggggtctagactcctgctggatggtggcatctcctcagggaaggcagggaggagccctcccatcctcccatgtcagggaagcaaccacatggtctgtggggctgggccgcaggtggcaggcagggtgaggtctgcctgtgtagagtagggaccagatggtaggtgtctccaatgggggcccccagggccattctgaggtgtttccttctgctctgcctccactgtgagatttcagggatcaaaggccaagcccaggtctctactgcttaagaggagcagggtgatcatttcccctgggcattgggagtcagtccacagccagtaggatgtacaggccccaaggctggcaggcacactgtgggtctctggccttgctcttttcccctggtgtctctaggcctgagtctccccacctgtatacacagttcccccttctgcccacragggtccagcatttccttcagaccttgggaactgctgatccrgggataactcacagcccgacccaactcagggataaggaagtatggctttggggatgtgactggaataaacgtgaaggactyctgacctatcccattttatccccctccagacctgcgggggatgacagctgaaccgcctaaaggaggtgagtttgaaggaagaggtccctagctctgttccccctgagcctcttggggagtgggcaacatggtcccaatgactggggcrgggaggggggaaggatccctaggctgagagtctagcctaggctgrgagtctagcctgcacctgacttgytttatgacctcactgggcttcagtgtctcgtctgtacctcgagtagactgaggtcatggtctctgatgctctggttcctccccaggtgaaggctttcgtcacgcaggacattccattctagtatccttctgttctgggggaggggaaatgggatgggcacctgggagaatctccacgtaacttcagaaaggggtggcagatggttttcaactgacaagttgaattgattggtagtggctcccagaggattctgaggtggtctccatgttgggtgggcaagagagattgactagtgatgactgccacagaatggagaggagggccctttacttctttgaaccctaattttctcacgtataagcggagaccctggcccctcccgggcacagagtaagctctgagcaaaggaggcaatgctgttcccatcagtaaggctgcggaaaccaccacctccctctgcccaccaccccgctccttaacaccacctccagtcacaacctggtgatgaaacacctccctggggccgaccctgagctcgtgctgctgggccgccgctasgaggaactagaggtgaggccgtgggaggtgggctgggggcgaggccagaggcgaggcccagcctgctgaccccgcccctcctccgcctcagcgcatcccactcagtgaaatgacccgcgaagagatcaatgmgctagtgcaggagctcggcttctaccgcaaggcggcgcccgacgcgcaggtgccccccgagtacgtgtgggcgcccgcgaagcccccagaggaaacttcggaccacgctgacctgtaggtccgggggcgcggcggagctgggacctacctgcctgagtcctggagacagaatgaagcgctcagcatcccgggaatacttctcttgctgagagccgatgcccgtccccgggccagcagggatggggttggggaggttctcccaaccccactttcttccttccccagctccactaaattccctcctgccttaactgaggctcgactccttcgttgctgcgggcgggtggggtgggaggtcggaagaagaacctctgaggatccctgctggagttggagaccttgcggagctgccttcggttcaaaccccctccccacccccaggagacgcagagaggagtcaggatcgttgaaaaccaataatttatcaaaacgctgcgtgtgtatgtgggggggagggtgtcgcaacagacagggcagcggtgggcggacgcacaggcaggagacggtgcccggagagtgggggcggcagcttgccactggctggccatgcgggcgggcaggctagacattcttgccgcgcaggcgcagttcgtggcgtcgcaggtggttgtagagcgactgcacataggtgaagacacacttggggtcaggcttcttgcccatgatcatcatgtcgtccacctccaccaggggcacacagtccaccagcatcctgcagggagggggcacggggttggatgtcagcgccagacccgcctctcgtggcgcccctctaccccaaggtcttttttattgccgcattgcctgctggtctttcataaactccagacagggaaaagccttccaggaaggcaggaagcccctggcttcatctacccaagcctggaggcatctctcggggcgggggagcagagctaggcaggtggaggcggagatggcagaagagagccccatcccagtcaggcaggtcctgggtctgcttcctccaaccctggggaggtgctggctccaaaccctgcccatgttctccctggagaccaccttctgctcaccctcactggcacactccagttggtagaagcctctcagctcggcctttgcacccagatgggcttcatcactggccaatctttatctatggataggtctcactctagtggccctgtggtccaccgatgattgtctgctagctgcctgatctggtacttcctgttgagaggcccagggacccctattctttgacagggggtggggataaccctgctgctggagatggaggccagggaacgtgtgggcagcagaggggttctctaacccttatcacctgccttgggtagagcagaggaggcagatgaggatcccagccaataccaatggaccatctatgccatgctcggggggaccacccttctggccatccttcagaatgctagctgcccttcacagataaggaaactgagtcacagagcagaggagccatttgtttcaagccccatggcttagtaagtgcaggctaggccgcatgggacccaggcccccagttctgggtgttggcaaagccttttccccactctggagtgagtgggttgtgcctattaagcaactgacagctcccagagctctgaagctggagtctgctctctggctccttttcccctgtccctcaacccccagagcaagacctcttctgccttgatccctcctatctgccatacctgggacatagcaagcattcaatgttgctgaatgagtttcctatggcagggaaggcataatggcaacaattgctccttattctcaagacacctgagaacccaagaccacctcccatctcgtgcccttatggacaaactcagaactgtggtagggctgggcctacccccagctcacctggactccttcagagaagaaacctgggaggcagaacaccgaacacctctgttttagtccagactgtatccctaaccagttgtgggtgctagataaggcccttttctatgactgtttccccctctttagaacaggacagttattctctatctcatttgagaccttacaagaatttaggatgagtgagagggttctgggtctgctgctgatgtgccacgtgcccctagggtcatccctatcccagactgggcttgtttcccgagctgtaccatgatgcaaaggcagcctctctctgaagcttcttccagctgtggctatcgtcctggggatcccgaccgccctctccaacctggtgctccctcccgccccactcccttccctggagaccttataaagccattgtttacactggggctcagggctcagggctcaggctgccccagtgacaggccaaacaccaggcaacttgagcaacagcacggctgagtcacactttccaactggatcagggctgggctgggcccctctccctccaagctggcttgctgggcagcagctcctaagtccatatatgatctggagatagcaccaagcccatccgccactcatctgtgctccttctctgagtgtgtgtgtgcacatgtggactgccccccacaatggctccaggccctgaggggcatctgagtgtgcccctacctgtcactgactcacattccttcagccaatccccttgctccttctgggcctctattttcaatcctctctacaaaatgggcgggaacacagtgatggggcaaggaaaacagccactaagtggggagtttggagtctcagtttctggccccagctctgacctaaccatcttccctctccctcccacccccaggacagtcttagcccacgtctctctctgagctccttgtctgtaatggggtagttagtttaggatctgaattctttactttggtactgaggtgaggtgaccagagaggaaatgccacagctggcttaggatccagagtccccagccagaaacatcttcctgttgaactggtcctgctcctgagctccccactttggagtatggcaccaccaactccccagtgcccacacaggagcctggcagacttcttgaccttccctctccctctccaaaccagatctattgggaagcctgtctctctagctcttaagctattccagtcatctagtccatcccatctctcatccaagcctcatccgaggaaggtcctagaatgctatatccatcccttctctgtttggaaaccctttataactcctgttgtcctcaggaggaaggtcaaacttttttttttttttttttttttttgagatggagtctcgctctgtcacccaggctggagtgcagtggcatgatttcagctcattgcaaccttcgcctcctgggttcaagtgattctcctacctcagcctcccgagtcgctaggattacaggtgtgcgccacacgcctggctaatttttgtatttttagtagagatggggtttcaccatgttggtcaggctggtctcgaactcatgacctcgtgatctgcccaccttggcctcccaaagtgctgggattacaggcatgagccaccgtgctcggccagaaggtcaaacttctaactgtggccccctcctccctcatatccagactcaagtttcttcccttcctgatgtgctgtgctctccagctctcttgccctgctaagcctaggctgattcctctgcctggaactccctctccctcctttagcctgaacttgttcagatcccagcttagtttgcacttttttcagatggggggcccagacctgcagcctgggtcaggcatctcccctgggcttcccccatcacagtgctgcccacctgggtcatcactgcccatttagaatggtctcacctgctgggccctgaactgccagaagacagggctatgtctggctcctctggcttgactaaatgccccccttacttcccccacccgcctccctggaccctctctggccttgctgagcagattctggtgaaacggggcaggtgggagaggcggcgtttctcaccgtggggccccgagcaggggttaggactttttggtttttaccagccccttctggaccagacagcggtagaattcctggatgtacgtgtacacgcacttccagtcaggctctcgaagccgcaccatgtcctctgtatccaggagctgcgggcagtccgcatgggtcctggggagggtagggggccgggaaggggtgggggacgggggcaggaggccagggccccgggtggggaagagagggaagaggcagagaagagagaggggaggaaacagagacacacacacatacacacacacacacagagacatgagttcaattacgattccagtgctgcagtctgccagccccccgcatgcctcctccccactgtggacgtgccgctcactacccatcactaatggtgtgcaatgcagacaagggtgggggccaaaccagtcacaggtgcagagaactctaggggcaagcgggaacgcggggtgggggcgatggcgttggcaccaaggttggagaggagggctgtgccccggggagagggggtgagggaggcgtgagaggaggtggggggaggaggaagaggagaaggaggaggaggaagaaatttgagggaaaccagaaagagaaggggaaagaagggaagacagatggagaagggtgctgagggtgaggtgagcagacggggcaacgattccaaagtggagggcttgctgaggtcctatataagcctctggcagcactatataggctgggcgggcacggtgcccgggccaggagcctccttttggaatctccagccgggatcccgtgggagcaggaagctctggtgatagtgggaggagagcaggacagagaaagggagagagagggagaagggggcagagggaggatggaggggatatggacagggccacctggtgggctttggcccgggctggtaggccggcctgcggctccttcgttccggcgggcacctggcacgctcagcagcgggggggtggggatggagaaggacggggactctctggggaagggggtctcagccgctgactgacaatgtggctggcccgctccaggggttctcagggcaactgggcctggtcccgatgtccagccccagatgtgcagcaacattagcagggccagggcccacacttactccgcagatgagaaggccacctcgaagttctggcgtcggttctgagggctaagctgcccatagtcgaaggcctcagggaagaagttgtgcaccagggcacagaaggccatcccatcactccagctggaggagaagttctggatgtcgacgtgctataagccgtaggaggactggtcaggaacctgggggcaactcccccctgctgtctacccctcagcattctgttattccagacctagggcactgggcacaaagaggccccgtagcttgcacaatgagtgaatagttggaacatgagcctcctccaagtcagcctgtcaactcccatatttgcaatttcaagggacagagctactgagaggcccagcgccacccagctaaggctatggtcatgcctcatcactccttccctcatttagagaaattgactcagggcctcctacagagcaacaaggaggggactccaagagtgggatccggccttgaaccctgcccaccacccaagaggccctgttacttcatcactgattctggaatctagggcttgccttgtgtcctctttgagcctcagtttcctcaccccaagagcctttccatgttccctgtgaggccacacagtggcaggaagtgtactgggtaataggagctctgctaagaaggaggtgttgagctggggtctggggaggcctccaggccccctggcctcccggggctcacctcgtagccgcgagtcttggctcgacaccagtccagcagcatctgcttgatgctgttggcgttggggaccccgaagctggtggatcgctgcacggctgcgcggggtccgccagggctgctgtaggggcggtgtcaggaccaggtcacacgactataaggggcatgcctcggtgggcccacccagtggatcccaggccccgccttccatgaccttcgggcctttgcaccacagatctagccgcgcggtcttcccgcctctgccgggccaactatcaagccccgccccccactgcctatcaagccccgccccccactgcccagcccacttctgcagctcacccggccgcgccctccttctccagcttctcaatcatggccttgcgcgcctgggaggctgaggtcttgg

SEQ ID NO: 5778 - DNA, 22463 bp, Homo sapiens
tattgtgcagttagatagtaagtgctataatccaggaatatacagtgttgtgtgaataatgtggaatcagtttatctccagagcagaaaaaggtgaaggccgaagaaggcattcagagtgatactggagctgtgtagcaggggctactactgttccctcaaatcctttcttctcttcttcctgagtaatagagtcctttttcagctaggcatacagccatccaaaataaaaactatatttcccagcctccttttcagctaagtgtagccatgtgactaagttgtggccaatgggatgtcagtacaagtggtaatggcaatatctgggatgtgtctttaaaaggaaggaacatgtccttctccttttcctccttcctgttccctgggaggtgaacttggtagctggaggtgaagcagctggaacttggatatgagcgtcttgttgatgataatagtgcaacaagataaaagcagcccgagctggcctacatttacatgagaaggaaataagactccattttgtttaagctattctcttgcatatatatatacacatatatatcagctaagtgtagccatgtgactaacttgtggccaatgggatgtcagtatgagtggtaagagcagtatcttgtatatatatatgtgtatatatacacacacacatatatatacatatatgtatgcaagaatataaaatatacatgtgtgtgtgtatatatatacacacatatatatgtcccttgcagccaagtctaattctaactaatacaaactaactctaaaaaatgaatatatattcaccaggggataggctatttcaagcagagggaagcctgtataaaggctcagggaatgctgtggttttatgtggcagcagatgagactggaaatgagtcaggatgagccacagtggaggatgaattaaatgggcaggagtgtggtagaaagacctgttggaggctatgaatgcaatcaaggtgacagacaactggtgcaatgatggtagtggaaatggaggagaggggattgattcaagatgcatttaggaccaagaatcgggagcttgtgaacgtgtgtatgagtactgtagacggagtgggtgtgtcatcagagaagatctgagcatttgggcttgctctcctcagaggccctgcgagtggagttcagcttttcctcatggggcaaatcttactttcgctccagttcctggggctcagagtccctggcccagatgcctcttgccatctcatcttcaccctgcctggcttcccttgcttgttccaggattgtttcataaagagggatgtggttggtctttaaccctatgaatgctggctgaggatgcctgcggaacctgtagtgaagctttcaggggctgctcgggttctggctggtaggtgaacactgtccatcttgccggctgggacacagtgactctgggtagttgtgtaagagaggggcccttggcagacaaacaggttcttctctgttggtgggccagccagcaggtcagtgggaaggttaaaggtcatggggtttgggagaaactgggtgaggagttcagccccatcccccgtaaagctcctgggaagcacttctctactggggcagcccctgataccagggcactcattaaccctctgggtgccagggaaagggcaggaggtgagtgctgggaggcagctgaggtcaacttcttttgaacttccacgtggtatttactcagagcaattggtgccagaggctcagggccctggagtataaagcagaatgtctgctctctgtgcccagacgtgagcaggtgagcagctggggcagagggatgggggtcacagtcctaagggagggcattgcaggtggcctcaggggagagcctggggtggcccctaagacgtcctcttggaacattttggcagagttgcctcttcgccctcattatggctcagtttttccaccatgaaatgggagggagggagacaggtgggcaggggagaggtggtagaagtggcctagagaactgttcctggggtctgggacctttgcgaaggggttagagcaccacgctccctgctatgtgactgaggtagcaagagcacgccctcttcccatgtctgaggaagacaccctagcctccttgactcacctaggtcagtcctcttgagccccaacagctctgtgctccccagcccaaggaaggggtaacaggatttcgggcagttgcccctgcagaggccccctgggcaagtcccctgcgccatgtcccttcgtctccttcttcccctaaccaggcctccctccacctgtcttctcagagcagataatggcaagcatggctgccgtgctcacctgggctctggctcttctttcaggtgggtctccgaccctgacttcaacgtgggggtgtgggtggaggctggccagagggccctgtccaccctgggggaggagagcccaggccctgattacctagtccctctccacagcgttttcggccacccaggcacggaaaggcttctgggactacttcagccagaccagcggggacaaaggcagggtggagcagatccatcagcagaagatggctcgcgagcccgcgtgagtgcccaggggaaggggtgtaggcgaagggaggagacagctgggccatgccatgatgacctgcctctgctgcctcaacctctgtggccgctgctgggacagaggaaaggagcggtgctagctctgtctgcagatcccggccatcctgggctctttagcgccctctgcctgcagcccccgccttgacaactccgtagctgttgcccccttgctcactgaggcgcgggacctgggatcaatcgggaggacgcccgctgcagtccccagaatcaaaggatgatgtggcgcatctatgtttctttggagagtgttgtaggtctggatttgtatgggcaatgtgtttgtgcttcgtgcgtgagttgttactggccagggctaggacaagagccctcgaccctggggccaacgccctgcgtccttggttcccccagaggatcagtgcgcgatgacttggggacaaaggagatgatgggggctagcagtctgacggcctggatatctgtccccttctccaggaccctgaaagacagccttgagcaagacctcaacaatatgaacaagttcctggaaaagctgaggcctctgagtgggagcgaggctcctcggctcccacaggacccggtgggcatgcggcggcagctgcaggaggagttggaggaggtgaaggctcgcctccagccctacatggcagaggcgcacgagctggtgggctggaatttggagggcttgcggcagcaactgaagccctacacgatggatctgatggagcaggtggccctgcgcgtgcaggagctgcaggagcagttgcgcgtggtgggggaagacaccaaggcccagttgctggggggcgtggacgaggcttgggctttgctgcagggactgcagagccgcgtggtgcaccacaccggccgcttcaaagagctcttccacccatacgccgagagcctggtgagcggcatcgggcgccacgtgcaggagctgcaccgcagtgtggctccgcacgcccccgccagccccgcgcgcctcagtcgctgcgtgcaggtgctctcccggaagctcacgctcaaggccaaggccctgcacgcacgcatccagcagaacctggaccagctgcgcgaagagctcagcagagcctttgcaggcactgggactgaggaaggggccggcccggacccccagatgctctccgaggaggtgcgccagcgacttcaggctttccgccaggacacctacctgcagatagctgccttcactcgcgccatcgaccaggagactgaggaggtccagcagcagctggcgccacctccaccaggccacagtgccttcgccccagagtttcaacaaacagacagtggcaaggttctgagcaagctgcaggcccgtctggatgacctgtgggaagacatcactcacagccttcatgaccagggccacagccatctgggggacccctgaggatctacctgcccaggcccattcccagctccttgtctggggagccttggctctgagcctctagcatggttcagtccttgaaagtggcctgttgggtggagggtggaaggtcctgtgcaggacagggaggccaccaaaggggctgctgtctcctgcatatccagcctcctgcgactccccaatctggatgcattacattcaccaggctttgcaaacccagcctcccagtgctcatttgggaatgctcatgagttactccattcaagggtgagggagtagggagggagaggcaccatgcatgtgggtgattatctgcaagcctgtttgccgtgatgctggaagcctgtgccactacatcctggagtttggctctagtcacttctggctgcctggtggccactgctacagctggtccacagagaggagcacttgtctccccagggctgccatggcagctatcaggggaatagaagggagaaagagaatatcatggggagaacatgtgatggtgtgtgaatatccctgctggctctgatgctggtgggtacgaaaggtgtgggctgtgataggagagggcagagcccatgtttcctgacatagctctacacctaaataagggactgaaccctcccaactgtgggagctccttaaaccctctggggagcatactgtgtgctctccccatctccagcccctccctctgggttcccaagttgaagcctagacttctggctcaaatgaaatagatgtttatgatagaagtttgcctggcgtgactctcatttggaccatgtctgaaagcagtggcctcaccactatccccaaagcacacccatcacccactccattcccttgctgctctttctcatccacccactcccagtccaggtctgtcaaagggggtctggctgggctctgcttcagggatcctggctagacaacggctgtctgtcacacctggcaggagggcctgggttacgggcccttcctctgcacctgcactgttcactagcctgctcccccacaggacactgtgcatggaatgcaggctgtgtctggaagagctgtggccctggtggacctaagattcctgaggtgggctgcctcctttgttcctgctgttctagagtttgaatggcctctttttatgccggactctcttctggggactcccctcactcaggggcaccaatgctccctatagatcccctgggaactgaaactggggtgtggtggaggacgtggaaagggtaaacacagctccttgtctttggacttccctgtccggccccctttcctcccagctcagcctactgtccccgggttctcagcacctgcctgctccccaaccccatagcacagaccccacacatatgtaggctcatcatgcctgcaggctggtcttccctgacaccgtggattttgacaatgttggcaacagaactgggttgtggacccagcacctggagagaggaagtgctagaaaggtagaaataataaaaggtgtttttgttgttgttaggaaactggaaaagcataggtcaagggctatgatggggatgaggaggtaggagtgaaaatgagggctgtgtacttgaggctgggattggggaaggtagtgatgaggacagaatagggagtgggaagaacagaaagggacagagggattcagggattgtgagagaggggaagaggctgagccacccggaggggcgacctagcacgcaagcagtatgtggcccaacactggaaccaagcagcccggctccgggcgcaccttctcagggattcctcagggacaagtccagccccttgtcgtcaaggctcttgtagaccgacgtagggaccaatagaaccccgtgcggtggagctattgtgaaggagcaaaaaagtgccctggttctaagaggacgtcttaggggaagtgacggctgagttgaggtggatccggctggcgatgtaaggttcgagccatataaacccgggaaccgggagcccttgacgacattgttccccgagtgcccggagtctgcggctttttttggggtggtggcagctggcggaagtgacgggagaggggtggggccgcgagagcggcggaagtaggaagccgaggtctgaattgcgcgtggtggccatggcggccagcggggctgtggaaccagggcccccgggggctgccgtcgccccgtcgcccgccccggccccgccgcctgcccctgatcacctgttccggcccatcagcgccgaggacgaggagcagcagcccaccgagatcgagtcgctatgcatgaactgttactgcaatgtgaggcgggggcgcggccgcgagcggcgggtgggtagggcttgtgccgggacgagccgggggtcagacccagccaggtgggcccggccggggaccccgaggagcgcccggagatagtagggcggggaaagggagtttcattgatttttttccttagctactttctacttcaccagggcatgacgcgcctcctgctcaccaagattcccttcttcagagaaataatagtgagctccttttcctgcgagcactgtggctggaacaacacggagatccagtcggcaggcaggatccaggaccagggagtgcgctacactttgtctgtcagggctctggaggtgagaggacctcagagcaggtacctcagtattctagagagagattcggtactggggtcagagctctggtccaggmggtcggatcttaaataaatccccctatgtctcctagccttagtttcttttgtaaaatggtactggtgttgtcatcagctcaagtgagatamgatttgtgaaaatgctttgtaaatgttgtctgagggtatgaaatgagcagtagttgttatgaatagtattctcaccatttggacagcctggctcacaccacctgtactattcgaaaggagcagtctggaccctgtggagtggcgagagggagagacagctgggctgcggtctgatggaaggggacggtctggttattacttgaggagaagctgttctgcagtctctttgtactgaacgtattcytttcttcccaggacatgaacagagaagtggtgaagactgactctgctgccacaaggattcctgagctagattttgaaattcctgcctttagccagaaaggaggtaagtttaagatcagartatttgggctgttcgcatgtagctagaatcttaccctctttcttgcaaaaccccctggtgccaggtctagtggtttgtgtatgggttctaccatgtaatcattgtratcttcattagttaatcatgagtggaaagcttaggtaaaacagctcgagatggtagaaagtaatggtaataccatagtgtgtttattgtagaattttagcatcaytattatcagacatgaatggaaccttgcacctggccttctcattttayagatgaggaaattaagacccagagagttcaagtgaattgcccagggtcatacagggacttgatagcagagctgaggctaagtcacacttgtcttttgttcttgttcacaagctctgaccactgttgaaggattgatcacccgtgctatctctggcctggagcaggaccagcctgcacgaagggtaagctggggttttctgattgtagcagctcaaggaataattgcttatatagagtgtcccatgtgtctgaagagtctctgactaagtgttggaaacttgctgggtaagcatatggtggtgctggagctgctagaatgttgcatatgttataattattgtcttttccacttccctccctcagtatatattcaggcctcatcagacaatataacattacctctgaagagcctttcctaatccccttgggttatctgtgtttcctgagtattccactgcatcttatatttattatgacagaagtaatatattatagctgcatctttagttatttgtctccttaattggttggggagtcccatgagaggactgatatatatactattatatctctaacgtggcatgagtgcctgggctaaatggttgaatgagtgagaaaaatgaggctcacctgtcaccacccgtcaacttcaggcttgtttgctacatctcattgtgaagcctgagtcactctgtttccactcacactgagataggtggtgacttcctaatggaagtaacatgggcatgacaaggggcagggcataaggtacaccaccagggctgatgctttactctctgttcatggcaggcaaacaaagatgctacagctgaaagaattgatgagttcattgtcaaactgaaggagctaaagcaagtagcctcccctttcactctggtgagtattgagaggctggagttgcccttgattaggggaggagggaccattaagactgctgggattttccactgtgatgcctgcgtggtctgatagtaggtgatgtaggattgtttatgattttcttttgcagtgactctctcttctcccatttgttagatcattgatgatccctcagggaacagttttgtggaaaacccacatgctcctcagaaagatgatgccctggtgatcacacactacaaccggacccgacagcaggaagagatgctggggcttcaagtaagtggactgaaggatccagaagaatgctctggaattatcgcgcactctggattgcttggagtcagtggaacttattttgctgctgctgctctgtgtgccctatctcagcttgtttgtgcttctcatcttgcttatgtccaggacttgggtaaacttcacagaaaggatggcagtggctgtgatcctatcttaagtcctgttcttcctttggttggggctttactttgtggtttctctaactgatgaggtggcacctgacataactgatgaggtggcacctgagcatttctcccactccagggcagggtgttggggacactgaggtatacctgccaacttgcgacctgcatctttgctattttaggaagaagcaccagcagagaagccagaagaggaagatctcagaaatgaagtgagtcacattggctactggtgaggaaggagcagagttgtgggctgagactgatgctgttcagcatctgtcttccttgtcaccaacatagatgaccactagcataccaactgagtgtctttagcctgaacatcccatctgggagggctcaccctttgtcctcatgttgtgttccaggtgctccagttcagcacaaactgcccagaatgcaatgyccccgctcagaccaacatgaagctagtacgtatcttttgccaagcagttgggttgctcttcatctgactcaggcatgaagattataatcaggctgggagcatccctttcaaggaaaacacatgctttatacccagtgataaggaagatattatctttgattagactgtgtaccttgggttttgtgttcaaagagaaaattaggccatggtcactaggctgtgtgtgtgtgacctgagccatgccttcaaatgtgtgaacagggattgccatgggttgggaacttgccctcttctggaggactctgtgggctgcctcttgtgaatatttcctgcagttctgggaccagcatatgtttgtgtggggtttggctttgtttttccccagatggtggtcttgttcgcctggaagtagatttccttaactccgttttccagaaatccctcactttaaggaggttatcatcatggctaccaactgcgagaactgtgggcatcggaccaatgaggtgggtgggcgccattatttgggaagaagactagcttaagggtaacccccttttaactatcattcttcctaagtacttcagtactcgggggcagggggtgtagagtagcttgggtctttttcttaggtctagtgcagggtgatgagcccttgaaggaatgggaattagcctagagaagaaaagttagagattctataacttgtttaagacatattaaaggttgatgatatggaagagagaagtcttttgacccactcctcagaggtgtggaagttcagggaggcagactttgacttcacaatgaagaactcaatagagctgtctgaaaatagaatgagctgccttagagaattataaattcccttcccctgagtgtatctgagtataagctaattaaattctttaaccagaatattataaaggagacccacacattggatgcagtggatgaaaggactgcaataaatgcttaaaagtctctttcaaccccaaaagtcttttttttttttttttttaaggkaaattcagagtttattggcaatttgggataagttttggcacgttaccagggttgggcactgttcctggccagctcttggtgtttttggtttgggcgactgctgtttagaaggctmtttctttggtagctattaatgrccctaactgattggatgtccaagcctacactccaggtctcctgggtaccaagtgaggctcaggtcttctctctgttgctcctgactgttatcgatgcaggtgaaatctggaggagcagtagaacccttgggcaccaggatcaccctccacatcacagatgcctcagatatgaccagagacctcctcaaggtaacagtctgcttgggaaagtcactgttgtcctcataagttagataaactgtctctatctaggggaagttgtcttttagaaataaygttcagggacatgaggtatctcctacttccctggctttgaggacccctgagcagagggagttaatctaagattggaattgcaggtttagaaggtgaccctgttagctctttctgatgacctggtagctttttggcctccagtgtctatctgggtcctcttctctgtctgtcccctagtgacaggatacctgacagctcgaagctatgactgagtttccctttattaagttggatctattcccgtggttcagatggacaggagtgagtctcaagctttaacaagggagtcagagaaaactgagacagctgcccttgtccgcagtctatcactgctggtattaattgggcaggaggcctctggttggctttctttgcttctgacttaaagcttaaactracctctcatttcacagtctgagacttgcagtgtggaaatcccagagctagaatttgaactgggaatggcagtcctcgggggcaagttcaccacactggaagggctgctgaaagacatccgggaactggtgagtcacttgagtagtgtgtaaaccacctttgagcaatttggctgtgtgaagagggactggaagacttcagacatcctaattttcggtgctggtaactgtgggtttctttgccttaaagctggtttaagagacttaaatattactttggatggtgaagacaagtttatgggaaatgttgaatggaaattccaggcctaactttgggactttatagttattttgtggtcttggacaagtcatttattttactgtaaagttaggggatgagggtccttctagcacctaaaacttcccaacataaaaaacatacatgtatgggttgacttagcccaaatrtttatctccttgatgaattatttcacttgattctctgttgggcattttgtatttgtaaattgtactttttctttgcatttcttctccaaattagtatcagagatcatattctaagaacatgtttcgattttgttttacattgccagttttgttatcttggcacattatcccatagactcctaggagtgactgccttggtcagaaaggtggtgtgggctaaatggaaaccaagtttccctgacagggcacccactgtcaccccctgcctagtttatggtcaggcctaacaaatataaagccagtattcacatagtttggattatcatttattgcaggtgaccaaaaatcctttcacactgggcgacagttccaatcctggacagacggagagactacaggagttwagccagaagatggaccaggtaagaggtcactggccagtcagtacttagaatcctggggctccagtgaacaggaggctgcatgctcatgtcttgccactttttgaacatctaaccatcatgttggggattcttcttctggttttcttttcttttttttttttttggagacagagtctcgttctgttgcccaggctggagtgcagtggcgtgatctcggctcactgcaacctctgcctcccgggttcatgcgattctgctgcctcagcctcccgagtagctgggattacaggcgcacaccaccacgcctggctaattttttgtatttttagtagagacagggtttcactatgttggccagactggtctcgaactcctgacctcgtgatctgcctgcctgggcctcccaaagtgctgggattacaggcgtgagccaccgcacctggccctcttctggttttctatattccatgtcttctttcttgtttttctcccttattttgttagagcatcttctccagtagcttcctgggaaaaagtgcatgggaaataaaatttctgggaccttccacatctgaacatgtctttattctrttatcacactagagtgattattggctgggaatacgattctaggatagaaataattttttatcagaatttcgaagactgcactatggtcttccagtttggtaaagacattgtactatagtcttccactttggctattgagaagtctgaagccatttgattcctggtcttttatatgtgacctagtcttgtgatctcttcgtttcctttgatgtgaaatttcagggtgtgccttggtgtgggtcagttttcatccactgggctaagcacttggtagatgtattttttcagtctggaaaactcatgtggttcagttctaggaagctttcatgaattattctattgaagattatcttttttctgattttttttttctgttctttctgaaaactcctgggttttagatattagacttacttgtctggtcttctataatttactctttttttggtcctatttttggtttcttggtttttttgttcttctttgggagattccctcaactttattttccaacccttcaattgaggttttcatttccactaaaacttttattttccaaggagctttttaaaaaatagcatcctgtcttaaggatgtagtattttttcttcttgaggattattattttttaaattttttcagcatgcagtttatatagcacttattgatactgatgttggatcttttttgacattttattctccttgcatcctttttttccccatttgatttcccatctttcagtgttaagggctttgctcagatgtctgataatcattgattgtcttcttacaagtagcgggctaaagacctgagtagggggtgagccttgttgacmtggggcttattacaggggaatttaacttagctgttttgctgaggtggcctccaatgccagaattgttaggtctttcctcttgggctagtcagacaaagaggctatgcctgccagacaagaaccaacccaatttatattacagaatcctccaaagttttaagaattggtgaaattaggtagctctgaaagtagaggggaaaggatctaaaataaggactgttagaaaagccaacatcagcaagctgtggaccagggggtgctggcccagttgaaggtagagggaaaggactcaagaacaaggaggttaaatgactgtggctgctccatttcctggcctgagggtaaagacttggctggcagtgttctgagagctgtgggaagggggctggggtgtgtatgtattctgtttcccataagcttacattcatttaacctacttgttcttgattcctttccctctaccttcaactgggccagcaccccctagtccacagcttgctgatgttggcttttctaacagtccttattttagaacctttcccctctactttcagagctacctaatttcaccaattcttaaaacttttggggattctgtaatataaattgggttggttcttgtctggcaggcatagcctctttttttaaaaatttttctttactttcatttatttcatttctttttttatttatatatatatttattatacttaagttctagggtacatgtgcacaacgtgcaggtttgttacatatgtatacatgtgccatgttggtgtgctgtacccattaactagtcatttacattaggtatatctcctaatgctatccctcccccctcccccgacatagcctctttttaccaggggttatgtaaaatttacttgctgtgttctctctctcctttagatcatcgaaggtaacatgaaggcccactttattatggatgatccagcaggaaacagttacttgcaggtatagtagaccttccctgatgtttcatagagatacattttctgatcttccttgaatatgtatcatttccctagaaactgaaagacttgattctaaatggactgctttttaccaaggaggcagaagttagaagatacataagggagaaaagaggggggtgtgggaggggattttttttttaagtgtatgtaaagaaggaaaaaaaaaggatactctgaggccccttttttttctgtagtcaagctcttgtcccagttctggagttttcattttgcaaatctgattatggattgaggagaaatggtaccttgtccggaggccaagataggaaactgataggctttaagttgactgaggagagagtctggtgattgatgtacctttaccatttattggatacttaccatgggtcaggcaaaactcttctaagttctttccaagattaagaccatttgtcatacttttcataagaaggtgcagatataacaaaataggtggattgttccctgattctggggctggggtcttctacccctggcccatgtgggctctgttgctacccactagttcagtctagccatgggaaattggaggccaataaaaagaaaaaaacccaaaactcattctgttcttgggaaggtgggaattggaagctgcctgcagagagggggagtggcacagcggcactgattgtctctccttgaccttgcagaatgtgtatgcgcctgaagatgatcctgagatgaaggtggagcgttacaagcgcacctttgaccaaaatgaggagctagggctcaatgacatgaagacagagggctatgaggcaggcctggctccgcaacggtagcagtgggtggctcaagggccagcctccagcgctgctctttctgtaggttatttattagtattggatgaaggcgaaggctgggagtgtctttcccaccagcccttgcccatggtggggaggacatctggtytgagtcagagatctgtgcacactttctaaacagcttgtgatgcaagtgtgagcctattgtgttacttgaccttattttggaagttttgaattggcctaggaggaaacccagaaatgaaccaggggtatgtcatcacttttttcatatcaagtcctcaccctccttccacataatgctctatcctctaaggttggaactctgaagttggagaaggtggaataaagttacacctggagtttgttgttggttttgagtatataaaatactgactttgaacaggaaaggagtctcctgaggggagaccgagtccagcacaagtgaaggagttaccattgaaatgatgactttcaaacagcactggcctctgtattgaccytatccttgtttgatatcatgctgttagaattcagcctcctaaagaaaattttcccgtgtatctactgtaatttggggattgcagctggcatttaattcattccttcagcagatgcttgcttatctactttatgccaagcacaccacagaacagaggacaaaataaatctctttcatggaacttgaagtctagtggggaaaaatgacaataaacagatsaggaaaacagtacatcrgatggtgattagtgtcatggaggaatgtaaagcagggaatggggctgggttgtgcaaggaaatggggagtagggaagatcttctgaacaagaaggtgataatttgacatttgggcaaagctgaggaggaggtcagggagtgagctgtgtgggtatctgggggaagagatttcctggcagagggaactgcaaatgctagagctgtgaggttagagccagtgggggtacctgatcagttagccctactctcagttagaaatgttgaaacacattcatccagagagaaaggaggctctctgcagttcttctgaaagttaaggaccagtgaacactctgctgcttgggccctggacttcccagccagtgttctttgcactgtagtctcctgcctctcataaacaaaaggtgactcctgtggtgcagactgcagggtatttgttcaataaagaccagttcattgattaagatgttatcacaaaccttattgctttgtgttgcaaactttttttttttttttttggtagagacagagtctcgcgctgttgcccaggctggagtgcagtggtgtgatcttggcttattgcaacctttgcctcccgggtttaagcaattctgcctcagcctcccgagtagcggggactacaggcgcacgccgccacacccagctaatttcttttgtattttagtagagacggggtttcaccgtgttgcccaggctggtctcgaactcctgagctcaggcaatccgccagccttggcctcccaaagtgctaggattacaggcgtgagctaccgcgtccggctgtgttgcaaacttaactctgaagaatgagttagagatgatttagcaatcagacatctactctcgttgctctgttaaactactctcaaaggtcacaagtgattttccacttggaaagtgttatctatttctgtcacatttgatagtggaccatctcttcttaacccttcttttggctctcgagatactgtacccttggttttcccttcactttgaatatttcttatttggacactttgcctcctcccctcttactaaatttgtttctgagagttctgctttcagacatctctccatatcagattctttggcatcttactatcatgtgggactaacttccatacctgtatctctaatttctgtaagtgagggcgagagtaaggtgtttggagactcaggttagcaaatgactcattcaaactataaagcttcagtactttgggcaaacttctcacaggcaactattctaccctaagagattatctctagatatgtttccagctgacttgggaatctaagtttaccagacaaccctctgatctatcatttggtctcttaagtagacttccccatagtgtaggtgtgctctgttaagataaactgcagtatcaggttcattttccattgtgaaggaaaaaaaatggcactctggcttattactgaatctcttgtgagtttggttggtgtgaggcaatctcccagaatccacccagttcctaggaaatgatgacctgagtttctgaacttgaagactgaggaccaggtgccagactgggataacccagctaaggtacttcctgccctttgatgacaaggcattcttcagtttcatacccttctcttgaattatctttcagctcctttctcatttcataaagtgtgtcaggatgggagcttacatatagttaactgagtcttgctccacagcacccagcatatgacacatggttaataaaatctgttaaaatcctccatcatagattaaaccctattaggacactagggataacatctataggtaaaaagatagggaaagggtctcgctttaaggccagggtaggtgagtcaaagtgccaggaacatgtggattcagtttcacagccatgagtaacatttaagtggaaaaggtttgtgattgtgttaaaaaaggaaagtggttcatgcatgagggcacgcctcctactttcatgggtcaagtatgtgaaatgcagccatgttcggtcattagacgtgtggacgaacatacaggtaggtactgaatgtacatctgtgtcatgatgagtggaggaggggaggtgagtgttgggagcaagtatgaagggcagttgacttggccaactgaaaactttaatgatggcaacactttcattctaacatcagtatatttccttctttgtacacctgtggtatgtgcctgatgcacactgcagaaaatggtgtctctgcttacatttagggcagtggtggctaagactacttggctttattcctattaaaaaatgttttttacacacttctttttaaggcaaatggcagtgtttccaactgtggagagaaaaagctgcttattttgtgcgttcacctcagtttagtattggcacttccaatgcttgttttcctagtctgtaaaatggggataattaggataaacaaaattatccccattttacaggtgacaaaacagcctcagagaggttacttccagaaggaagcagagcttttttttttttttttttttttttttttttttgagacggagtctcactctgttgcccagactggagtgcagtggcgtgatcttggctcaccacaacctctgcctcccaggttcaagcgattctcttgcctcagccttctgagtagctgggactacaggtgcacgccaccatgcctggctaattttttttttttttttttttttggagacagtcttgctctgtcacccaggatggagtgcagtggtgcgatcttggctcactgcagccttgcctcctgggttcaagcaattctcctgcctcagcctcctgagtagctgggattacagacgcccaccactgcacccagctaatttttgtatttttagtagagatggggtttcaccatgttggtcaggctggtctcaaacccctgacctcgtgatccacctgccttggcctcccaaagtgcagggattacaggcgtgagccaccgtgcctggccagaagtagagcttctaagaggcaggtgtcaaacccatgccagtcagactctgaaacctgaggtctgaatattttaagctcagctccacaattactgtatttgttctattagatacaactgcagagagaggccaaagctcagagcaggccattggcacggcatctgatcctgcttaactgccctgcagcacagggtggagacacttgggccttgtcaggctaagggactggggtaggatgggtagcagtggaattgaagacaaagaaaacaaatgggcagaagatgggtgggtggaagttcagagggctatcctggcagtgttcactggagcagaagtgtgaggctttctgaatgcctgctgacaccagggtggggcagggctgtgtagtgtgagatgcaccaaattggacgagaagccaaggcaggcttgtgtatggggtaccctggggccctccgcctagtgaagccctatcttctcagcccagcgtcctcgtctcacaagccctcagagccccagcctgctttcctttctgggcctgtgctgcaaccccctcaacatggcccactgggtaaaaattcatgcttcaagactgatccccaagcctgttttgtattatataagtaaagaattttttaaacacttatccccagataatgtgtatttatttataaagtatagccctgtctgcttgactaatatattaaaaaagtgacctttttgactcttggtccaagaaactattgtttgcacttttgtgtagttgtgtatagcatcctgcaaattctgtcagaagtctgtgatttcagtaacactaaaacttctctctcaaatggtacaagttttcagttttaagacaagttctgggaatctaatgtacaacatgttgactatagctaataattctgtattgtttacttgaagtttgctaagacaaatttgcttaagtgcccccccaccgaactactacataaattagtgaaggatgttttacttaatttgattttggtaatcattacacaatgtataattatatccagtcatcacattgtacaccttgaatatatataattttttgtcaaataataaagctgggaagaaaacgataaaactgacaatctaacatatatgatgaggtaaaaagatctggtatttcaagaaatttggatgacctcttgcaccccacttcgctagcctctactccctagagtcatgttctgactatgtgaagttgagcaacttccttaatcttgccacgcttcagttcttatctgtaaaatatgataatgaaacgatttgagaattgtgagggttaaatgagataattcaggtaaagctctaaaccccctgcaaagaataaagtcttttctttccccccaaaacttgagtgttagaattcattctctctggtttctctcttttactatgctaaaaaatgatccaggtccgtccttctcattggcaagattgttttacagtttccttcaagagataactgggggctacttgtaatagaacactagaagagttacacaggtcttagaaactacgtttttcatagtaattatgttggtttgcacttcctggcttcctttcttggacggtaggtacctggaagcctagtggagcagattccccccacttaaagatacttataaaaataacgaacatagttccgatgaccatgtgcccaacaccgctctgcgcacttcacacagtaatatcatctcagcctgtgaccgttccgagttaggtgccgggattctccctgttttgtgataacttgcccgaggtcgtacagctagccagctatggaaccagtattcaaactcggctacgctgcagcccgtggccctccactttcttgctcgtgctctggagtttaggcggccgatgggggcggggtcctttgggtcaggttgtggcctcatagaacagcgcttgctgcggttggatggatgggtgggtgggtgggtgagtgaatgaagagaagaaacctggtggcgtcgtcccagggctgtggagcgccccgaaggtgcgcacgtccctggctagcctgcgagcgcgtcccggtggccgcacctgccagccgcgcgattcttagcactctccgccacttccggccgtggccccgccctgtcgggtggctggcgtccgttacgcgttgaggcattttgtccccagcgccgacccgtctctctgcccccgccgctgccatggcggcagctccgccgctttccaaggccgagtatctgaagcgttacttgtccggggcagatgccggcgtcgaccggggatctgagtccggtcgcaagcgtcgcaaaaagcggccgaagcctggcggggccggcggcaaggggtgagttggtaccggccggggcggggcctgcgacgtctagccaccccttcccaactccgccctcggccgcccggcagttccttccctcttggcgggtctctcggcttctccgccgacccctgctcatgctcagggccccactcacatcgcttgaggccccccgccttgcctctgccgccccgcttacatctcgagcctctgagcagtagcgtcagtgcgttaaagccggggtgtaactttgattactcttttcccgccttggtagacttccgtcctctcccatagagaatgaatattgtgcctcgagaataatggagcggattcaaagcctctgtgcttggatctttagggcccggtacctgcctgtggggattcccagatcccaaggacttggttctgaatcagagacctttgatcacctcctgttactcttagtaatagtcctaacgtgagaagctaacatttatatagttatacttttcttgccaggcaccattataagaaatttaaacatatataagtttatttaagcctcaccacactaccatgaagtgggtattattttcatatgggacaactttgtggcccagtgtagtgggccctaccaaatcgttttccacccagaaccacagaatgtgacatttagaaatagggtctttggagatgtaatcagttaagatgaggtcatacttgattaaggtgggtgccaaatccaagatgactgtttgccttttaaaaagagggaagtatggatacagacacagcaacaaaggaaaaacgaccatgtctagatgaaggctgagattggattggatttatgttgccaaaagccaaggtatgcttggggctaccagaagctgggagaggcaaggaaagattctctgctagagactttccagggaggatggccttgcagacacctggatttcagattgctagcttccagaactgcgagagagtttctgttgttttatgccacgcaatttgtggtactttgttacagtaaccctaaggcactgagatacccagtgaagtcacattgttctaaagaactagtccaagttcttttctggtttggtgcttgccttattattgtcttcgtctttctg

SEQ ID NO: 5779 - DNA, 14611 bp, Homo sapiens
gtttccttccctttttccccttgtctccctccactggatccttccagaggatgctgcatcccactggcgccagtgctaaacactgctgatgttggcaaagcagtatttttcccagtgaccttggttttattatttttaattccctaggtccatgtcaatgttgtaatacagtcaattttacagtccacagaaatgatagcgctgccttgagaggcatatggcaaaggggtcacagtgcagagccccagctctatggcagagagcctcacccacctccctgcctccacatcctcaccatggaaataggagcactgttggtacctacctcgtgagggcggttctggaattactcaaacacatcatctaagatgctttgtacagggcctggcacattgtaagcacttgtcagttcctgttgcacagcatcctccaggccctgtttgcagagttaattgcttctggtactttttttttccttttttttttttttttttggcagggggggtaggggggttgggacaagagtcgtgctcttttgcccaggctgcagtgtagtgacgtgatctcagctcactgcaacctctgcctcccgggttcaagcgattctcccacctcagcctcccgagtagctgggattacaggttcgcaccaccatgcctggctaattttttgtattttcagtatagatggggttttgccatgttggccaggctggtctcaaactcctggcctcaagtgatcctcccacctcggcctcccaaagtgctgggattacaggcgtgagccactgtgcccgaccgctttctggtacatttcttaatgtcctgtgaaacttcacctggaatgggatttgctgggaattcattttgtagacaagggaaggatgcagtcttgtcagatatggtgacttaaggatcatcttaaaggatttaggtttcctaatatcgccaacagccacatgggtttaaatcctcaatactggtaggggctgggcatggtagctcacacctgtaatcccaccacactcagctgagttttgaagttctgttttttgtagagatggggtctcactgtcttgtccaggctgctgaggcaggaggatcacttgagcccaggagttcaagactaacctggacaagacagaccccatctctacaaaaaacaaaaccccaaaactcagctgagtgtgtggtgcacgcttgtagtcctagctccttgggagtctgatgtgagaggtttgcttgagcctaggagttcgaggccgcagtgagctatgactgagccaccgcattccagcctgagcaacagagcaagaccctgtgtcaaaataaaaaagacctatagaagcattagtgcttggggtaactattagcatgtgctggcagagaaggtctagtgcctttaccttggtgctaagagtccctccagattagtggctttcccgtgccctttctcttctctgggctgctaatgccttccttccccttattagtaatattactgataaacaaattgtacattctctgatctcacttcagaggctgtttctgtgcactgaagatgtacacacagtcttaattcaaaagagatagcatttatgtgctgccacattaaacagattgcaacagtattactattgagtttgtgttggctctgtgcaaccctcatggtgcccaggaacagatgaaaccaccagagacttggagcctcaggttcattcaatggtgtcccagggaacggggttggagggcttattcccagaaggcctctgaaatgtaagagctattaacaaggagttataagtcatttttggtagctataggcccaggcaatgggtagagatcaagatgggataaatggtaagatcagtagagtattgctcagataaatatgtaagctattttactggcacactgtatctagtgatattaacatgataagctataggtaggataatttctcatcagattgcagaaatacatttatagcctatttcctgttatataatgaaaagctactaatggggtagtagacaatgatatgggtaatagcttaaacagccttcgttgtcacttacctgaattcaggaatgacaggtttctttcatgcatgaggtactggatacattaaacacacacacacacacacacacacacacacacatatggcattgagttctagtcatatcctaaagaaaaactatggtgcgctatgttatttatagtactatactctgtgtgagtgactctgtgtgtatgtgtgttggtggaggtcagggatgacttgtttgtaatataccttaaggaagtctgtccgaatttgcccttcaaatactaaataaattcatctctcacctcaaactgcctttcagttcccttttactaattttgtttaaaagaaaggcaagtgaaggccaggcatgggggctcacacctgtaatcctagcactgtaggaggtcaaggcaggaggatcacttgagctcaggagttcaagaccagcctgggcaacatagggagacgccatctctacaaaaaaaaaaaaaagaagaagaacctgggcatgtggtcgcatacctgtggtcccagctgcatgggaggctgaggtgggaggattgcttgagccagggattgtaccactgcactccagcctgagcaagaccctgtctcaaataaaaataaaaataagacagctattttaccctgtcttcacctaaataagctcatcttattttttgcctgaaactcttgcaaactcccaggtctgctagttttgagaaaccttggatctcaataaggaatagttctcaattgcttataagcataatggatttcttttggcttaaagttcaaaactggcaacaagcagcgctagcaacccatagagagatacgcagaccatttcgatagacgtgtttgctgagtgaacaaggctgactgaatttttttttttttttgaggcagggtctcactttgttgcccaggctggcgtgcagtggtgcagtagtggctcacagcagccttgaccttctgggcccaagtgatcctcccttctcagcctcctgagctcctgagtaactgggaccatacgtgcaccaccatgcccagctaattttttagatttttttgtctccctatgttgcccaggctggtctcaaactcttggactcaagccatcctcctgccttggcctcccaaagtgctgggattacaggtgtgagctactgcgcccatccctgaattcttaattacaactaaactagatgcttatggattttcctgttttacaactcttgcctcttttatctgtaattttaagatcttgacagcttatatttggctttgcttttgtgtctcaagagttctttccttgataagcctctgtggaaactacagaatcttacaaatataaaacatttccggaaaaaatacaaaaatggacacctgacatttacactccctaaggtcgtgatcctgttgaagaaaggagatgaacgcggctgcttttcagtagttcttcacttcaccttaccaggttcttcatctggatgctatgctatgggggccagaggaggaggctgggattgtgatggatcctactagattttacagctggagctcccaggaatgccctcatagggaatgtcctgaagggaatcatgggtaacttgtaagctacctcaacttatttttggaactatgtaaggtataagatggatggagctgggttcctgtgcctttctcaccttgtccgcatagagatgcagctgctcctgcaggccaaagttctgcaccaatcacctccacctgcttcccactgggagacaaaggtttgaaagcctgtttggcgatgaaccacgatgatctgacactcaagccactcctgagaaagtcgggtttctttctgtttccatttatatatgtaattttcgcttcaaacaaacatgacctcgctattctatgcacagttttgaatcctgcttttaaaatgcgatgtctgccttgtctttaaatattctgagggggaggagaggagatgtgtaatgcgactgtctataatttgaaaccggacctcactatttagcgtctcagaaaacgcggggttcattgccctggtcccccccgccttcccccgccccccgaaccttccggctggctctcttgcggtccccgcctcggcgctgatgtggtctggcagtggagattggcgcccgggcggagcacgatgggcttccccgcggcaggcaggcaggctgctgctgcaggtgggtcccggcgcccgcgccgccccgcgcctcccgcggtcgccccgcccctgcccgcccgctccgctccgctcgcattggcgctgcctgctgtctgtccccgcgcggtggggagggggcgcacccggcggcgggctctgcagagggcgccttgctccgggtgcgaccgcggctccctggaggcctgggcggcgggccccgcgagcgcgccgccacctcgggagcagtgttggccaaggaccccgacgccctacgtaagtaaaggcagggcggggagcctgcgggggaggagggtcgggggcaatgtccggtccgcggaccgcggagtgggcaagaggtgcccactggatacggggtatccgagccctctgaggtgctgggagtaagaacgcgggaggtcgcttgtccgctggaatccgcggccagggcgaccctcatcaggtctgcccacctatccccttcgcgttacagcttgtcttagaagcatgggttgccggtggcttttttccttctttatccctctttgagaaatgtgattttgggtttctggccattacattataattctgcagacagcctgaagctgggttatctgttccacgcccccggcattttcctttttgagtactttatcctgcgctctgtctcctgccataaggggcgtcaagccagaattcgagattccttcctccaggaggaagcttcgtggtccgtatctggtgctgggaaagatgcattgctttcctcgggtactggctgctcaagggaaaaaggaaagggggtgttttctgtgacatgagacttgcaattccatcaggaaatgagcacagggactttaagatttcctgaggcgataaagctacccttgctggttaagagcgaatcatttgcagtctgacattctgcaaagttttattgtctacagactgcattattttccctcgttagttaagtttctgtttgggtattcgttttatttctagtatgtgagatacattcaagtgagcttctcaaacgattgtctttgcgcaatccaggttagtttccaatgacagactcctaaacatctcatttcaatatttctattatgtggtaatacagcctctgcttaacaaaaatgctcaggtgctgaaaactcacaagaggtgagaagatttaaacagttatcagcttaggttctagtgctcactgaaacattgtgaggagaaacactgtcaaatgttcatattttagttccgtcattgttctagaatgactttatctttctgttagaggcacacagtatgaaacacccaacctaagataatatttacttagatcataaactgattttcagggttccagttccttctacagttcataaaattatgggttacccaaatgaaacttcagtgaaggatttacataaaaacaatataaagaatgagtccctttgcttattttagggcatccacccactaaaattcataggatctttgttggataatcacctcccatttccattctttggtgccatcataccattctaaggattaaattttcaatacacctttatattatctaagtttgccaattgcatagtttgccaacttatttttggcttttaaattagttcctgaaccaaaaaaataaaatataaagaatttcaaaagcttggttttcaaatgacaagaactcagtctactcgtggttcaattatgagttgataagtgccttatggttaaatgaccattaatcaattttttaatttttttactaatgaaacactgcagattagtatccccaaacaattcattttctgacgaaactcttaaagcccagtttcagaacataagctttaagcaacaagcaatcttgtgttaatctgagctctgttacagctctgccgtaatctcagccaaattgcttcatctgtacgtggtgataccaccatctttgtaatattgtggtgaggattagagatgtatgtaaaagtgcatgcactgcctaatacccaagaattgctcaataaatgtcagctattactactcttactgacttccaactatgtgcagattatggtggaaacatgtgatacagcagatacagtacttaaatgaaaatgtcaaaattgtacaactaatttaagagtgggaaatgacagtaatgctaaattttcctaagaatatgtatgaaaaatagcacttccttgatggaacatacatttttagaacagaaaccttatgttataatggtaaaactagagagtcaaagtctctagttctaactctggctatgaccttatctagttgcatggcttttgacaagacaactgctcccctctggagttcagttttgtcatctggctggatttgagtaatctcaaataatctctaaagtcctttgcagctttaaaattatctattgagtgtgataaagattacatcagcttgcttttcatcctgcacttcatttttggttcttgttgtttgcttaacttgcactttagagtcataagcaattcacacagacaacacaactaaagaactgataatatcagacttgcagggtaatccaaaatgaagtttcaacaaggaggataaaacaaaatagaatcacactgaactctttaatagggccaaagtaaaccccaatgtttattctccagtcatttcattaagttattatatggaaaatatgcctggtagaatcttatacattcactgaaatagtctccacagaaaataataggctcatagtgaaataaaataccactttcttttctctcatcaggttgatctttaaataaagcaaaaatttatccaaagaagggctttcatcaagaaattaaagagagaaattacaagccatagagaaactgggcatttctatactagagaaaccacctaaaacaactgtatggagtaagatgaaaggtatgaatatgcctggaagaaattktacctagtgtgacatttttgctcatctttttgtcacaaaaggctgctaaggaagagagaatacagttttctagagaataagagtgcagtgtaaaaatggaaaccacaatttcagaaattcatgtagaaaacaaggatgagaagagatcagcagaaggtagtcctggggctgaaaggcagaaggaaaaggcatccatgctttgcttcaagagaagaaagaaagcagccaaagcactgaagcccaaagctggctctgaagctgctgatgtggcaaggaagtgtccacaagaagcaggagcttctgatcagccagagcccacacggggggcctgggcctcactcaaacgtcttgtmacacgcaggaaaaggtcagagtcttcaaagcagcaaaagcyattggagggtgaaatgcaacctgcaataaatgctgaggatgctgatctttctaagaaaaaggcaaaatctagacttaagattccctgcataaaattcccaagagggccaaaaaggagtaatcattccaaaattatagaagactcagactgcagcatcaaagtccaggaagaagctgaaattttggatatacaaacacagaccccattgaatgatcaggcaacaaaggctaagtcaacccaggatctaagtgaaggcatctcacrgaaagatggtgatgaggtctgtgaatcaaatgtgagcaatagcayaacttytggagagaaagtgatttcagtagaacttggattagataatgggcattctsctattcaaacgggaactctaatccttgaagaaattgaaacgatcaaggaaaaacaagatgttcaaccccagcaagcaagcccacttgaaacttcagaaacagaccatcagcagccagtactttctgatgttcctcctttacctgcaattccagatcaacaaattgtggaagaagccagtaacagtaccctagaaagtgcaccaaatggaaaagactatgaaagtacagagattgtagctgaagaaactaagccaaaagatactgaattgagccaaraatcagattttaaagaaaatgggatcactgaagagaaatccaaatcagaagaaagcaaaagaatggagccaattgctattattattacagacactgaaatcagtgaatttgatgttacaaaatctaaaaatgtccctaagcaattcttaatttcagctgaaaatgagcaagtaggggtttttgctaatgataatggttttgaggatagaacttcagaacaatatgaaacactcttaattgaaacagcctcttctctagtcaagaatgctattcagttgtcaatagaacagctggttaatgaaatggcctctgatgataataaaataaacaatcttctacagtgacttactctccagagtcacggcagaaaaaacaagcttaatgaagaattcttttatacatttgtggcatttcttactcagtaacaaatgagagatttatcatctctagaacttaaaaggtacaattccagcgcagaagtgctaaagattaagtcaagtttataaaactctaccactgaaatgcagtcacttctggattggaggaagtcagcacagattgcagtgtaaaatgacataacatacagggagttgctaaaatggcatatggagattggagtgctttgggggaggaaggtgtatttattgagcacttatggtatgccataagctttttaatgacctctgatataacaaagtctggtttccttttgataattcagctctgtgtataggctaacatcacattaagtttttaaaaacttattttttacagtgcacatatatgtttaaaatggtgaataaggtgagctacttttgtgaatgtgatttgtaattgttacattcctaagcagcaggcttaactcaaaaaatacattgcattttcccaatttcagcagatagtgtgcagaatatgcatattgatattaaacgtgagtggtttcctagtcttaagtctcttataagcgctatttggccaggggcagtggctcacgcctataatcccagcactttgggaggccaaggcgggtggatcagctaaggtcaggagttcgagaccagcctggccaatgtggtgaaaccccatctctactgaaaatacaaaaattagctgggcgtggtggtgcacgcctgtaatcccagctacttgggaggctgaggcaggagaattgcttgaacccgagaggtggaggttgcagggagccaagattgcaccactgcactccagtctgggcaacagagcgagactccttctcaaaaaaaaaaaaaaaaaaaaagagaaccattcacaaatccttcaatcaggcaaattgttactaagtgcaaaagtgtagaaacagggagagtgggtttttcccccgcttttctttctgcctcaacagatctgtatatatccatttctgcatggatttatctgtgaaaagttaaaaaatgaaacagcaaaaacaaaacaaggggaatattattcttcatccaggagaagggaaaattcccaagtaaattatcacagataatataggattcatcttgcagaattacttctttaagagccatattcatcaacttctctccaaagaggggagagtagattcaaagccagcctggtagtaatggtcctggaaaatcctaataatctagtgcaaatatttattctcggccaaaaatgagccatgaatgtgggtgaatagaaaagtgaaaagttattgctaaagcacattataatttaaatgtcagtattccttcatgtctgtgtgttgagaccagtaaaaagcattttacatgaatattgaaagttaactttttcatcactattttcttttcttttttttttttttttgagatggagtctcactctgtcgcccaggctggagtgcagtggcgcgatcttggctcactgcaagctccacctcctgggttcacaccattcttctgcctcagcctcccaagtagctgggactacaggcgcccactacaacgctcggctaattttttgtatttttagtagagatggggtttcaccgtgttagccaggatggtcttgatctcctgacctcatgatcctcccgcctcggcctcctaaagtgctgggattacaggcatgagccaccgcacccggccttcatcactattttcaatccagatatactttacaaaaatgagaagggcttatttgcatttttatttacatattgaaagggaagcatctgatctcatcaatgattgccatattttttgaaaaagtaatcctatttcaatctttccttgtgtgaaatggccataataccagagtgcacttccctacctcacaggttaggattcaaagtgtgtattcccccattgtgtaaattgagtgattgtgttactacttgaaacagatgaagtaataaagatgaagtatgagatgtaaggtatttgttcaagagctccacttggaggaaataatgcacattagatgattttaaatgatctgggtgaattcttgcattgtgtatggattgcatatagaaagtatttgctactttgtcctacagaatcatcttcatttctttctgtaaatacatattgagacctctaacaaaagaaactaatctgacttggaaattgaaccaaatcatggatattattagcaagattctttgctgaagtgcaaaaatatttcccccagattttcctaccttcatgcttataatccggggaggagggtggaaatcctgagcaagatgaaaagtgtcattcaaaacacatgacccaagaagtcaatttcttttaattgtacaacttttaaacattaaaaacaaaaaagacgagtcatcttctctgaaaacactctttaactcactatatgtggtgctaatggacttggacagctaccagctatcatatttaaaagtgaaccattttaaaaacctgactaaggttggtgcattttacagtgtattgaagaatcctgccctcatttactgcaaggatgcctccaagccaatacacttgcattgtaaatgtttagtaatctcatgaacaagcaaaaagtatagtacttagcagttattggaaatattttgggggatttttaaaaaaacagataaatggtaaatatgtgcaatgaattttttggttaagaaagtaaaattttatctaatactaggtttttacttttttcactgtggtttgatatatatttttggttagaatgtactgattgtttttatgataagatgtatattttacttgcattcattcttaagaggtttctgtttttctattgagaatatctgttgaattaagtaggatttcagttagaaaaaggaattccgaaattaactggtctcaatctgattatatgtgctacatggccaaatcctattacagtgaattctaaggtgattcaaattgttttattgttatagaaatatgcagaaatcagatggcttcagagtcataaaatatttttcttgtaatagtatttaagcaatttgaccttatatgcaaacgttaagtgaatataaataagttctgtttcaattcatgtccatttaacaacattaaaataattattaggaacaccacatgaattttctttacatttgctgtggtataaattctgcttttaatgaatgtttatttatttattagccaaaattcagtttctctttgaacccagaattttgcaaagctgggggttggggagggggattattagctacttgttaactttttcagcatattatcattcctcttttaagactcaagtattattcactttgcttcttacaacccagagaatgtgaaaattctcctctattttatgtagcactattcacttaacattttttcaaagcactttataggatataaaaatagtacccggtaacatttaagtaaaggtagcagaaaacaaaagaactttcaaacagaaattatgttccctgccacctcctccacctcaaagaataataagcatgtggcataaatggagttgttcagaaaagctgtctgcataattttccttcaaggtaatgtatttgacagcatgaagtttgtgatgatcttacttggtctactactcagcggagtcttagaatctcttttatttacttctgagagattgttatttcaccagtatatgtgaacaggcttgctaaaggcattaaagatatggatcatggaggcaccaaatttggcttctgtatgcaatccagcattaacttcatccatacatttctaacttcatccataaatttctaacttcaagttaccttattttttatagttaagaatgtttttcgaggtttacaacagaatttaaaaaataattgttaggctttagaatcccactgtttgaaaagatccttttaatgtcaactttattgaaatatgtagtctactttctaatttcatctgataatatagcaggatttgatttttctgcctgccatttgtgcatttaaaaaaaaatcctcatttaagatttagagttctttaggttcaaattcctatgatgttttattgggtaacatgaactctcttatacataattcaaaatttcaatccatggtatattttatggtacattttgaaaagaaaatttgtaatgctccttagttacaaaaattagaaggaagctacataaaattcaggtgtcctaattaaattcaatttgattcaacacacgtattaggcataactcatacctaacactatttgataagggagacaggctccctgccatccaagaactcaacctagggagcagtgacaacagaaaccgggttgggttaaggcaaagagccatggataatgctgcaacatgagtggcacagaggggagtacacagagagagcaattaatttggtgtggggaaggtggtgatctgaatacagcagcagtttgaaagtgttccgtttttaaataaacagtatgcttattttgatttgtgactaggtgtagaaaaaagcctgcatagtgttacatatttatagtagttctttgtaaaaatgttaagtggatgagctattatgaaagtaaaagtttcattttttctcattaaaattagtactaaattactatggatcagatgataatattaaatagtactctgtagaaaaaaggtttcaagttgaattaatttatgtactgattattaatacagaataaatgttatattgactcatgtttattcagatcttttaaaagaactgtgggcaaactatgttcatttcctataactgtaaagatcacattgatggaactactgagttcgcactaccaaaagttctactctgctaattgggaattggacagagattttacaacaacactcctaaaacagtccttcagcaagacaaatataaacacctacaatgctgaactaattcagccaaaagggcagttctgaatttgatgacatttgtgaatttgacaaaagcacactgttttcatctcttgatatactcattattttctgcattaacctatgaattgttcatctttatgatttttcaaaagactaatcaatgtgaaaatgctagaattattcagacggtacatactaaaggtgggtgtttaaaaagttctgtgtttactaagacactgatttcattttggtaatgttaacactctatcttttcgtaaccacagcccgatgataacaatcaggctctaggaaggactgtactttccaaatcttggaaccaatttaaaacttgataataccttaaaagtcctaaaacgaatctggcttcaaagcaaaatgtcttcttaatgtacaaacactgtaatagggtagctaatatttcacattttgcaggatttttaaaagttttatggccgggcgcggtggctcacacctgtaatcccagcacgttgggaggccgaggcgggcggatcacaaggtcaggagatggaaaccatcctggctaacatggtgaaaccccgtctctactaaaaatacaaaaaattagccaggcgtggtggcgggtgcctgtagtcccagctactggggaggctgaggcaggagaatggcgtgaacccgggaggcagagcttgcagtgagccgacatcatgccattgcactccagcctgggcgacaaagcgagactctgtctcaaaaaaaagttttattaaatctcttcttggtttaaaaaaaaaaaaaaagatacactacacttcacaaaagttgtcctcacaggcaattctgctaatccctttttagacctacctttaatgctgacgtctggagtccccaacccttttgtgaatacctacttttctttctttcttccttcctgaaagcttaagcttactgggggttaagttcccgagcttaggaaagagagtatgcgtgtctgtgcactacacattcacagaaaatcctct
